United States Patent Application Publication US 2008/0114160 A1 - sequence listing, part 55

SEQ ID NO: 18079 - DNA, 14815 bp, Oryza sativa
tttcttcttcttttattctttttttttaaaaaaaaagaacagggagcatatctccggcttcaattgaaagtatataaagttcacggccgggcatgccctctttgtaaatattcaacaaaatgggagaagaaggttaacaccttaattcatcgatttcacaaaattcctactaaaatgtattcacatttgcatgttcaaacctcaagccgggcttcagggcgggcaagaaaaagcccggataaaaggctaggcccaaattcgacccgagaaataggctttcctaggatgggatcttgctggattttcatgattttgggttgtgaaatctgggcccgagcctagctagcccagtgcattatcaggttggaccgggcttaacatttttaggctgggccgggtccagtttgaataggccaacccataaacaccccccacacagggatgcatactactaacatggtgccatatttcagaatgcaagtaccgaaatttctggatttccccagccccaattttataattaagcaaaatttgttcaaatatcaaactatttctgtcctaattttctgaaattttgcttctatcagctaccccaaagtttttattattatttccgtggtatataacccttactactgttggttgatttttcatatactccctccatttcacaatataagtcattctagcatttcccacatttatattgatgttaatgaatctagacatatatatttatctagattcattaatatcaatatgaatgtggaaaatgctagaatgacttacattgtgaaacggatgaagtatttgcatttttcccttttcaattttaaaaaaagggtaaactctacgcttgatttgatttctactatttaattaatttatacacggatagtgggagttcctatgtgaaatttgctctgttttcttcagcttcagtgaacacattgatgattggtgttggatattcaactgtcttaatcttggacggctgaaaagtccagctcttaactattccttgtctctattgttcaatccattaattttgcttgctgtttcctcacatgatgctatcatcagcaggattattttgacttccctgcagacattggcagcgactagatcacatagcttagccagtgcagtttttatcagggcagggatttgtgggtcttaatcacctaaaatctctctctgtaaccatatccatgctctgacttttgaaagtaaaaactgaccatgtcatgcagtgatgtgtgtgcttctgtctcaagttatccagaagcaagcagtgtaaacgatacgaattttcttcctttttcttgttctttgtgtgatgatagaaaaatggtaggaagtattggaatttcctggttttgttttgttcgtcgttgaatgattgaatcccaagccgtttgaatggtacatgttcaaaagtgcaaaaggaatttggtaaaattcagacatctacgatccttagaccttaggtgtacgttaatgttgtcacacaaggaattcagacacaatggtccaagaggtcaaaacttcatttttctgaatgtttgacaaaaattagaatttcttgtatgcttacttacaagtaggatgctttctacaaggactactttacaccatgatcagatgaaagaacttttaactgaaaaaatgaagtacatcttggaatgaacaaaaatgtcaagattgtccttcagaccattgttacctggcctgtactccactcactgaaagctggtttagcgagaagggggacttgtctgagcttgacttcaaagacgaagaacccgagctgtcgctcttcgcattcgacccctttatgttgatgaatgggggctgggtaggccgaggaagctcattgttcctactacccaacatctcgaccaccttccacatcggtggcctaaggttcggtgaagcttgcgcacatagtagtccaacatggaacaccttgagagctccctcctccgtgcattgctcttggaggtttgggtccaatagttccatcagggtgccttcattgtagtgcttccatatctgaagaatgcaagaagcagtagagtaacttcattaggtttttcgggaatgctacagtgctagtactttgcaataggatggaaatttagcaaaattaccagtgacatgagggaatgcccttctgctgatgaagcaaccgagttgaggctcttccgaccggtgatgatctcgaggactagcacaccgtagctgtagatgtcagccttctctgtcagttgcccatggacaatgtattcaggagccatatatccactgtacaaataaaaatgcatggtcagtaccattttttcagacaaattgcacaatttgatgacaaaaaattcttgttccatccaattaaatacaaaaattcactacatttttaaatgatacgacttacaaagttcccgcgaggccagtgctgaggtgactttgatcttccatgaagttcctcgccaaaccgaaatcggcaatcttaggcctgaacctctcgtccaacagtacgttacttgcctttatgtcccgatgtatgatcctgatctcagaagcattgtggagatatgacagaccctctgcagtcccaaggatgatctcgaaccgccgttcccaatccaatgcggtcttcttgaatgcatctgcaacatcaaccatgaaagatctgaatctatctacattgtcaagtatggcaagttcaaaaattcagaatgcaggaattcttcttcagtgttctagcttagtaccaaacaagtagtgatcaaggctggtgttgcagaggtactcatagaccaggaggctctccggtccctcgatgctgcatccgagcagcttgacaagattcttgtgctgcacctgactgacaaggcgcacctcgttgaagaactgatcggcccactcccgcgtgttgaagaagaggcgctttacggcaatctcccggccgtctagtagcacaccctagcatcatgtcaggagcaaattcaagccgatgcaatcaaattactgttgtacatctgaacatctgatctgatcatcaccgtttcatacatacatgcacacaatctgatcaacagttcaggaagaacctaataaagatcattgtatcaatgttgtttcagaattcagatatagtatatgacattgtaccttgtagactgatccatatccaccctggccaagcttgttgatctgattaaagtcgtcggtcgccttgcacaattcttcatacttgaaactgagctgcgatgcggcgatggtgcggatgatctcactagaaccatccatgtctgaaaatcccaaaattacacaacagagttaaagacttccatcagagattcagacttcagtgtgtaaaaatgtaatagcatcatgttgaagttcacatatgtaccatcatggtgatcatttcttctgttcctcatttttgcccagaccaatgctatgccgatgacagccagtgcacagaagactgaggcgatcaccacgataactatgtgccgtgctgcatgcaaagaaagtttcagaaataaaacgtcagattctttacaatttgttcgaaatggacaatgtttttctacggaatttgcatcttcacaatctgacaacaccaattttcttttctgtttacaattaaattcccatcaacagaagcttttttctgaaaaaaaattgagatgaataattgagcagatcctgttgctatctccaaaattcagacacggcacgcacctcgccggccgtcaaagtttatctccttttttgacagattccccgtgaacattcatgagcaaattgccacgataaagaccaaatttgacaacgttggtacgaaatttctcaagaaaaatgtgacgtgtcctaaatttcaaagggaagagattaatttagatggacttactggatgacccggcggcggcggcggcgttcgccggcaagtagaacggctgcgtggagtacctgacgacgcagccggcgttgagcccgtagccctcggcggcgcgcggcaggcagcgcccgacgacgcggtcgcgcgcggtcgccacgcacgccgcgcacgcggtggcgttcagcgacctccagcactgcgccgccgcgtacacccgcggcgacaccgacggcaacgccgacgccgacgacgacgacgacgcgctgtagtagtagtagtccctggcgcccggcgcggccgccgtgacgttccgcagcaatgcggccgacgtcgcggcgaacgacgccggcgaggagacggtggcgttggagcagacggcggtgtcgctggcgtcggtggcggcggcggtgaagttgtcggcgccgtagcggaggaagcagccgtcgaggtagatccggccgccggtggccgggaggcagtgcggcagcttgacgcggctctgcgcgtagcagagctggcagtcggtcggcgagaggtagcccatgcactggccgaggccgtagacggtgtcggcgccctcgccggaggccgcggcgccgaagccggagcgcgtgacgttctggtagatgagctccagcgtgttgacgaagctgacgtcgaagccctcctggtcggccgcggtggtgttcccgcacaccgtggccagtatcaccggcttggccgcggcgccaccggcgtcgtcggccgccgcggcgacgacgacgaggaggaggcaccggaacgcagcagcggcggcggccaaggagccccggcgttgcatggcggcggcgagcatggactgcacgtgtgggagtgtttggtctctagcttagcttctcagcgtgtgatcgccatggccgtctcggttttgtacgtgcgtgttgatgactaagctgagaaaataaaaaagagagacgtccctccaaacattttttaaaataattataagcgtgttaaaaattaagcgcggaatgttaaaattaaaatcacacatttcttatcattacactatcaaatacggagtgcatcttaagtctaagctgagctaaggtcatttgcactgatcagtagccggatggaatggacctgaagtggttaatgtttacatcgtatataataaatatgagaagagaaaaacaccagcaaatttaagtacaatttgtgaatttagttgaatattttgattaagatgtactagattttatcttaattttcgttagcacgtttttttaaactactaaacggtagtagcgaaaacttctgtatagaagatactacaaaaaacgtgcttaaaatttatcaaatataaatcattcgataaatgatttatctatatatcagataaatcatttatcaaatttaagataattaaaatttaattaattatatgcttatgtgaactcaaacgaggccttgtgatgacatctggatggatgtacataaccgtgagtgcgatgcttcaccagacggccgccgccggcagaactccggtggcaccggctgaggatgacgccgccggcgcgggcccactttaactcgcgcgcgtgacgtgacactgacacgtacgtacgtaggtgcactgtatctctgcgttgccagcttatgcatatccatctcggggccatcgcattctgtctctgtttgatgcaggtgcagcagtgaacaacactagtgttacgtgactacgtgtctgctggcttaattactactccctccgttccaaaaaaaggtaaaccctgggtttttatgtctaactttaactgtccgtcttatataaattttttttataattcataattttattgttgttagatgataaaacatgattaatattttatgcgtgacttgtttttttaatttttttataattttttcaaataaaacggacggtcaaacgttgggcacggaaactagggattgtctttttttgggatggagggagtacacgttgacgttgtggtcgccgtcgtgccagcacgtacagccgccgcccctcaccggccggtcaccagccaccgccgccgccaagcacacgtggtgaaatgtaagtgtaattaaccaagagctaattacaagagcaaacgtattccagtgaacaaccaaattaatcaatcagtcgcgatgaagcgaaaatgtcgtctcgctagctatctttttcttcttcataaatctttcacctttccaaaaaagattgtatgattgtcttcttggattttaaaaatgtgcatggttttgattcatctgttactgctctacttggatttttaaaagattaattgtaggattgtatgattgtcttcttggagaacatagttaggtggaaaatgatggagaaaattatacagagattaaactactttattacagccgtcacggcggatactatattatatactagtctgcaacatatatctaaccaaagttttcaacgttattgaacttgaattcaagcaatctagaaacgaaacgaattttttgactcgttttcatgcagtcagcagcctcggtgcgcttggttggtggtggtggtctgattcattgtctcgtccgcacacgtgggtctaaaaaaaacattccacggtactgggtatgcagagaagaacaaaacagtccatttcatcatcaatcttcttcttttttttttcttttgatcatcttcatctaaggtgcattcatattcgtctccttacgtattacttcgctattggctttttacataacgtttaactattcatattattcaaaaatttagtataaatatgaaagtataagttaatattatagtttattttataataaaacaagtaaaaaaataaataatatttatatattttttaataaaatagatagtcaacatcacgttaaaaatcaacggtattatatattttaggacgatatgatgggtataaataaaggccatggcgcccatgccttgccccaagtaggataaatgtcacgcatggatacatcgtggtaaagatatactctagttagtagtataaaatatagagcaatatacacaagtgaagttgtggatatatgatttttcacattcttgtaagtataagtatagttgtgcgtatcctaagttggtcaagagggttgaattcatacttttattgcttttttaaaagaataccaaagcactgttgtcatattgtggtaacagtctaacagagagaggggcgctcgttactcataagtagaactcttcaaccagcaggagcgaagattcaacaaaacggcaatgcgtgagttaaaattttataaattgctacagcttgcttgatgtctccaacttaatttgctcatctcgtttgatgtggaaaataaatgcaaaatcgtattccatgtttgtaacttgctcgaagtcaaagtgtgcccaataaatacaatcatgcatgtaaagattaagatctcgcggatgatgggtccacgcatcgatggataaggaagtcagcagtagtgcaatcctactcactctttttttttttaatatacgaggtcgttgaatttttttatacttctaaccattcctattattaaaaattaaagatttatgtaattattatttaattattatgactttatttattatcaaatattcttttgtcatgactttaattttttttatatttacatagaaaaattgaataagacaaatagtcaaacatttataaaaattaacagcgttataaattaaaaacgtatgtacctttcggatattgcagtttcaaatgatgtgatagattagtggtggttttaggaagtagaaactctaaattttattcgaaatttaattgctggacaataacttttaaactatatgttcctatcatatcgtggctttcgctgacgtagatttacattggaccagtagttagcctactagtaccatatattagctcacgccaacataaatcttggatatatatatatatatatatatatatatatatatatatatatatatatatatatatatatatatatatatatatatatatatccatggctgaaaaataccttttgaggtttggactttggattgaacattggaagccgaaaattgttttggaacacatgagtttcaaacttttttttgaaagcactgagtaaatcagtacagctctacaaaccgtgcaaaacatgacggaattcacaacatactagtacaattcattcggaaaaaagaaatactcctactaagatattagtagatatttattatattattattttcatataaaaagagacaagatagaatattgcaaatggagcccatcgctggcctcctcattaatggattaggcccatatttaggagtttattccccctagtcttggacccgtgcgatcggtgggcttgggacatctcggcccatgaaaagcccgtgcagtttttgcaattaggtccccgatatctccggaacattccagaacccccttcccttacttttgcccttcccctcccctcgcttcgccggccgtctcgccgtcggcgcgcgggacaacgccgtcaccgccgccgcttcccaccctctctctcgattccctgcctgagccggaggcacgctccggccgggccctctcccccgccacgccgcctcggacgcgcgcggccgaggagctcctcctcggcgttagcaccgctgctcctgcggccggttggatcatccgcgggaggcgacgccggcgaggtgtagcaagaggcgacttggggatatggtacgagctctcatgacctctcctgcccctattaggtttagtaaaacttccctctccctgtagcttcattcactgtcacagcttgggtaaacctagatttttctctctctttttttttttggtttacccaatgtatgctcgcatggaaagtatgaacgtatgctagtgaattggtctgaaatgtaggttcgttttaatggagcatcaggttcacactgataattgtttctttttggtggaattaacttgtctcgatggcatagttcgaggttacttttaggatgcatcaactaattcgatgcgattgcgcaagatgaaaagatgtctccaattcgaacctatatatctattgtcagtgtttgagtttgaaatgaagtggtttttctcttgtgtctgggggttttggttcagtaataaatcagaatatactgtctgcaggaagctagggcaaggacatacgggtcttcaggagcttccccaggaaatctgggtgatcggtacgacaattatgcgaactactcaagctacttaaatgatgagccaatgcctgatgccgcatcagaaaaggaacaggttgggattaagtattgcatctcttgctactctgttcaaactttagactgttgtagagggacaatcctttgaagctaaaacattggttgttctgtttgattttttttcagggtaatgagtatttcaaacagaaaaagtttgcccaggctattgagtgctactcaagaagtatcggactgtctccttcagcagttgcttttgcaaatagagctatggcatatcttaaactaagaaggcaagtagctgcaacactgtgtttgcattcgctagactatggtgttcattaatatgattacagatacttaaaaaccttagttggatctctattctggaaccattatttaataagtactagctaccaacaatttcagactgtagatatgcttttatgctacttgtgatgcgtttcatatttctgctgatatacaatttcgatgtgcttttacatttgctcttggtgtagtcttatatttttttatgtgatattcactaggtttgaagaggcagagaatgattgcactgaagctctgaatcttgatgaccgctatgttaaagcatactcacgcagaattacagcaagaaaagaacttgggaagcttaaggaagcaatggatggtatcctatttttggccaccagtctttccttttttagcttaattgttgtcttgatgaacactgacaagcaggtccatacagatgctgaatttgctgtcagtattgatcctaacaatccagagctcaggaagcagtattctgagataaaagaattacacatgaaggtgaacaatctttacttcagaattttcgtcagacatctgatttaaaatagcttttgtgttactaacaaagttttgtgttgattcctatcctacgaaagtcaatattaatgtgttttaattctgcaggaagtggctaacagaagtaagccaaccaaacatacagtttttaaatttgataaatctggagataaaaaggacacttcccatgcaccaagtagttcccagaaggtaggtttgtagatttacagcttcatgatacttatgtagttttcattgtttatcatcatgtgtaataattaattttctattaatgaggtttaaactatgcacttattaatgaggattaacatgcctgccctaacacattcaatgcacctagtacatgtcgtgcacatggcccaacacttttgaactcaccttgttctgtttatttatagttggttatgttcatcatgggtataatcagctaatttgttttgttgtgtaatacctgatgcatttgcattctacaggacagtttcatggaagttgatccgcctagtagagttgcagtggagattagagagaaagcagatggtacatccaaaggtggatctggagtaatcttcaaagacagtaccgtacaggtgttcttttgctacattgtttttccagctatataacaaacatgcactttgatttgagtgttggtatacttctctagttataccatgcatagttagcgccatctatgataatgtgctacatgaggcagtttgtaggcctcatgtattacctacatatcaagccaccagtgacttagtaggcctgctgtcttcgtaccattgactctgcatcatgtctgcttgagttccagcacagcttgcatcacccctttacttttcctgcttggtttacaccttgcctctgggcctctggcgttgccactatggctcacagtcagaatttgcacttcttatttcatcgttatattgtgcttctcatgaaagaactggcccccactgaaaatggacaagcaccttcatgtgataatgtcagaagaggacatggttggtggtagcatgatctgttgcaaccttaggttgtgaatcagtgtgctagggctgtaggcaaagcaaaggagttctgcaaagtttgcaggcttcgtgttaaacaatcatgatgtgcattctgcttggtcgttggacctaagaaccattggtagtacaggtagatttttcacagttctgtgttttcttatgttatgtttcaattaattggtgcagccatctcgagatgctaaacagaagcctggaccagaagcatcaatacaagatcttgcatctcgtgctgcttcacggtatatggccagcactgtaaaaagtgtgaagacaccaaaaacagcatatgattttgaggtttcttggagagctctctctaatgacactgccaagcaaacacagttattaaaggtttgttcctagtccttctgttctctactgttggatacctttgcttgctcattcttgatgtgcaaatttcttatttgttttgcaaccagtcaattccaccatcaagcctaccagagattttcaagaatgcactttcagctgcttttctgattgatatcgtgaagtgcacaacctcaattttccggtgagcttatctgttttatgcttggtactggtttggaaccatggctgcttttgttaatactaattacatacccagggaggacacaatgttagctgttagcattttggagaatttggcaaaagttccccgttttgacttgataatcatgtgcctttcatccatgcataaatctggtaagtttgatcttgcaaccctttgttatcttcatttgtccatcatgcctggcagttacttattgtcaggacattcatgagaagcataggcaaataaaatgatttttggaatgcgatagtagtaatttgttgtgttcggccattcctttatggatagttagtttaaactttgaagtgcacaaagattattcgaaagttttttttaatgtagtcagcacgacatctttagaaaatactctacttgctgatgcttttttcttttcttttgtcacaagaattacggaaggtctgggatcaaatattccttgctgaaactgcatcagcggatcaggttgaagccctcaggcaacttcgagccaaatatattcaggaaggattgcaggataacatgttcacttcaaattaatgatgctgatgctgagacagctcgttagaaaccttttacgctctagccaattgatattgtgtaacacccttttcctgtagaaatgaaatgctaaactcagtgtggggggtagtcaattaatggtggaagttataaagttgtctcagaaacatccatcaaagcatgcgattgtgaagctcatggacctttgctggctgaaaaggctgtaccttcatattcttgatgcatatgtgcccctggggccagggttgccgagttctgcctgtctctataccctgatgtagcggattccctgacactgacatcctgttatgtcgacacaggtggattcggcagtaattttgttgtgcaaattttgcatggataagcattcagtcttttaatagaactttaaatatcaatatatcttttttgaaatttaatctgacatgcgaaaatcatagacgtagatttgtttgaaaagagctctcataatatcatagtcctgatggaatttacatatattgttacagtagatgttagtagtgctcgaagttgcatggggaagataatatctatgcctaaaattaagtgattggagataataaatcttaccaagtttattaaaattgagcacatagtactacttacatgcattatatagacccccaaaaaagtcatgatagaataatttgccattagcatttccctacaacagtgttcttgcatcagagaagctgcactcttggaccatgaaagataagcttggcaagggagatgcagacactgggagctcctcaagctcatcaaagaagtcacagctctcctcttcaccggacagcttggaggatgcaactgttactacctcagcaagggacatgccattgctgagaggatcacttgtgtcaggattatgtgcctgttcttggactgaatttgtagtagtagcagcatagttgtcatggttgtgatctgaggtgtaggtgatgatgagcagagatgcatcattcctgcacttgtctacttgcttcctggctgggcatcccctgtaactgctgcacttgtagtagcctctggatacagcatgatccacaaaaagagcaaagataatggattgatacaaggaaaaaaatcgtactagtaattgatcagacaacctgattcttgtgaaattatcagtgatgtaaagaatcagtgcacatgcaaaagattgtgatattacaagaacattcggtgcagtataagtatgaggaattagtgcaaggtgatgataccttggatgaggagatcctttgattggtttctgcccatatttcctccaggaccaactgtcagcaggtggcccttgctcaaccttatgatctttcaaagacaccacaaccttctgaacatcctgcctcctgcaacagtaacaaagatagacagctgcagtgacaacacaatcacaagagaatttgcagaagcagaagcaaaggatataggtgctagctaacactaccttctcttggggacactgccatcagctttcatgctgctcatctttgtcatttctgcaacactgactacacaagcatatggcagcaggtggaggaagaagagatatagctggtgaagagataatagcaatggcactattactctgaagggcacagaatatgttagtgaacagtgagatgatatagtgactgccaagtgccaacaccacaccacaagttggctgaaaaaggctggagcaagttgctgatctccctctctgccttgctactcttttcttttctatgttttcactgtccaataattgaatgcaatactgaaaatgttcagggttactgtttcagagcctcaccaccattttcctgtgagttcaatgatgatgtggactcctgcaagcctctcttacaaagtagtggttgcaattttgcaggtgtgatccttgtgattttccatgggtgaaccaaattacttaatgacttgaatatatgatatatctatttaatgaagctaaaataatagttttctttatgaacattttgattggccatgcacaaacaaacagcatgattagttatttagtttgtcttgaagagtactctagtactaatatattactaatcctgctagtattattaggtcttacaaatattctatgttctgtagaaagctacgtctatatcaaagcaataattatttatgacttgggtgaatagtattaaacatgtaaaatcacgttgcagttggaggctagctagctgtcaactgtacctccgttttgttataatttagaacatcgatatgatctataacatgcacctttaatggttacttttcttattcatttatccgtgaagatataatgaaagtacattgatatcaaattatttttcatgagaaatctacttatatcattttcactggacaactctcgactttttttgtatgttaatgacaaaacgtattcttaagatttgattgtgcagtaaaaatgacaattgctcgaaaatggatgtaatataaaatagagtaaattataaatatctttctcacaatgttttttttaatccaaatcgatgtatttgagaccattttgaaag

SEQ ID NO: 18080 - DNA, 3586 bp, Oryza sativa
atataaattaatcatttcagttatacctactaatttatcttttaaatgatatatgatcatattcgtttcgggttgaagggagtaatatagatatgctatggaatctcatccaaataacgctaagcatgtatacctaacggtaccaaatatgataccctgtaggtatcgatgataccccgtcagtactagctccgggtacctattagtaccgggccgatatcctatttagagatggcaacggggctgcccccaccaggtaatgctaacccacctgtcccaaatacctgaaaatcgaactttagaatcagagaacacaacaagcaattaatgaagcgatacacaacaccatactaaacatgaagggatgatgagtaaccaattaatcatcaccaacaaaaactacgtagaaaaagcattgatgcacataattctttagcgggaagactagacgaagcaatgcaacgcagtttggagttgacatagtgctagcattgcttggagacaggcgaagccatcgagtacaggaggaagcaccggtggcctggaggatgtgaggatgcatggtgtggtgcccgcgtgtgtcctacaggactccttgaggtggcgcggatgtgccccaatcccttgacccggaagcatcgcttacttgtcatgttagcctggacttctagtggcagctctgtagtgcctggatttggaccggagtggaggagagcattctctccccaatttatttgtgtgagaactagggttgtagtgtttgtatctatatgtgttgtacacgggggacatagcgattcggggacaagggtctagggaacgtccccggaaccgatccatcaaatgggggagttttttcatgtttagagcctcatggatcgggatagtggcccatttgcagcccctaatagatgttttacccaccagggattagggttcaggccccattaacatccctaatcccatcggtaataggctaataccccatcattatcaagcctaatacatgtgataccaaacctggtacatgcagatctggtgagtagtactaggcctagctaattattaaggagataactagttgaaactattcctgatacgtttaatgtttttttggttatttataagttcattagttttgatatcttaaaatgttatattttcgtgcttcatatagctatatccatgttcacaatttcgtaaaacttactaattcctaacctttgatcaattcaatttctttcacagcttcttatatgcacagttcacaagcccaaattatgggggcgtttgttttgtttggttaaccttgccatgccatattttagtcatgcatgttacaatttgttagataggtgtttgcttcaatttaagcttgtcagactttaattttcttttacttggccttatatgtcacatgaacatttttgttggctaataatgtcacagaactatttaatatataagtatatgtattactcaggaagtatatacctcataactaacaaaattggtatgtgtaccttatatacttcccgagatttagaaaagctttgtcattgtcaatcataaatttatcttataatatgtttaatcaatttatttttttagggaggtatatacctctccaaggatatataagaacctctataagggtctttacttccgtgcggttaatacgtgcgtagcgctcagtatatcatagtttaaataatcataaaattataatatttagagcatcattaaaaataacttgtgcaacacacgggttgacgactagtattacataatcacattatttaaaatatcaatcaaggcccaaattgtaggtgccccacttatttgatgtattaaattattacaacattttggtaacaccgacaaaatatatcactaatgctgaggatctgaactccacgagcgcgcacacaaattaatccacacacatatatatgtatagctaagatgacataagataattaccaatagggtagggtttatttttgaagctgaattaagcttttaatgaagccttaaatcttcgaaatgaacttaaaagttaggtagtactagcattattccaagtaaataaattttatccaaatttgaaagttaattaggagcgaaaaataactgatcataattagttgggcatggaatgaagggcgaggtgtatcatttgggatagaaggcgacggtagtctgcaagacagtggagatggcgagaagagtggagacgatgagcgcgaggattttgacagggctgtccatgtacttcttggcctccgcccagtaacgatacgctttgttctggctgcaatccctgagcccctgcagcaccttgccgatgtgtgtcttctcctccgtgccgctccgctgattacctcggcataggttcttgaagtactcgatgatctgcatatatatatatatatatgcgcgcggtaattaactgataacgaattgagaattcagatacatgtatgtattcgtgacgagattgatcgaatgataagtatatatatactgaccgtttcatggcttccgaagttgttgaggaggacgccctgctcctggagcacggcgatgtcgtccgtggagctgacgaggttgtacatgaggaaggcgtaggtggtgaagtagtcccgggggtgctcgtcgtcgttgctcggtggtggcgtgccctgctgctcgtacgcgacgaggttctgcagcagctgcaccgtgccctggtcgacggtaagcgccggcacctccagaaccggcgacaagaggccattcctgagccgcacgtccagtattccgccgcgtttcgtcggcgccttgctgatcttgacgccgaggccacgcagctgcgccgccgacacgatgttcgccttcgccttggcgtcgtcgtcgtccttgtcgtggccctgctgctgctggttggtggcgctgccgtcgcgccggcggaggccgaggacggcgcctttgtcgtcgtcgacattgacgaggtgggcgtgggcgaggtgcagcaggtgcagcaggtggtggacctccttgtcggcgatgagcttgtacagctcgtcgctctcgtcctcggggaggacgaaccaccccttgagcatgtaccacatcgccatgaccagcagcttgtgcctcttcctctgccgcatcatcgtcttgcgctggaaggtctgcggcgtgatcatcatgccgtcgtcgcctacgtcgcgcgtgatcttccgctggagcttccgcggcgtgaggtggtagaagatctcctccagcacgaagaaggggatctggttctccagcatgccgaggtcgatgcgcagctgcgccggcgaccaccgcgtcgcgtacagctcctcctcgttgtacccctgcacgaagttgtagaggtgcttgatgatgaagcacccgtcgtgtagcagcatcctcaccatctcctcatccttcatctcgcgcacgtactcctcctccgcgtaaaacctaggacctccacgaccaaatttcagtttcgctattcttgtcggggatttggattgtttttgtttttttagcaaaatttggtctaacgagcaaatctacggttcttgaggag

SEQ ID NO: 18081 - DNA, 6730 bp, Oryza sativa
gacagagaacatttttgaaacataaactggaaataaagctcgcacagatgcgttgacatcttatttgttgttcaagggaaagaatggtaaaataaatcatacatcactatatacacggtaaggaaataatgtaaattatctaacaataaaaaaaagaaatatattgcctaaaatagatggtagattttaatatactactaaatatgataagaataagaatatctctcatatttaaataaaaatcccgttgtcatggtcatatataaactcccctattgttattgtttcaaaagctatatgcatttttaataaatgaaatgacatattccacttctatgtataaatagtctaaccataccacttctatcggataatacaataacaccattaaaaatagacatgaatatctctctaacggatgaagccgactgtaactactagagctttcttatgtaatgccctgaaacatcggacctacatcgacgtagccgtgcccccaaagaccagcctatagcatcattttaacacttaattcactatcgtcacactcacaaaggattccattagttagtatttccctttagatacattgcctacagtagcctttcactgacaccaccttaacttaaccatatgtatacccttgcaatatttacgatagcatagtaaacactacaccctgcattgaaggacagagagggacagaaaggaggaggtaatgaaaatagttataatttttgcccctacttatttgtgtgtagtattatttttaacaaaatcgtagtttaaaaggctattgacaacacataagtgccggactgctgacgttgatgatttttcttgattagaactatttctttgattttactattgatattttttttgatttatcgtttttctccatagtatatgacataggtaattaagtttttttttccggaaagtgagatgatcgtacgaagtacacatacgtacgttattctttttcgggatggagattagcagcgtgggagttttgatatatctaaactaacggttaaaataacaggtccaccaatttaactgaaaattgaaagttggatgtttttcttttttctctgattttttaggatttctctaatttattagagtgccacgtggcgacgtaggaacgttgcaggaagtttaatggacttttagtatataatagatagattttgaaccatgtacattatcacagtcaaaagcggatccaggataagatatattatatgaatttattttgggactaagagggtactgtatatatatgcctgtgtcttaactccgacggggaaaaaaatataagactagttcatactctttcaacaattgagctgtaaaattagtacccctactgtttttacctgacgattaatttggagatctctatacagtttcaactgcacatattgatcaatacgctttagaaatatatttaaaagtttttaaaattatagcttcataaaagtacttgtcataatgaatttattaacatcattttgcataaagtcttaatttttatacattaatgatttaaaattttgatgtttcacgcacaagttcttgaacgccgaaaacccgtttttcattttctagtttggttaccacaaatcatgtgtgcaatacctatactaattcggtactcaaaatgggcaaagctattgaaaagtaaggaatggattctaatcctgggatgtcccctttgtttctttttcttccgaaacctatgtaaatagttataaaaaaattaatacaaattgaatagtgatatattgaactccaccaaaaattaaatttaaatttgatctgcacattaagaaaaaaaaacaaactcaactatgaatatataataccactattattcatatgttaaatttgtcttttttatatctcaatttgtgagtttgactttagatctaagattatatataatggcacatatatgttgtatgaatgttatatatttttttcagaatttttcatagttatttgaagggtttttagataaatgagaggacattctctcgagggtttaaaacagtatatatcgcctgataaagatatggttgatggttagaaggatcatagtgtcacaattggattaattaatatgctgttgaaaatagtactagtacacttcaggtttttttcattgtcattatatattcaattttagttgtcctaaatatagttgttcctaaattcgagattaatatatatgaaattgcatataggttggactcgtgaattagttttttaaaataattatggaatcgaaaataagttgtaactgacgtcgactttctaatctaatctggtataatttggaaaagaacagtacattgtgtatgcgattgaaattttaatgtttattcaaactagagtaattatcataaaacatgaaattacataaaccgcttatgttatggcttgtggcgtataactacgggttttatggtatacatgtttttgaaaccctaccattattcaaatctcatttgcatatctgaaaaaaataattttcaaaatagtgaagctagaatttaaactaccaaccttaattaataaatcaacaattataattttcatatacaggctatgttttaaaattttaaataaatttgtgctcaacatacatatgcatggtgtggttttgtgaaaactttagaaccattataaatagggttcacatgtcattaatcataaagctttttatgcaacattcatagtaaaacgtgtggttttctgaaatttcacacttgcccgggagtatattgcatttctatgtaagcaagggaaaaaaagtttaggcaaccaacaacaatcttctgttatatactgaaaagcccactaattaaaccttttacaaacgcttctaaaccagcacgtggcactcgtacaaacgctcctaaactgtcacatgtcatgtctataaattaagagaaatttcaaaaattcttaaaatggaaaagtacccagccgttgatattcacttaaatccattattttaactattaaattagatatctctaccgttataaaagttgaagatgtttttgccggtattttggtacgtcatccgtgtttgagtcagttttaagttcgttcgcttttggaatacatatcagtgtttgagtcggattttaagttcgtttgtttttaaaaatacgaaaagagtcgtataagaaattttgtaaaaaaaaaaacttgcatactaacttgagataaaaatcggactcccacagtgaatttcaccttagctaaccgtataataataataagattgaaatagcatccacccgttgcaacgcatgggcatcttttatagtattaaataaagtaaatcccttcctgctaacacccgtaattagcatgtatggtagatcactctcgaaggagtggagagacgtgctacgacgtacgtactcccacggtcatataaaaaatcaacttttggaatgaatttggacaagtatttgtcaggtttatccccagaagttttttttttttttgtgagggggaggggggggggatgatgtaggtacttaccaacgaatatcgtccacaatctcctggaggctgcttttgcagcgttggaggatgcctccatgcttgtggtcgtcaggctcgacgtccctgaggagctcgtggaggtagcgcttcttgagcttctcgccgcagaggcggttgcgatcgccggcgccggcgtgacgacgatggtacgggccgacggacacgaacttgggcgcgtacgcttcctccttgttgatggcgcgcacctgctccgggactcgccacagacggtacttcttcgtcttccaccggaacgacagcgacgatggcgggaggtcgccgccatcgtcgttgtcgtcgtggattatgttcaccctcacctccggcagctgctgctgccctgcctcgtccagaaaaaccatttctgtagtagtgtcatcaccgtttcccataatatgtatcttattgtacgtacgcagcatgctgcatgcacttagttatccaattccaagtatatataggcacgtcgtcgatcgatcgtccgaccggaatttgagatggcgtgtcgccggcggcgatcgatcggcgtgatggtggtgcatgcgacaatggcataaaataaaggaagaagcctcttctctggcctaatcgattctttttggttggcaaatggacgtatcaagcgatcagtgcaagctttgatgttctcatgcatgcatgctgatctgtatgtaagctagcccctttaatcttcttctttttttcctcttcactaatacagttagcatctcaaccttttttcctcttcactatatatatagctagctagaatcgtcaagcttttccttatgttgctacctgctcatgaagtaagctcaggttcttcttcctatattagtctatatacagatagtgcatacgtacgtaatagaaagagccctgtagatggaaaggttctttttttttcagtcgtatggacatacgtcgtttcatgatcaatgccgtcaaaaaattattttttagaaaaatatactaaaatagattaatatgtgatattttgctatataaaagtgcaagtaaatattcgactcatacaaccagaaacaaagacaataacaaatatcaaccatgaattatacgcacacctttttcatggtcatatatattggttgtttttggttcacacacatttgtaatttctagttgtgtatattaaatctaaacttgcatgcatgtttgtgaagtgatatatctcacatattgatatattttgtaaaaaaaatattactttttatgacctttttagttgacatgctttagttggcatgcgcgcataaaatagtctatgtccactcaaatgataaaaagactttcatatgtacatgggattttacatggatgttcagcaattactcatttcatctacttctggaaaagtcatttcatcttaaagaatgccctctctttttatatccatccaaataattatgatttatttaagggaacatatcatatgcacacaacattcctatgcatatactccgtgcatatcaactaacaaatgtcacagaaaattctagaaaaattggacacatacttctaatagtattacatctacgtgtgaaatcttatcttcaaattcgttatattttaaccgtaacaaaaaagacaaaattttgatagatttttacccttaaaactgtcagatttttcactttttggttacagctaaaatataatgaatttgaaaatgagactttgcatatatgtgtaatactattaggagtaaatgtccaattcttttagaatttttcgtgacatttgctagttagtgtgtgcggagtgtgcacggaaagcttgtgtgtaagatatgttccttattttgaagagatatatcactccacgaacattgataacatgtgtttgtaagttttaagctatgtagaggtagcatatcaaatatttaatagagttatatacattgaggaaaggtcctgatctttcgataggtatgaataactctcgatttggtggaaacttgatacacatgattcggtttccgatcaacacgatctaaaccctgcaattgtagcatcacggcttctctggttatcaaccatacgctgctatggttgatctcaccgagaaggctaatctctgcatacgaatcgaagaatacaagaaagaacagtatagattgcaactcaaggtgttgtcgtttcgtgttcaacagaaattaattcaccctttaattggttgaagcaacaaaaattaatcttggttgcctgtgcgcacacagggcattctatggtgcacatttactttttgtccaaataaacaaagcgacgatttgtgatatggtgattcttttgagaaaacataaaaaattctagatgataatcaaactgggatggagggagtagtactttaccgtacgcagcatcggccgctgaattgaatgcaaaagaagatatattgtcatcaaggaatatatgccagaaaaaaactttgagctttatgccaattgagggagagctataattttttatatcttattgctgcacgctcaatatattctttctacttttcaagtgaaaaagtagtcataaaaggtggtgtgaatctctttttttcgataaagctaacgcccactaaatacataaagcttaacatgcaagtatagtatttattagcactttaaaacctacatacaagcatgtcatatcaacccattaagcatacaaaacttaacatgtaagcatatagtaattatatatacaatttatttcatgcacaagctaaatcatcattctcaaaagcacgaattaccctcccccgaattatcgcggtcgaccgaattacccctctaaacccgaaaaccaaacatcgttcaccctgaacttgtaatatcggacaaattacccctcttacctaaatttagagcggttttgtcctacgtggcgtacatgtggcggtctagtcaacattttatttataaaaaaaatatggaacacacctgtcatactcctctctcactcttcctctctctttctcgccggtcgacggcggcgagcgacgccgagcggcggcggccgtggccactacaaggagccgcccctcggcgcgcggacggatggaggctggtgcaggcggcggcgcgggacacgaagacggaggcggaggtggcggcggcgga

SEQ ID NO: 18082 - DNA, 30327 bp, Oryza sativa
taggcgagctagctagctagcacgtcttcttcctccgccacggcccaacgaggcagccggcaaagctaggcaggcgtacgaactcgtggccaggaaagctgccggcgtcgcgccgtgcaggggccagcctgccgtccatcatcaatgcctatgtcagggtctcgggccggctgcacatgggccgctaggcaacccgtcgccaagaagaaacagaacagaactggcaatcggcggcttcggccacggcggcggcggcgactaggtttgggcaagaaccttgtcgatctctctcccttacttctccttcttcctaccagccactacactcttcttgtctccctctatagaaccttctagaagcttgtaatactcagctacttcgctcaattccacctcaaattggtttagatactgttgcttgctatttgcttggtgcatcgggttgctaacagcctaaagggatcctatgtctcgacgcaagcagctagcagcacagtgcagctctgctctgctgctctgagagattcggtcgtctgcactgccgcgtcttacttacacggggcacctcttcaacgacgacgacgacgccgccgccgtggcaccggccaccgccgagacgacgccgctttggacgctagcccgctcccactcccacagccctgccccggcggcgccgagccggcatcacggtcgcatcaccgaccgcgaacaatggtgacgacgactactcggcggcggcgtgcagcagcaggtggacaggaaggctgcctccgtgtcacccgcggccgccgccgctccgtgtcacccgccgccgccgaccagtgagagaagaagagtgagacagagtgagagagaggaagagtatgacatgtgggtctcatatttttttataaatagaatgctaactggactaccacgcgtatgtcacgtagattaaaatcaccgcggattgggtcgagggagataattcgttcggtttgcatagttgggtgtgaagaatgtctggttttgcgattcagaggggtaattcgtacgttttccttttcataatatttcaatccaaattgttttattatttctccattatctaacatatatctcgcagcaaagcgcggggcatcatctagtatatttatatgggtgtgtagcccaaatttagtaccctattcattagtaatacatgaaactctaatcagtgtctgttttcttaatttaacaatataattaattctgttataccctaacttcaaaaagttgtaaagaagtagtacttgcaaaattgtaaaatatctcatgaatgtaaactgtcgccgcgcggttttcaatttggaaaaaaacaggtttcctttagtttgcagtgtttatacttttgcgcaaatcagcggccgctttaataccactcaaagaacttgacctttaaatcagcggccgctttgttccacttgcaagtgggacaatggtagccgtaaattgatcgtacgtgcggctgaatttttttctgccgacgccatcagatgcgctgaattttgatcatcgccagaaaattaagagagaaaagatcgagttagctagcgtggaatatcgccaaggaatatatgcacgcttgcgctttaattacttgaatgcatattgtgccacacgacaactaattttctgtccagacgtactgcttttggagagaaatttcatcaaaaagcatatgccgatcatgttggactttttgctttgtttaatttcgtcgatcccttccttcactcgatcaagcttccaccgtaaaggtttcacgcgtacgtcgtgtgttggccgacgtgctggccgtggctggcatgtatgtcttgatagatgcgtttttgtgcatcgacctagcaaacagcagctatatatatatatatagagagaggagggtcttgcaatatcaatccatcatcacaactcatcaaactcagatcgattgtcattgagagcgagcaactagcgctagctactactcgaaggcaaaatggtaagtaaatctcgtatacatatatgaagtaattagttatttggcaattagatgttgctgtaacccatttccattatctaaaaaaaaaagatgttgctagctagtgcatatatattcatttatatgcatgatcgatactgctggccggggccgccggatacatctgaattattagacgtagaggccggattaattatgtcatcttaaagagaaactaatttaatggttatgatgtatatatatgcaggacgtgatggagaagtctcggcgagctcacttcttgttcgacgacgacgaccaaacgccgccgaagcagaacggcccccagaacgacgaccagcacaacaacgacgacggcagcggctgcctctgcgtgtcgtgctacggcggcgtcgcaaaaccaaaggcgcccaagtcgtcgtcgccggcgaaggacgtcgtcgccggcggccgtcctgctgcaggctccaactgtacctgatcttactctaaccatatatagcttgctagcgatcgagctcgatctcatctcgcacctagcttgatcatgtcgagcaaccatgtacgtgttgatcgacatgatcactctagctagctagctagctacttcatatggatgttgaataagggatcatatcggaggaagacatgcatgagtgcttatgcaactatgcaagcatgcccgtctccaattactggtacagactacagagtgatgtatgttacgagaaatgtactctttacaaataccatgaacatatattatgatcaattacatgacagttgtattattaattagcagcgttctgaattcattctgaaagggtgtgtccggcctttcgaatggacaaccagctgctgtaattaagctgttcattgttcgatctcttgccgaatagtataacattttttttggggggaatgggcactcatttattctttacaaatgaatatatctccgtaggagtataatggaaaatctctcgattttgattgtgttgtctctactcaacaaaagctgagtggaagccgggaaatttcctgcacaagttcttcaacttctgttgcaatccactttattcgttttgtacctgcatccacaaagacatatctagctcctcaaaccacatagtatatcttgagagtaagtttaatgcttctatatgctcctcaatgaaaaaactgcacaatttttaaagaagatgagaggcccagattagaaggtactgatagtgtaaacttcatttagggagggtaattttgtcctcgagggagttaagtctagagcccacaccaacagtaatcaccgcaacttttcacaaactgaaaaccactaattaacaaccgtgatctccattgcatttgcatcgcatcacaaacacaaattgttcatcacctgaaagtttgaaacaaactaaaaacgaaagatgcatgcattccaagctgcaatcattcttgcgtacaaaatgcatccaaaagttacgcaatggcaattatgggcactgcaccatgggatcgaagcaaacaagcaccgatcgatgcgttcgttcacttttccctgataattgcctttctcatctcctctccacttaaactgccatccaagcttccaattcctggcgatgttggtccggaatcgatctaaattaaaagagaactggccggattactcaaccgtactgccattgaagcaaccaaatcaaggtatttcaatgcaaatattgtagatgagatgagtgtgaaggaaaaatataatagggctttgtgggcgtctggagtatgaactcccagtccagatcaatcttgtgctagccaaaaggattgatccgttgagtgtggggatcagtctgcggttctaaccatgatgacgggatccgggtagacgctggcaactacaacagctttgttcatgtaacgctccgcttctcgtgatacgttaaaaactaattcggcaaaatcctatatgcgaaaatttcgttctttgtatgcgagtctaagttgtgccaaggatctcaattcaatctcttgttgttccctctcatcgccatcaaaatcgtccacctcaagattccaatttcgactcaagtctccgaaatcaaactccgaaattcaatcgcatcctttgaatccccgccaaatacctatccccatttccgaaaatatcaaattcccatctcgaatcctttccttgagtctcccttgattcctccctaaacccccgagatcgaatctcaaatttgaaatttaaacccaagtcccaaatccctccaactcaaattccctataaaagtctactttacctccctgtgtttttggatggaccgattttcctcccctcggcccaccttccccgccgtccctccccagcccatttcctccctctgccgtcctccaccctcctctcgcacgtgccgagccgagccgagagaaagagctctctcgctctcgctgtttctctctctctctctctctctctcgttttctctctcgcgcgccgacgccgcttcccgccgtcgccgcccaaaacccgccaccgccttcgctcgttcccgcgcgcgctcccgccgtggtggccgacagccctcggtcaccgtccgccctggcccgcctgcgccgcgcagccgcccgcgcccactctgccgctgcccccacctctgcgccgcagcgcgcgtgtgtccaagacgcggaggcagtgcctctctctcccacgcgctctctcctccctcagctcgtccaaaatcggcaaggagccgagctcctttctccctcccctttttgctttttccccgatcggcgtcacgcccgtgaccgcctctaccgccgcttggccgctagctccgagcacgaccgccagctgccgccttgaccgccctaaggtcggtttgaaccgacctcccgcgcgaaccaacctcgcctccactataaagccgagtccctcctctcaaatccctcccacttcagtctccaccgctgcagtgccatcgccgccttgctgccgccgtcctcgccttcctccgccgtcgcgtgtgccgggaagccggcgtgcgcgcggaaccaaagagggctctggccacccttcttcttccccttccccggcccgacgacggggaactcgcttccgcgccgttggctgcttgtcaccgcgccgtcccggctcggtagtgcctccctcccgttccccttccccgctcaccctcgtcccctctagcttgcgtggtagctcggtagccctgccgaacgcgcgtagacgccgccccaaggaccgccgccacccggcatggccccgccgccattgccgcccacccccggaggccgcctctcatcgccggctgtcctcggtgctcctccgtcccatccggcgccggaaacggattccttgaaccccggatatgctcccaccccttttaatcgaacccccgttgctccagtgaagtttcccccttttctcgccgccggcgtgcgccgccgcgattcgtcatcgccggcctccctccggcgaatccgatccggtggctcacttcctctcgtccgtcccatcgttccggtgtactccctctctctcgaatcgtcgcgacgagctccggtgaactcggccgccatcagccgtccatctcggccgccccttcttcctcctcccgccggtccgcgtggctgccacgtaggcgccacgtcggcaccacctcggctttgaccgagccgagccggtcagccgcctccttccttgcccccctcccgtgcacgcggtccacggtgcaccaaccggctgcgcgtgggcccgccgcatccctggtccatccggtgcacgcgcgtgaaccgcgctcacccggaaccctagagctgccctcatgcgccgctcccacggtgagccgcgccactgacaagcgggccccacccgggaccccgcaaggtggattcggtccacccggacccatccccctctctcctcccgcgcgccccgcccgcttgggccgcgccttgcccggccatgggccgcctcctcgcgcccgcgcccagcccattggctcggccgcgccgtgcttatctattgggccgcactcaagccgcccgaggaagtctaaatcacatccctccatccttttctttttcagggatttaataaatcctttttcctttgtcccataaatcaattccttattcccaaaattccacaaatcatttcctttggtcccgcgcgtcagtgactgtcaataatattcttgagaatattatttctataaattccataaatcatttctcctatttcggaaaatccaattaaacttcgaaaatccatatcttccgaaccgctcatccgattgactccgttccacttccaataattccgtaaattgagatctatttaatggcactactaattagtctaaataggatctttcttttggtcttttgtttaggtttttgattgtttgcgtatagttgcggttaccggattttcgtcgatcgcgggttttctcgaagattcgtgaagcttcgtgaagaccttgagcaaggcaagtcaccctttgatcaattgcccctataattgaaaagtcattattattttgtttgcaacttgcattattagaatcacacacttaacttgcttggcctcggtttgtgtgccaaaccgacggacctacccagtagtcgcactaatttccgtaggtcgtactaccctgattccttgtcgctccacccttgtggtacctcggtattcgtgctctctgagcgcgtataccaaatatcccacatacaccgttgtttgtcgaaaacttgggaaatgagtttgtgaagccttcaaaacccgatatgtggtgtcggtgtgtttgaaaataaaatgaattgtgaaaactcgcgatgcgggggttgtgcctatgtggcactgtcccgtattcgcatataaggaccgattcctgtggaaaactcatcgaacataatcaaagtgcaaccacaaggtggaatgggacaccctggctaagtagctagtcgattcagggaaacctcgcatgccaatagttgggaacgccggggcggggtcggttggagccaaaccgggttcctggtaatgcaagaacgagaagtttgctgaattaccgatcgaggtggttggagtttgaattgtgaacgcctataatggcctatgtttatgtgaggatttgatcattctatgtggcatgaggtatccctgggtcggcttgggaaaggctttgtcgcgaacctctgacaccggccagtgtctggagtaagttcgtgtcttgtgggtaaagtgtacccctctgtagaggttaactaactgttcgaacagccgtgcccacggtcatgggcggatgtaaggtggttcccgttgcgtagatttgtttgcctgtgctttgtgaaaagttgttgtggtgtgggaatcgtaaccagaatcagcctatgtggcagatggatgacctgagtggtcagaaacaaatctgtgtgattcgggatgtctgtgggcatcatagactaggcttcccgagtggaagcggattgttgtgctgctgggcagctggactctgggagtccgagaaaatgaaaaaggctctgggagccgattaatcaagtggaatggctctgggagccgagaagtaatgatctgagccgggaggtcggtacattaccaaatgagctgttgaaaaacatctcttaaagtcgaaacgagacgcaagtctcttttcggcccaaacttagaaagaaataaatcacttagtgttttcaaaatgtcttcaaataaaagatttgcaaaacaaccttgcctctcttccaaacttgcattaaacacctaagttcccgtgacttgctgagtacgagagtactcacccttgctctatataaatatatatatatagttcctccgctctgaagagaagataaagtgaagtgaaaattagagtttcgtcctggttcccagccgtcgcctgtggtgttgggtgttagaccgttggttccgctgctgctgctgctgctgttggtgtttcctcgtccacgtcgtcgattgtattctcgggctgtctgagctgcaacctaagttaaggtaaataagtcctctatttattttaaggattgctatgattcatatttgtcaccgtgggtaccagcactatgtcctgggactggtaccgagatcgcggtttcgtaggaagcggttcgcgccgttttccctacgacacgctcctgtcaggtgccgttgtacggcggtatcagattggggtgtgacagttcgagggtagtgctgccatggtgactttaacaagatggtcgagcgatggcgcaccaaatatggaaaattctactagaaaaatgttttctaccaacgatccccatactctgtaaatgccgtagtcatgatctacaaacatcgacaatacatgttaggtaccaaaggatttccgtcggtatcaatcgattcccattgttactaggccgattcccatgtagataccccgtcggcaccaagcctgatacgtgtgataccaaacccctgatatatgtagattcgattactggtatcaggactgggcaaggagacggtgatgatgacggttggcatacgccctccactacgacagatatctagagaggcccaattaatcttagaacaaactatgtctttctctatatctcttttttgtatttcggcctttgaaatggtttgctagttgaactatttatgactgcgttcgatgcttttgctttgtttgtaaatccactagtcccgatattttgaacggttctattttcatgcttcatagctccatatgtttaggtagggatgaaaacggtcggaaatgatcggaaaacagcctcaaccatttccgtaaccatatttttctcggaaacgaaatcggaaacggtaaagtcggaaacgaaaacgatatcggaaatatcggaaaaccgaaaacggaacaatacggacggaaacatgtcggtacagatcgaaaaccggtaacaaatacggaaacattaaactataaaaacatatatttaactttacataagtatgttatatatatacataaattcaagcttatactatataaattataaattaacttcattttagccatatacaaaagttagagattttattgaagagtcattcaatctataagctgtgggtcaagtatagacatgtcctataatatcgacatatttagaatacggtaattaccatattataagaaacggtgatttccgcgagaatacggtaaatacggaaacgatcggtataacagcaaaaccatttccgttttcatttccatattttttaccatttccatttttgtttcggtcgattaccatttccatatggctcggccggtagaaagtcgaaaacgaacgccggtcggccggtaattaccgttaccgttttcacccctatgtttaggttcacaatttcgtaaacttattattttttaatcttccagttctatttcttttggcttcttaccacaagcaaaactaagggaatgtttggtttatttggctaccttgccgtgtcatattttcgtcttttcatagtttgttaaatattgtttgcttcattgctacaatattttaagtttgtcacactttttttattttacttggcacccctaaatgtcacatgtacattttattggcgaacgcacaattaacgtcgtgcaacaatttaatgccactttggtgccatagttaacctaagtataataattgtggcacatatgcacaccatacagattaaagaatcacacataatctaaaatatgtcagggcccaaaacatatgtgtcccctttattggatttattaaattattacaacattttggtaacaactacaaaacacagaggatatgaattccacgcgcgcacacacacaaatatgcacacatatttatggcatatatatctaagatgaaattagataatttccaatagggtagggtttatttttgaaccttaagcttttaatgaagtctatttttcactgtgaacttaaatttcatcataagctttcaaaaattaggtagtactagcactccaagtaaataaatttatccaaatttgaaagttaggagaataaaataaggtgagttgtatcatttgggatagaaggcggtggtagtctgcaggatcgtggagatggcgagcagagtagacacgacgagcgcaaggattttgacaggggtgtccatgtacttcttcgcttccgcccaatctcggtataattggtactggctacataccctgagctgatcgagcaccttgccgatgggtgtgtcctccttgctccgctgattccaccggcataggttcttgaagtaattgatgatctgcggtaattaacaacgacatcagatagatatgtatgtcctgtctaaaacggcatgtttttgtcacggagggaatgagtaacgtcattaaagaagtgtccaaaattccactttttcccccttttgttaaaagctatatatatatggttccatatttttctcttgattttccgattgcttctctcatgtaattaattgatacctctctgttttcttatatgtatgtagtaagtttctctcctatttcaagtagataatcaaattcttttatatgacatatatttagtgtaaaagttgaaatttataacgtaattatagtgtaaacgtatttatttaaactttttcttggaaaatatgcaccataaatatagttagtctttttctaaccagttttgctgaaaacatgtgccatatttttagttgattacggtcacttatttctcagcaccgaatctagtatgtggaaaaagtatcttaatttgcttcatggttggttaatttagcctgcttcaatccccttgcagaacttttgttatggtgttattggccattcacttcacatgtttcatccaaataaaaaaaatgtcaagaggtagatttccggaacctaacagtattagttgtttccatttcctcatttgcatttttttctcaaattttgttttatatccagggaaagcttatttactctttagtttgaaataattaaaagatatgattgacctcatttgcgtaaaagaaaacgcaaaccaagtttctttcctttgcctacattttctatcttctatctcatttatctactcttctgagtaggtaatcggttactttaaattataataagtatcatggaaataatctcaaaattattaaagcttataattaattatagtgtaaatataggtaattacaataaaaaagatttgatttatttaagatgatttgaaaatatgcctgcatatgcaatatttgcaagaaaacccctcctcatctcaaccatttttgaacatcttagatcgcaccaagattcgtgcaagcataatagttaaccttctcccttccccacttcccccttctcccgtacgtgatgcgaggtcaaacttgccacctccaacgccgctccttcctgttcagcacagtgttggcatcttcctttgtcgaagagaacccacctatttcctttccctgccatcaacctccccctccctacctctccttctccccgaactgagtggtatacgatgttccccgcggctccgccccaccgtcttaactgtcttcgacagctcccttgcagctggaaatgccccctcctcctaaacactcgaaaccgaatacttcctctactgtccccatacatcgcccttatccaaccgtacggttctgacggcagtgttacgccacccgcccgtgtccgccactcacaaacatccctttaagtcgtcccagcaaacttctctctcctccctcccccaacctcctcatcccaaaccctaatatattaattagtactctggtagagttagggtgtcgccatcgagaagcccggggggcatgaatctttgcatatatacaaccaacggtagatataactgtaagagatctcccaaaatgtggtgtagagtgctatttttttcctcagatcggcaagttcatatggttttagagagagatgttccctttgtttttgtttcatattataagacgtttgattttttaggtttcattaaatttatagaaaaatttaacttctacaatataaaattattatcattaaatctagcattgaatatgttttcataatatgtttttttaaatactaatatatttttctataaatctattatattattaagacagctcgaaaagaaggcaccacgttcgccgtgggggctagaaattctcacattaatcggaggaaaagaaaaaatatcgaccgcttgttcattgatagcctatattttaatggctgagatttaattaaattttggaagattagacttggtttcacgtatacggacataccaggcactagaaactggacatacgtatcagctttgaaaggagacaccacattcactgtgggggctagaaattcccacattaatcggagaaaaagaaaaaaaaagaaaaggaaagtccaagtagaaatacaatctaaaaatagttaaaattcggaattaaaaataaacaatattgaaagaagtttctgtataagaacccaatttgagattaaccgaaattcgaaataaaaataaaataaaatccaaaattagaaaaaaaaagagagaccaattagaaatataatttaaaaatagctgaaattcgaaatttaaaataaaatattaaaagaagtttccatataagaaaccaatacgagattaatcaaaattcagaataaaaataaaataaaatccaaaattagaaaagaaaaggatagtccaagtagaaatataattttaaaatatctaaaatttggaattaaaaatatggaataagagtccatataagaacccaaaacgagattaattaaaattgggaataaaaataaaaataaaatccaaaattagcaaaaaaaaaaataagagttcaagtaggaatagaatttaaaattagctgaaatttggaattaaaaataagcaatattgaaagtagaatccatataagaacctgatatgagattaattaaaattcagaaaaaaatatctaaaattagaaaattaaaatagagttgaagtaggaatacaaatttgaaacaactgaaattaaaaataaaaagtaaaaatattaaaagaacacaatacgatattaattaaagtttgaaaaaaaataaattctgaaattagaaaaagaaaaataagatttcttaagaatacaaattataaataactaaaattgtgatcaaaataaaggctattgaaagaaaataccatctaaaacatatgacgaaataaattaaataacaggcctataacggttgatacgacatataaaaattattaataaaacaccaaatataatcctaatgatgattaaaaggagggacgacaagcaggccgtgaagtaaacgagcaaggcggttaccgggacttttagaaagtaaaaaaaaataaacctcattgataatcatattcgatttttaaaatctcaatgacaataaaaaggagaagcagcgggcggggtgtataggagtatagttgcatagccgccgacggttgacggaacttctagaaaataaaaaatgaattccaacgatagttatgttcgatttttagaatcacaatgacaataaagactaggcggcggacgggccgtaaaggagcatagtgccattgtttgacgagacttctaaaaattataaaaaataaaactcaacaagacaattaactctaaaaactacaacgtccaatttttaaaggttcgaaacttctaaaaagtaaaaaaaacaatgataatcatgttcaattttaaaatctcaattacaatcaagaagggaggcagtgcgcgagccatagagaagtacaatggcaaagccgctgacggtttggcgggacttctagaaagtaaaaaatgaacccaaacgataattatgttcgatttttgaaatctcaaggacaataaagagaagtgacagtggacaggccatagagaagtataatagcaacgtttgacgggacgtctagaaactataaaaacgaaacccaacgttacaataaactctaaaaactataagatcctatttttaaaggttccaaggagaatgaatagaaatagtggtagatcgagcaagcaaataaaaaggagatgatataagagatagcaactgatgtgacttttaaaaaactatataattagaaacacaggatgataagatttggtctttcaaagtcttaagacaatgagatagctatttaataaattttaagtaaaatcatactaaaaaaatatatgattttatttgggtgctagccgcgcaattgcgcgggccacccaactagtttgattaaacttaacaaagtttgaccagtaaaaatgtgaaaacacgagaaactgagtgagagtatataataatgcggtgttgctgaccgtttcatggcttccgaagttgttgaggaggacgcccttctcctggagctcggcgatgtcctccgtggagctgacgaggttgtacatgaggaaggcgtaggtggtgaagtagtccttgcccttccgcccttgggtttgctggtcttgtccttgccgcgccggcgtgccctgctgctcgtaggcgacgaggttctgcagaagcaccgccgtggcctcctcgacggacagcgccggcacctctagctccggcggtattagtctgatctcaaggcttttcctgagccgcacgtcgagtatcccgcctcggtccctcttcgccatcctgatcttgacgccaaggccccgcagctgcgacgccgacgcgatgttcgccttggggtccgtcttctcgccgccgccggcggcgcaacaccggcacatgtggagcggcaagctgacgagaaagagtgggaggatgcagagcagcagctgtagggcgtgccacggccactgccagcacagctgccactcgcatggcggagacttggggccggcgctatcgaccttggcgaggtgagctatgtgcaccaggtgcagcaggtggtggacctcctcctcggcgatgagcttgtacagatcgtcgctctcgcgcgtggggagttggaaccagtcctgcagcatataccacatcgccatgactatcagcttgtgcctcttcctccgccgcatcgtcttgtcgtcgtccttggcgacgcggcgcgtgatcttgcccaggaaggtctgcggcgtgaggtggtagaagatctcctccagcacgaagaaggggatctggttctccagcaggccgaggtcgatgcgcagctgcgccggcgaccaccgcgtcgcgtacagctccggatcatcgtacccgatggcgaagttgtagatgtgcttgatgatgaagcacccgtcgagtagcagcatcctcaccatctcctcatccgtcatgccgcgcaagtactcctgatcctccgcgtaaaacctatatatctttactattataaaaattgaagatgtttttgtcgatactttggtacgtcatccgtgtttgagtcagttattaagttcattcgtttttgaaattacatatttgtatttgagtaggtttttaagttcgttcgcttttggaaatatagaacaagtcgtataagaaatctgtttaaaaagactcgcatgataaatcgagacaatcggactcctaattatagcttatgattttgtaaaaacaatattcaagcaaatttctacattaaattttattttagttaaatcatataacaataataagattaagataaccttcaaccgttgcaaagcacaggtatttatttagtatatctatacgtacacacatacaaggtaaaatgatgattaacttttgcccctcaagaaacatgtacgtacgtagtacacttgtttttttttattatgtcatgtaatcttggttataaaaaagatgctgaaaggatgagataacatagataattttgtgatgtatcactctaccaacacgtaagtcatttaaactcgacattaacaagttgaaacgtaaaatttcgacttagttcgtttcatggtaagtggagaatatttccggtgcacacgaaacaagaagactcattagccacatgatttattaaatattaattattgtaagcttgaaaaatagatttatttgatttttttaaacaacttctatatagattttttttaaaaaaaatacaacgtttagcagtttaaaaaacgtgctaacgaaaaacgagtaagttgaaatttggagttttgcaaatagaatggggccttatggtgtaattgttttttattttctcattttatggatcaatttgaaatttatttcttttgcaggacgatagaagacgactaagatatccatgttgtcaatttttttcagctttcttatagctgttttttaatttgagaaaataaaactaaaaatgaggagaaaagatgttttaatttgtttcttctatatttaacaatgaatcaaataatatgaaaaaactaataaatacttaaattttttgaataaaatgaacggccaaatatgtttaaaaaagttaaatgcgataaatatttagggatggagagtacttagagaaggaaacgtacgtaccggcgaacagaatccagcatctccccgagcctacatgtgcagagtaggaggatttcgtctcgtttggcgcgatgatcgtcgacgtgaggaggcccgacgacgtcggtgagcagctcgtcgaggtagcgctccttgagcttctcgacacggaggcgtctctcctcctcctcctcctcctcggcgtcacgatcgccgccaccgcggcggcggcggcggcgatggtacggcccgatgcacgcgaacttgggcccgtacgcctccttgttgatgtcgcgcacatgcttgggaactcgccagagacggaacgacgacgacggctgcttggaggccgacgaggcgccgccgccgtcgattacatccaccctcacctccttaggccagctgctcgccggcggcggtgacggcggcgccggcgtctgttgctccgccgcctcttctcccatgatctgattatatatatatatatatatatatatatatatatatatatatatatatatatatatatcttcttcctctcgacgtttattagcacgcttgcatgaatgtgtatatataggcacgtcgtcgaccggaatttgagatggcgtgttcgcgggcggcgatcggcttgatggtggtacgacgacaatggcataaaataaaggaagaagcctcctctctggcctaatcgattctttttggttggcaaatgggagagtatagtgatacaaacaaaaggacgtacgtatcaaccgatcgatgagtactgcaagctttcgtgttctctctgcttgcatgtagtatgtatcaagctaataacccctttattaatctctatctttttttcccctcttcactactacagttagcatctcaacctttcttcctcttcactatatatagccagctagaatcgtcaagcttttccttttgttgctacctgggcatgaagtaagctcaggttcttcctatattagtgtatacatacagatggtgcatacgtaattgaaagagccctgtagatggaaagtggtttttcttcccactcgcgtggacatacactcgtttcatgaatgccgtctaaaaatattaatttttcaaaacataataaaacagattaatatgtgatatgttactctataaaactataagttaaaattcgacttatagaagaagaaacaaaaataacaaatactctctccatcccaaaatgtttgtcgccgttgactttttttaaaaaatatttgaccgttcgtcttattcaaaaaatttaagtaattattaattttttttcctatcatttgatttattgttaaatatacttttatgtacacatatagttttacacatttcacaaaagtttttaataagacgaacggttaaatatgtttaaaaaagtcaacggcgtcaaacatttagggaaggagggagtatcaaccatgaattgtacgcacacctttgatagtcatatatatttgttgttttcggttcatacacatttgtttctacttgtgtatattaaattttaacttgcatatgtttgtgaagtgattatcacatattgatatattttgtaaaaaatattatttttcatgactttattagtggacatgcatgaaataaagtgtatatccactcaaatgacaaagggacttaatatgaggatgcgattctacatgcactactacacaaaagcaaatagctaggtgtccgcactataggtgccggaacagctaaaaccggtgcttttcccttccaaaacacgcatcgatgggacaccattggctagaaccaacacctttatgaagataggtgtcgattctgaataaaaactgacactgacggagcgtggggctcctcaccgggagaccgcgcgggcccccctttgccggttcggccgggggcgctaggtgaggttctaagccctcgatctgtggaatgtttcgcgagagagcaaatgcctaagacacgggcgatgtagacaggttcgggccgctgagaagcgtaataccctactcctgtgttctggtggatctgtgtatgaaggagttacaaagagctggagagcaatagagttcaaactctagagaccctcttcctctttctctcctctacgagctcaggtgttctcccctttttttcccttttttctcttaagtgggcaaggtcctccttttatatctcaaggggataccacatgcaccacttctacctactcttcttttgggtggggactcaccctatcttccaaaaaaaagactggcttgcgccttcgcctggaagctaaatcacagcttgtctttgagtgaggcccagcgttatcactcgcctggcaccgaggatctccctgttactccctcattaatgggcggagatttgccatggctgctgtccgaatgaccctccgatgggatgggccatacctacctccactccgccggaagcaggcgcaacgtgggagcacggttgtctgccgatgacgtgaccggcgttagaccagtcacaaaccggtcattcttgtctaccacgcgtcagtttagcatgccacacatcagcccttcttcctaaaatgacttccttgtaatggttgcgatgaagcctggtatgaatctagccgggactgacgtgctaactccaggagttagcacgccggctccggttagggacgagtgcctagaggctctcatcattccgacgggacggggcgaggcgtgcgaaaggctgcctgttgccacctaacccgcgatctgaccggtctgtgaccggtcacacactgtgacctgtcacggaccaaacgagtgtgctgcgctgcattaaatgcgccgtggggcgctcgtccaacccgcaataaacgcggttaggtgagcgccgctgtgctcacctaacccacacacgtggcgccaaacccacagggggtcggggcgccccagccctcggggccgaaacgggagtggcccgaccccttggggagacagagggaggggcggccacatcaccctcgggcccgacccccccgagggggtcaggccacgtgggtgaccgcggctgccccaaacctctagtcaagatacccccggtcccatgtcaccgacagtagcccccggcgttatgccagggcgatcgccctcctcgaggaaagcgctcgggcgtgacgccactccttaggcctggtgacaggtggggccggtctctacaggcgggcaggaatccagtggtcgcaaatcgcgcgcatcggcaagggaaaaccgaccgacaataatgagcggctttcttcaagaccgctacattacttgagtagcgcgcgaatcgggacgagccggttcgtttcgcctggagatgtgatgatggtgcatcggtcggcgagcgtagtttaacgcgcgcacgatatgtcccatctcgactgccacggccgcacatccgcctcatgcgccgcaaacgggcgagcgggattagtggaggagtgggcgcgagaaacgagggggcgagatagtgggcgcgggaagcgaggagccgggcatagcgttggcaagggtataaagacgccgaggaagagattcgtttccttcctctcgccactcttccccttgcctttgccacttgtgctctgactctccgtttccggcgccctacccttgccatactcactcgctctcaagcccctcctccgccggcgtcatggcacggggctccgcaccgctcgacggtagcgtgctgccgccttctcgcatcgtgagcgagaggcaggctgggctgccgcgccgattcatgccggaatctgccaccagccgggaggtggtcgcgctgggtgagggacacccggcgccacactacccggggcggtccgtcttcttcctttccttcgcaatggcagggctggtcccgccattctcttctttcttcatggatgttctggagctttatgatctccagatggcgcacctcacccccaacgcggtaatgacgttggccatcttcgcgcacctgtgcgagatgttcatcggggtgcgcccatctctccggctgttccggtggttcttcaccgtacagccggtgtcgccaccgtcggtagtcggtggctgctacttccagccgcaggggccggtgctgaaccgctacattccctgcgtccttcgcaagaagtgggacgactggaagagcgactggttctacacccctctcgccgacgaagcgcgcctccgacttccgagccagcccccggcgcaggcctccagctggcgggcgccggtagatctgggagacggctacgacgccgttcttgaccgcctggctggtctgcgattccaggggctcacgggggccatggtgtacggcgattaccttcgtcgccggatcgcgccgctccagcggcgcgcccggggcgcctgggagtacaccgggtccaaggactacacgaggacccaccagggggtcaaatgggactgggtccctgaagacttcaagatggtgatccaacgggtgctgaatctcagctccgtggaggcatccctcatcccccaaggtgtcctccccctctgcagcgatccagagcgcgccaacatcctgaccatcatgcaggcggtcggggcgttaggggagcgggctcctcgaggccacgatggcgcgggcgggagccacaggggggaacaatctaccccgggagggggtcgtgcttctgggccccgtgacgggggcccggggggcagccgccctgccgacgcccgggggaagaggaaacaggaggataccccctccccatctcctccccgagggggcggggcggtgcgtgccagcagcaggcgcccggagggtgctgtgccgacgtcatagcccgagggggagcgaaaaaagaagcggctccgcaagatgggggggaccgaaccatgccggggaaacctcatctcccccccaaggtggaagtttagccgacctcctcgcaggttcgtcctcgcgcccactgcggccgtattcattctcccatctcccaaggcaagttttcactcacccgtttttcgtcttctggtttttcttctgcctcagcgagatcccgtcgcacccttcccgccattccaagtccggccggtctgaggccgaggagacggcgaccgcggaggcccggaggtgggaagctgaccggtgagaagtcgcagaccgcctccgggaagccgaggaagctgcccaggaggccgtccgggctcgccaggctgaggaagccgcttgggaggaggccaaactctgccgggccgaggagtccgtccgggagacggaggcggcgcgcgcacgccgggcggcctgccaagcccccgacccgactccgtccgaggcgacaacgacttccgaggccacccacgacgaggccgcgggcgcgccgctcggacccgacccctcgggcgacgttcgggacgagcccgcttcgggggacgcccccgagttcggcacgtcgatcggcgggccgagccgcgcggcgcccacaccgaggcgggtctcccctctgccttccgctgccccactgagcgcagagcccctcctgcaggccttggccgctgcgaacaccacggtgttggacgggttaagcgcccagatggaggtcctgcaggcagagcgggcgaaggtcgatgcggcgtgggcgcgcgtcgaagaggggcggcgctcagtggaagccatggtggaggcgggccgcaaggcacaccgccggcacgcctcagagctcgaggcccgtcgtagggacctggcggagatcgccagggaggtggaggaggagcgggagactgccctcatcgccaccgccgtgttcaacgcggcgcgggacgacctctgtctccaatacgggagccgggcggcggagctagagaagaagctcgacgcgtcccggcagctcgaagaggcccttgaggctcgcgccacggtgctggaggagcgcgcccgcgccctggacacgaaggagagggaactggcgggtcgcgaggccgccgtcgccatccgggaggcaacgctggcggcgcacgaggccgcctgcgccgaagaggagtccgcactccgcctccgcgaggacgagctcactgagcgggagcgagctctcgaggaggccgaggccgcggcgcagcggcgggaggagcaggcgcacctcaatctggaaggcgcccgcgccgagagggccgcactggatcagcgggccgctgaattcgaggcgcgggcgaaggagctggacgcgagagcgcgcagcgacggggcggccgcgggcgacggcgacctagccgcccgcctcgcagccgccgaacacaccatcgccgagctgcagggcacgctggactcgtccgccggggaggtcgaagccctccgcttggcgggcgaggtagggcccgacatgctccgggacgccgtctcccgtctagaccgtgccgggcggcaggcgggcctctggggcgggcggaccgcgaaatacgccgccaaccaggagggcctcgcccagcgcctctcagagatggccgggaccctccagcggctccccgaggagctcgaggagacgatcaagtcatcctcgagggacctcgcccggggggcggtggagctcgtactggcaagctaccaggccagggaccctgacttctcctcgtgggcagcgctggacgagttccctcctggaaccgaggatggcgcgcgcgcgcaggtccgggactccgccgaccacatcgtccacagcttcgagggtacggcccctcggctcgcgttcgccctcgactccgacgaggagggcggtaacggtggtgcggacgacagcgacgacgaggccggcgacctgggcgcgtcggcgtgagcccccaggcccccgccaatcttaaatagctttttctttcttcttctgaggtcttcgggcccccttcttgtatagactgatttaatctgtaatcaagtaaagaggaaatttctgcgtcagttatgtttgttgtgtgtatgagacgaggatggtctgtgccgcggtccttctgtgtcttggcttgaacgagggctcgtgcccaggtcccaacctcaagcggcacgggtcggggctagtgcctggggagatccgcgtgtcgagactggccaggccgggagcgtggtgaccgagggttatggatgacccgattgtgggcctttgccgattcccccccggagttcaccacgccccggggcacggctcggttctgggccccgtttggcaattttagccggcccgggccaccgagggcagggtcgagcacgagcgtgctaattcaagccaagattcttcaaaaggaaacgatggcacagacacaatcctcaggaaatcgaaaatgcttttattgaaatatggaagagaaaaaagataaggacatgcatgtggtagcccccggccaaccctgcacgcctgggggggcgcggggttggcccgagcccgagacctgacacccgacccccactaggggtagaagcgacgaaggtgttcgatgttccacgaattaggcagctctgtgccgtcgcccgtggccagccgaacggagcccggccgggggacgccgatcactcgatacggaccctcccacattggtgagagcttgctcagtccagcacgcgtttggacgcggcgtaggacgaggtcgtcgacgcagagtgatcgggcccggacgtggcgctgatggtagcgccgcaggctctgctggtagcgcgcgactcggagggccgcgcgccgccttcgctcttccaagtagtcgaggtcatctctacgatgctgatcttgatcagcctcgcagtacatggtggcccgaggggacctcagggtgagctcggatgggagaaccgcctccgcgccgtagacgaggaagaaaggcgtttccccggttgctcggcttggcgtggttcggttcgcccagagcaccgctggcaactcctcgatccacgagtcgccgtgcttcttgaggatgttgaaggttttggttttgaggcccttgaggatttctgcgttggcgcgctccacttggccattgcttccggggtgggcgggagaggcgaagcagagcttgatgcccatatcttcgcagtagtcaccgaagagttcactagtgaactgggtgccgttatccgtaatgatacgattaggcaccccaaaccgagcagtgatgcccctgatgaatttaagcgcggagtgcttatcgatattgatgaccgggtaagcctcgggccacttagtgaacttgtcgacagcgacatacagatactcgaacccgcccagggcccgcctaaatggacccaggatatcgagcccccagacagcaaacggccatgaaagaggtatggtctgcagggcctgggccggctgataggtttgcttggcgtggaactggcacaccctgcaccgccggaccaggtcaaccgcatcgttgagagccgtcggccaatagaaaccctggcgaaaggccttgccaaccaaggtgcgtgaggcggagtgggctccgcactcgccttcatggatatcggcaagaagctcgacgccttgttcccgaggaatgcacttcaggaggactccgttagccgcgcgccgatagagggtcccttccaccagcacgtagcgcttggagatgcgttggacgtgttcactcccttcgcggtcctcgggtagagtcttatctgtgaggtatgcctggatctcagcgatccaagcaaccaatctaagggagctgggagcgctcccctcgggtcccgaggcctggactccgacgggcctcgggggccgttcaggcgcgtccgtctcccctagggggtcgggccgcgccgacggctgggcaagcctttcttcaaaggcgcccggtggggtctgggctcgcgaggaagcgagcctcgagagttcgtcggcgactgcgttatcccgtcttggcacgtgccgaagctctatcccgtcaaaatggcgctccatacgccgcacttggcgcacgtaggcgtccatctgcgggtcagagcaccggtactccttacagacctggttaacgaccagctgggagtcgcctaacaccaggaggcggcggatccccagtccagctgccaccctgagtcccgcaaggagtccctcgtactccgccatattattggtcgcccgaaagtcgaggcgaactaggtatctgaggacgtctccgtttggcgaggtcaacgtgacccccgcaccggcgccctgaagagatagggagccgtcgaactgcatcacccagtaggcggtgtgaggcagctacgaggggcccgagttggcctcggggacggagatgggctcaggggccggggtccactctgccacaaagtcggcgagggcctggctcttgatcgcgtggcgtggttcaaagtgcaaatcgaactcagagagttcgattgcccatttcaccacccgtccagtaccctctcggttatgcaagatttggccgagggggtaagacgtaaccaccgtgacccgatgcgcctgcaaaataatggcgcaacttcctcgaagccatcagaatagcataaagcatcttctgggcctgagggtatcgggtcttagcgtcccggagggcctcgctaacgaagtagacgggccgctgcacctttcggcggggccgatcctcttcgctaggggccgcatctccagggcgctcttcgtccgagaggccgcgcggggcgcactcggcttctgtgccgacgacctcggggtcggagggcgacaggcgcggccttcccgcagtggccccggggccatcctgggggtcgggggtgcctggcaccgtcggacaagcgggcggagggccaactccggccgtcgggtgcctcgggccgccgttcgactcgggggcctctcctccctgctctctcccgggtcgagtcgacacagggtggggatgcgcggagtgagggttgtcctcgtcgcgctccaagaccaacgccgcgctgaccacctgcggggttgccgccaggtaaagtagcagcggctcatctggctccggggcgaccaggactgggggagaactgaggtacgccttcaactgagtgaaggcccgctcagcctcctccgtccagataaacggcccggagcgtttgaggagcttaaataagggtagcgccttctctcccagcctcgatatgaaccgacttagggcggccatgcagccggtgacgcattgcacatccctaagcttgctgggggggcgcatccgctctatagctcgtatcttctcggggttggcctcgatgcctcgggcagagaccaagaacccgagaagcttgcccgcaggcacaccgaacacgcacttgtcggggttcagttttatgcgggcggagcggagactttcgaaagtttccgctagatccgagagtaaggtctcttggttgcgcgtcttcacaaccaagtcatcaacataggcctcaacattacgtcctatttggctacccaaagaaattcgagtagtacgctgaaaagtaggacctgcattctttaacccgaaaggcattgtcgtataacaataagttcctatgggggtaatgaaagtagttttttcctcatcctccctagccatgcgaatctgatgataaccagagtatgcatctagaaaacacaaaaggtcgcaccccgcggtggagtcgacaatctgatctatgcgtggcagggggtaagggtccttaggacatgccttgttaaggtcggtgtagtcgatgcacatccgaagcttgccgttcaccttgggaacgacgaccgggttcgccagccactccggatggataacctctcggatgaatccagcctccagaagttgcgccacctcctcgcggatgaaggcttgacgttccggggcctgccgccgcactttctgctggaccggccttgcgcccggccgcacggcgagacggtgctcaatcacctccctggggaccccgggcatgtccgccggtctccaggcgaagacgtcggcgtttgcccgcaggaaggagacgagcgcgtcttcctatttgccgtccagaagaccaccgattcgtgtggtcttggacgggccatcgcccagggcaacctccttgaccgggacctcgtcgcacgtgatcatccactgcctcggggcggctgggacggaggtgctgagcctctcattgccaccctcgggcttggacgcggcggcgaggtggtccgcgcgctgctccatacaagcaagcgcgactttgaggtcgccatggacagagatggggccaccggggcccggcatcttcatctggaggtaggcgtagtggaccgccgccatgaacttcaccaacgcgggcctccccaggaccgcgttgtagggcagactgaggtccgccacatcgaagttcacccgctccgtgcggaagttggcggatccaccgaaggtgaccgggaggtcgatatgacctagcggccaagtgtgccccggcgtcacaccgataatcggctgggacggccgaagcaccatccccggggccttgatggcgtcaaaggctgcgggggaaaggatgttgagggctgcacccccgtctatgaggacacgccccaacttcacgttgcaaacggtgggggaaaccaccatcgcgatctgtcctccccgggcaacgcacggcgggtggtcggtctggtcgaaggtgagggcaacctccgaccaccgcgcccgccgcgtcgcctcatgggtagggcccgcggccagaagctctcgcttcatggccttgaggctccgacgagaagcgtgagcgcacgctcccccatcgacggtggcgatggtggccccaggctcctggaaccctaagtcatcgtcgccatcgtcgatgtcctcggcgggggccttctgcttggcctcacttcgccggttgccggagggagccgccggggccttgccctcacggcgctcctgcctcctctcctcctcccacttcctcgtccgctcagccaaacttttgaccgcgcggcagtccgcgaggtcgtggagggaggtgttgtgcacggtgcaccacttgccggtcgggcgctccctgctgggagcgccggctcgctcgcaggcctcccctttcgggtggcccgcgaagcgccctcgacggcgaggacgtgaccctcgtcgtcggaatgggccgacctcttcttcctcctcctgtcccgccgccctgaccgagcggcggatccgggggcggccgaagctgccacaccggaaccggtggagttccaggtccaggcctcctccttgcgagccacacgatccgcgagctgaaaaagctccgcggtggtctggggctccttggaggcgatcttttcgagcatgcggttgtgccgcacgccccccctgaacgcgtagattaccgcgtgtgcagggatgcatggtatggtgttgcggacttgacagaaccgctgaatgtacgagcgaagagactcatcgtcccttcgctgtaccgcatgcaagtccgcttcttcacctgggcgcggatatgtgccttggaagttcatggtgaactgctggcacaaatcctcccaagagtggaccgacgcgggcggcaagttcattagccaaccccgcgcctgtcccttcagggccatggggaagaaattcaccatgaccctgtcgtcacccccggcggcctcgatcccggtcgtgtagacctggagaaactcggcggggttgacgcttccgtcatatttttcggtgatggtgggccggaaccttgggggccaacggacgttccgaaggctcgccacaaaggctcgacagccgacaccaccaaccgggggcacggggggctggcccccgcgcccgaaccgaagtggcgctccggacgaggaagcgccttccgttgcgtgggcagcacgacgaccattgcgccggcgcttgacactgaggcgggcatccggccccctacgcacatcttcttgggtcggaggcgttgacgagggaatggcagacgaacggcgggtaacggccgccgctcgccgcgccctccgccttgacgacacggagccggcggtagcagcgccagaggccttggtggcggaggaccgcccaccggcgcctaggcgctgctgcgccgtcatgaccaagtcggccacgtcatccagccaacgtcgggctggagtctctggatcggggacgacgggcgggtgacgcaggagcgcgcccgcagcttggagcacgccctggggcgtgctgccatcgccgtagacgaggaggcaacgctccccgtctcgccgtcgttctccatcgctcgtgggcggcgaagtcgcggatctttcgaccccctcgagcgcctcctcccgcctaagacttcggcgagaggggggcggtggagtacgagctcgtcggcacgggttctgctccccgtcgtcaccgctagcgctcggagagaggttgtgcgccactgcccgttcggccattgggctgagcgggagaagcttggcgcacacgaaagaggacgagggcttagaaaaacacacgcgccccctacctggcgcgccagatgacggagcgtggggctcctcaccgggagaccgcgcgggcccccctttgccggttcggccgggggcgctaggtgaggttctaagccctcgatctgtggaatgtttcgcgagagagcaaatgcgtaagacacggacgatgtagacaggttcgggccgctgagaagcgtaataccctactcctgtgttctggtggatctgtgtatgaaggagttacaaagagctggagagcaatagagttcaaactctagagaccctcttcctctttctctcctctacgagctcaggtgttctcccctttttttccct

SEQ ID NO: 18083 - DNA, 15568 bp, Oryza sativa
cccttggggagacagagggaggggcggccacatcaccctcgggcccgacccccccgagggggtcaggccacgtgggtgaccgcggctgccccaaacctctagtcaagatacccccggtcccatgtcaccgacagacacctattgtactagtgttggatttttttttggaagaaccgatacccatatttatattataggtgccggttttataaaagagaatcggctgacatcgaagtttagattgagggggagtgttagatcataacatattggtgtacttatctatgtgtgttagttgagatacccggtagtttagataagctaatcatcccatgaactccctcctttcttaaatgtttggcgccgttgacttttttaaacatgtttgaccattcgtcttattcaaaaacttttgtgaaatatgtaaaactatatgtatacattgaagtatatttaacaataaatcaaatgataggaaaagaattaataattacttaatttttttgaataagacgaacaatcaaacatgttttaaaaagtcagcggcgtcaaacattttgggatggagggagtaaataggatccgggttatccatgcaacacacatatatatgcctgtacttctcccgtgcgatttatgcacaacaaaattaacatgtagcagtagcgtcacaccgatcgacgttaactcagattagattttctttcaatgtgatgtggggatttggggatttcaatttggtttgggatgtttggggaaatcaatatgcaagcagcaaaaacattgaaaaaaaggaaaaaaatatctgtagtcccgctaaagattgcagtgtgtcacacacgttatcaatgtcgaactggacgatgacatggatcaagagctgatcgaaatccgttcttgatcagggcgaagtgacgatgtgttctgcgccgactcgacgacgaagcctcaccatgatcagcctaaaggtcatcgacgtgccccgcgcgtcgccgagctgtgtcaccggagaggcgcgctggtgtgcattgacagcacgctggcgtcgcccatcaaccacacaagtctctcaccctcagcgccgcggcatcatcctccacaccgccacccaccaccaagtacatcaccggccaacctagacgtcatcgtcggctgcgtcagcgggctcagaggcttgggccatagcgccggagctcactaccagcaggtggtactcgccggcatggagacgaggagagaagagaagaagaggtggaaagtagaaggtcatttacacgtgggtcttacattatttattttatttttgacattattttattttatttttgttgattagggtgtcacgtcagcgaaaccacctatacatactgtcacgggacttgacttaaatggttttgtcaagatggagggtgaaaaatgtctggtattacggtttatggatgataattaaactcggtgtaaaaatgagggatgccaagagaacttattccttcaatctatgccctttctagcgttttggcccattttttagcccatcgcacacaatcatttccaagctcattttggactttttatttttcagtaacaggaaaaaaaaagaaaatcaactacaatttgtggcatagtagtttgatcatgctagataagtgtttccattattgatgcaggcttgtcacatttttaaagttcatattcccacgtgtcatactcacacacttccttgttaaagtttgtcatgtttttttttattcggagatctgtcaaatttataatcactaactttggtgtcacacaaattactgcatttgcgaaaacaacttttctggcacacattttttttcaagaacacaatcacacaaacattcctttccttggcccatctacatgtttatttgggcttagactttgtgtatggaaactttcttcttagatactttctacatagaaagtctatacatattcaaaaactttctatagttaaattttaaacggatttaaaaaattagtttaaaagaaaaggaaatattgtatgaactttctattggaccttaaattagctcaaataaaaactaggtccatatgcatgtgtagttaagcctgcgagcgatgataacgcgtgtatccatgactcgattctatagcaagattagtaagagaaaaagataagccattcttggttgatatggttttatttggagaatagtttatttactttagttacctttatcttgcaaaagaatggtccttagttttgtaagtccgatcttatgtgatgtgccagagattattcgatctctgaactctgtttagcatgtctctcctacccgacatcgacattgatattactgcctccattctttgaactaagggttgaatttattttgagactgggagaatatcatatgcccttgcatgtttcataccccctccgtctcataatataaagaatttgggttggatgtgacacatcatattactacgaatttgaacaaatggacaggaacaaaactagcatcaaaacaagggggtgcactaccattgaacatttagaaaatttcactccaacactgtacattctagtgtttttgagtgagaaattagaaatttgggggttcatgtgcaccccctccccccccccccaaagaactctatagcttcgccactgcagatggagtatgttatatccatattcgtagtaatatggtgtgtcatatctaacccaaatcccttatattttaggacggagagagagtatgttataaagaaatacaatatttactatttaatggatcgttacatgtggcattaattaccacgaaatgtttggcacaataaggcgtgcacaatgtttgattgtgaaaagcagcatggattgaagaagagcattgcgtacgtacgtgttgcatgaaaccagtttggacaaaatggagcaaaactcaacatgtacagattcataaaacaatgaattaaatccaaggggatattaagtcaagaacatataacaaattctgtcattaaattgggaaaaaaaaaggcaagaaagaaataagctaaaaagatcggagtagctcgctgcgtactctatccgtcccataaaaaactagatgtgatacatcctagtactacaaatcagtacatacatatatctagatttatcgtactagaatatatcatatctggtcctagattcggttttttatgggacggtgggagtatcgatggattaattccatggcggtcggtctggacgagatcatcctcctttctgcttgaaggaggagtacatctggacaatggtggagacgaaggtgacgaaggcgacgaactcggcgaccaccgcccatggcaccgtgaagtagttgcgcttcacgtccgcccacatcatgaacagcgggtgccggctcctctcccggagctccaccaccatccctcccaggtagctccgctccagctccacctcgccgctcgccgccccgacctgccggaacagcctcaccacctcctccttgccctcgccgccgccgttcccgtgcaccaccgccaccacctccgccgccgccagcgccccggcgtcctccgccgactgcaccatcttcgccatgaacgacacgtacgccgacacgtcgcgcgcctccgccttcgccgccgactgctcgaacgccatcaggttcagcagcagcggcgccgtccggagctccacccgcagctgcggcagccgcagcttgtcctcgtgcgccagcttcaccgccagcggcaccggccccatcaccgacgcgatgcctgtcaccgccgccgcgccgccgccgcgcggcttcttgaaccgcacccacatccgcttcaggtcgctcgccgacggcacgtcctcccgcccgtagctcgcccgccacttgctctcctccggcaggatggggtacagcagcggcaccagcagcagcagcgggagccgccgcagcagccgcgctccgtcctgcgccgtcccgagcaccgcgccgtcctggatgcgcggcggcggctcccacttggtccgcgccgcgacgatcatcgcgtggagcaggtggaggatgtgggacacgccctccgcgggcggcagcgcgtcgcccaccatgtcgcggcccttctcgccggcgaggtagtagagaaccagcttcacgatcagcaccggcggcgggtggccggtgctcgcgaactccggcaggtcggtgatcctgaccaggtcgacgaggacgaagaacgggatctggttctcggcgaggatgaggtcgacggagagctgcacgggggcgaacggcgtggcgtgcagcgacggctcatccctcccgatggcgacgttgacgaggtgctcgatgatgaagcagccgtcgagcaccagcatcatgatgaactcctcggcgtacatgtcgacgtcctcgctgtagaacgcgcgcgcctccctctccctcgccgcgacggcgcggatgtactcctcgatgacggcgagctgccgcgcctggtcggagtggccgcgggagatgaggctgtggaggtacgccatcttgaggcgctcgccggcgccgagccgccgcgcgtcgccgcggtggagcgggccgacggcgacgaaccgcggcgtgtaggcgtcggcgttggcgtcgcggaggtgcgccgggacgcgggacacccggtggctgctcgccatgatccggtgctgctcgtccgacgccgccgcctcctgcctctgcatcagcccgcgcgccatctgctccacgtgcaccgtgatgccgtcgccgtcaccgttgccgccgccgctgccgcggcgcgccatggctcgccggcgagctatggcgccgtcgaactcctccatatctgatcagtgagcaccaataccagatagcattacgtatcagcttataaatacaagccaggtagacactagtgtacagtgtgcagttcatgaacgttattaaggtcttgtttgtttcagcttaagattattgtaatccagattattaaatcagattactctaagctggattataataagctgatatagaataagttgcgagttgtttgtttctctggattattggaggcatctaagggtagtgggtctttagccactcaataatctagaaaaagctccttcaaaggagattattagattatactaatctggcttatagattataataatctatcataataatctacttgtttatttcggcttactcatgataatccagattataataatcctaagctgaatcaaatagggcctaagtgtcagtgatggattaggaggcttaattaacacgacttacagttacaaaagggtagtgacatggacacgcaagaatttgattttgagtatattttatcatctggattctggaagtagcttgcattggggacaaagatgacgctaatttatccaagtcatgaatgctgataggctggtaattccattctttgcttgcagtgtctgcagacgatgagattctttttgtctccaggcttgctaatctttagtaatttccaatcaaaattcatacaaagagaaactgacacaacctagcaatgcagacaaatcattcacatgagcatctctccaaattgatttccaagtagaattgtgttacatcccaaaaatataagttgttgtttgagacaacagtgttagtattgatatcagactatagcagttaagtctagtggcagtaactgaaaaaggggcacaatggctgtatgcccaggcatcttcagagactctgcagtattctcctgcagtagaagtcactgacatctgggctcttggtaagtgtggcccacatgtcagtcgcagtactgcagaggatctcattcccatcttcagttatgctgtccaaactttcaaaagcgtctcatcaaacttgggggcattgcaaaccatctgtgctactaccagttccgagctctttccgtcttctcgcgttcgtgcatatgtccaagcagggctcctttagggctttgtcggtgtcaagaggtggaggtgacaccccaaagttgaactgaaatgaaagacaacatgcgcctgagtattccattgtgcttcatcatgacattcggttttgcaaagaacaaaacttagcatgtacatatctagtttgttggaaagtttttgtttcagcatagtaagattaatcatgaaatgaattacctggcagctatagtcttcaaagtttggttccatatacaaatcaacacccatgtgatccttgaagaatgtctggaaaacagaaaatggcgttcatacaagtaatgacagaaaaattcagaacaaaaaggttttcaagatctatactccaaattaatgtgacatcaacagtgatagtgtacataaaagtaggtatcccacacatctgaattatgctaaacgatcttacaatcaaacctgagttggcagtttgcatgtgttgatacaaacaccaaggcatttgctctcttccaaatatttgcacttctcaacaaatacctgacagtttccatcacgcaatgtccgtgaactgtaaaatctcactgagtgaaggataaacaaaaaaaacagtaggaatatattggtaccccgcttgataatgattttccattggataatgttatggaatttaacaaacatggccccatcagccattggcatgaaagtgctgttgctctagcttcacatctcaaatgtattaaaaaaatcagtaaggccaatcacactacatcaaaagcaactactgcaatgaactcaccaaccatcgattcctattgtatgtctaataagtaccaacagaggtggcaaaaaatgtcacttgagtgaactcaccaaccatcatggaagccaattgaccattagcaattggtgctaaaagagctttgaagagaacaagcaagagagggggaaacagtgatcggagtactcggacctgaaatttacagagaagagagtttgattttatcttctaaaggatacggttttttccaagcaatgagattgtgcatgagaaatttatatatacagctgattgctctgtctccaacgcactcttccccttgatcatgaggcggttggcaacttcaatcagtccattgtagccaggcttttcagaatcccatccaacctcctacagctttacagagaatgagagaattaccaaatgtacaaataaggagagcaaaagtgaaaaatatggatccattctcggtattgtataacggtagagagctagaaggagaattgatccaatgcatactcctaccgatcatgatacgttacaaatgtaaacacatatatatgtgataaactctaactgggtcagctatacacagggaacagaacacgccataagcataggacgtacacacgcacagagcagtatggcacacgttcactaataggcaattaggcatacaattgcagttgcagataaacgctatacaaaatcatagtaataagcaattcagcgatgccgattatgggagttaggaatagataatttatccacgaactgatcaacaccacttatcaatcatttttgttcgactctgaacattcatcaaccatcaatatgacattgtcagattatttgctagtagtagtaagcatcttccttttcgggaggataatcctatcgcaactcccttgatatttctgctagtaatcacccatgctactaaaaagcaagcactaggaaggggcaaccattgttaagctcaaaaaggggaagacgaagaagaactgaagaagagtttggggtgatggagcttgtcacctccaccatcttggcacggaagaaggcgaggaggaagtcgtcggcgaaggagggctcgtactcgcggccaccctcccccgacggcgacgccgcatccgcctgcacaaagtgaaacaaatcaatcaagaaacactagcagcagcagcagcagctattcgcatcttgcttaacaacgaaagggcgtatcattaccgacggcgaggagcagcggagcaaggaggtagtaggccggcggcggagcccccgagaagaggaggaggcgacagggaggagggcgcggaggaggcagggaggagacggcggcgccatggccatgggcaagtgcagcggcagccggcgcgcgagacggacagaggctgaggcaaatcggtggtggatagccggctgggaccacatgtcagctaccaaggccgtagtcaccgatgtccacaaaccaatctaacatatatgggccgcgcgaaggccggaatctcgttcaggcccatattatattgggcctcacgttgactggaatagcttctttcggcccaaccaaaggaaaaagtacactcgaaggtacctcaacttgtcaccaggataaaaaaacgtcctcgaatcgcaaaaaccagataagcggggtcccttgactatacaaaatcggtcacccgaggtcctttggtggttttgaccccggttttagtctacgtggcggctgagtcagcgtgggacccacgtgagccccacatgtcaggtgtccacgtcaccctctctctttcccctttctttttttctcttctttttttttacttctcgttccttgctactcacccggccgtgtgctcgcccacctgccaccaccgccgctccatgcctccgcttcgccggtggctgcgcgctcgcctgccgccttcgttggccgccgctcgctcgctcgccgtgaacagcgcgaagctaatgtcaccgcctacgcgtacgcgcagctgcagagtatccccgtcagccacgcacatcacatcaccttctcgcacgccaggttctccagcctcagcgcccccgccgcggtcaggttcatccgggggtcgtccgcgccgtccgccgcgtcagggcacacgaactcccacagccccttctgctcccccgccgccgcctcgctgccgatgggctccttgccccagaaccatgggtggatcagcacgatgccctttaggcggtgcgggaggtgttggctggtcaggccatggtgcatggcgaggtgatggcagatgttgccgccggcgctgtcttccgcgaggaagacgtgggagaggtcaccgtgcgcggcgagccatgggtcggcggtggagagcacccaggcgagtgtcgtggcggagtcctcatacgcggccgggagcgggtgctccggggcgaggcggtatgtcacgccccgaactagtaccgaccggaactagcccgtgacgctccaaattaacctgtaattcgataccagtcccaggaaacagtgctggtatcacaggaagacagattatcacagcaacagaggtctctttattatagagtagaggtacagtcatgttgggctgcggacagatctcgagctcacaactgcattacaaaagggaaacggaagccaggacttggaccaaacaacacaggcgcgacttgggaactaggccgaaaccctaaaactcatcgtagccggcttgctcctggaagaactcctcatcagcaggatccgcttcatcttcttcagcaactgggggggattatttatacagagcaagggtgagtacgggagtacttagcaagccaggggaaataagtgtttaatgcaggcttcaaggagaggctggtgtttttgcaattgattttatttgaactcttttctgaaacaactaagtgagtgcttctcaaacgacacggatgagacagtgcgtctcgtccggtcggagtatgtgcaatgtatcagtctttagatttgaatcaaggttggcacccggccaacagcttttcaaacggccacccgggccaacaactttcaaacggccacccgggcctacctgattccatcagttacagatttttcaatcatcgaacccctttccacaacagcaatttcacaagcagtagtcaaacaaaactacgctaggaatcacctcacatccgcccatgaccgtgggcacggctgttcgaacagtttgttaacctctgcagagggggtacactttacccacacgacattactaacccggatcacccagcccgtggggatcagccacgtcgggagacctccaagctttcatgacaaggcatttccaaagccgacacaggtttaccatatgccgacgagaggggtcccagaccaacaacaggttaggtcccagaccatactgtgccaggaagcccaggggtcctccccgacaccaccccggcgaatccacatgtctctcggcatcaaggctcccctgataagctagttactcagccaggggtgtcccattccacccatgtggtcgtacttgtcttatgtttgaatgaaattccaaggaaacggtccttaagtgcaagagcgggaaaccgtacacccggtacgttccccggtccgcggttttggaaattcatttagttcgcaagcaccgacccaggtgtcgggttttccaagtctttcgtaaaacccaagttttatccaagaagttttttattagattttaagtttgaaggcgtccgtcgatactcgcacagggtgcacgaatatcgagacgcaactagatggttaccaggggacacgatataacaattatcaaaggaaggatcaaatgcaaccaattaggtaggtccgccaatctgccttgcaggcgggacaacagattaagtgcgatcctatcaatgcataatatttttcaagcaacataattaatttcaaatataggctcaagatgttcaaaggtggcttgccttgctcgagatctggagcttgatcctcgaaatcctcgcactgcgggtcttcgggctccgaaactacacgcgaaacgggaaaactcaacaaacggcgaaaataaagccctattaatgacctctaagcgtgccattagatagatctcgagatttgaggaattttggaagttgaacggagtcaaacggatttacggttgggaagatattgaatttctaagattattggatttttgggtctaaaggaaaaaagatttaattaaatcctttttgaataagaaaagaaaagaaaagaaaagagggagggaaactagacttttcctcgggcggctagggcgcggcccgagagaaatggagcggtccggccgagctaaatgggccggccggcccaaggcggcccaagcgcgcgcgcgggagggaggagagagagagccggtggaccgggctcaccacgcgtggtgcccgggtgggacccgcttgtcggtgacacggttcaccgtgcggagcgagcacgcggcgcacgcgcgcgggcgggggagggacgcggtgcacgcacacggttcgcggtggatgcagatgcggcgggcccacgcgcagcctcacggctcgcggtgcaacgcgcgcacggggagggactgaccggggtcggcttgacccggtcttggccgaggtggcgccgacgtggcgcctacgtggctgccacgcgggccggcgggaggtagacgacgacgccggccggaacggacggcggacaatagcggcgagcggcggagcgaaccacggcgatacaggcaaaagcgagcacaccgggtggttgcacgagacgaggggagacgagccaacggctcggattcgccggagggagcttgacagcggcgaatcgcggcggcggcaaccggcggcgggagaagggggaaacgacgacgaggtcacgaggggccaattcccgacggcgagagcatctacgcggctacgggaatccgatgctagcgtcggattgggcagagctacgccgagcgaggctggcgacgagcgggtgctacggagctcgggcggtgacggcggcgagcacatggcgagcggcgacaacggtcggggcggcgccggctagctacggggaggctactcgtgctaccaccgaaaactaagggggggagatggagcgaggaggaagaacggagggaggcattaccgtgcggacggggcgcagtgacgagaggccgacggcgcgggagtaatctctccggcctcgggccgaggaagaggaagaagagggcgcgcccggagtccccttccgcgtccttgctcgtgccggctcctccgacacgcgcaacgacgaacggcgacggcgaacagagcacgggaggcggcggcaatggcgtggaggcgaatgggagaggaagggaaagggggaagcttgggttttaagggcggcaatgtcggtttggaaaccgactttgggcggtcaaggcgcgagctggcgctcggcgctcgcgtccaaattggcgacagggcggagggaggaggatgacgccagcgggaggaaaaaggggaaaaagagggagagaaagggggctcgccccttgcttctttgggaaaaggaggaggggagcgggggcgtcgcggcagagggaggagggctctgcctccgtcccttggcggcttgcgcgcggagaggcggggccgaggcgatgacgacggcgatgacggcggggcggtttggagcggagcggcgacacgggcgacaggcgcgggcaggcgctgacgacgacggcaaccaggcggtcggccactcggcacgcgcgcgcggcttgcaacgggaggcgcggcggattgagcggcgcggctcgggcacgcgcgctggctgcggggccgagcggctgcaggcgcggcagagcagcggggccgggcggcgcagacgcgacgcgggcgacgaccacgcgggcgcgcgcgcgaacgatgcgcggggagcggcagcgagggagcgaagaggagggctcggctcggcggctcacgcgcacgcgcgcgcggcgcgcgggcggagcagagggggagggggagagggagaccgccacagagggcgagcgccccgcccccgggggagatgggccgagagaaattcggcccatcgaccctgggggaggcaaaatagacttttgcggaggaatttgatttggaaggatttggattcgggattgaacttgacgatagatcggggattaagatctggagagggcacgaacactagacaacaagcaagaaacaatttcgcaattagggtttttatgaaataattttcccgctaggcgctacacggtagttgacggagacgacaacggcggggtaggcgatggcgaggtcgttgaggcagcggtggtacgcaggcgatgtggccgacctgatcacgaaccccccgccatggaagtagaccaccacggggagcctctcgcctccgacagcaacagcggcgggctgcggagaaggcggagaggcgcacgtccctggacaccacgtctcctgcaacacgcaatccagatggccgtgacgaggtgctcggcgtggtggtcgagatccaggaacggcacggcgcctccacctccagatggtcgacgtcgaccgccgcccgccgcctccgtcacctctccacccacagctctgcccccaccaccccgcgtatcctcgctcacctcgccgccgccgggtccacgccggtgagctcgcaagagcactgcctccctccttttcaccctcggccaaagcagccgccacagagccagccgtcgccggcaaccggacctcctcctctcccgcctcaccccgccggcctcttccgcacccgtcggtcggccgtcggcctgcccagagtccttgacaagaaagtgatggagaagagaaagggagagaagataggaaagagagagatgacgtggccagtctgacatgtggggcccatgtgggtcccgcgctgacgcagccgccacgtagaacaaaaccaggtttaaaaccaccgaaggacctcgggtgatcggttttgtatagttaagggactccgcatatctgattttgcggttcaagaacgtttttgtatcccgatgacaagttgagggaccttcggtgtactttttccccaactaaatgggtagcacgtgaagcctgaatcccgttgcggactaacatgtatatgggctgcacagcagcacgagggcccgttgcattcattttaagagcgatagaagttgttgactcgtgaggaagacaattacgatcggatacctgaacatattacggtgatataaagtggtcaaccccctcaaattagtaaaaactagattaagatgggttttgatagattgaaccggctagcgaagccgatttagatggaataaagataaattacccatctcgtgagcgaacgaaaggtttacgagacaaatctacgaagagatttcgcactcttacaactaatgcggatgatttacggtgcaaattgacaaagatggacaaaactaggctaaaaaactagacggaaattagatgcaatattgaaaaatcgattcaattggataaattgtattgagagtagattgtattgccctatataagggggttggtcttgccccctacaggtcctcctccacgtctaactcgggttagaaactaatggaaacccgaaacatacattcccgagcaaggaagtccgagacctgacgaaaacagctcggagtcggactttgccagtttgaccggctatataccgctggtcaaatcggccgacaggcagcggtcagatcagctctatgaacgaaacccgactcttttcaaactttggcaatattctcctattttaatcctaagtgctaaatttaggtgtaaacacatgcctcctgcctttttgtgaactttgtgaacctaaaagcataaaacacgtgatcttagggcaataatctaattgccggccatataactccctaagcgtcatgccaaacactcaggaagtatttctacaagtgtttcccattgatcgctctctaatatcgctctccttacaatgtctcgagataatatgtattccctcgaacgattccacatatgcgataaggatccttccaactaggtgaccacttactgaagtccttagatttagaaaccaaaggcaaaattgtcttccataccaagtctattacttgaaacaattttgctttcactcttttattgtaggctttaactaccttctttttctccttttttatctctcctaaagctttctaacgtttatcggtcacatcatcaagattatctcttattaatgttttgtactctccaacccataaatcatctttctttatgtatctataagagagccaagaactacctctaccagtaaaacggtttcttgcctataaacttactcaaaggggataactttagtagcaccatatttagatatcttatgagcccccaatatctctgaaagcgcctcatgccatctctttggttggtcctcaatctttttcttgactaattgtgttacatttgagacagaagtggtagtattgatcatcagacgacagcagttattatgtctagctagtaatagcaactgaagaaggggcacaatggctcaactcctctgcagcagtagaagtcgctgacgtgtgggcccttggcaagtgtggtccacatgtcattcctatcttcagttatactatccaaactttcaagaacatctcatcaaacttgaggacattgcaaactatctgtgctactacccgttccgagcactttccatcgtcctgcgttcgtgcatatgtccaagcagggctcctttaaggctttgtcggtgtcaaaaggtgaagtggcaccccaaagttgaactg

SEQ ID NO: 18084 - DNA, 1037 bp, Oryza sativa
tcctccaatgtttttttttgtcatactacatttgcacctatgttttgcacactttttttgtctccaaaatttagttgtaagttgatgagagagaaaatgtgtgtggggaagaaagaatatatagaaatttagttcatttgctaaacaaggttttataaaatagttgagaaggaaaactctagtgaaagttaatcttaaataatagaaaacaaactaaaatgaaaattaaaagaagtaaaacacattaaaattagtttaaaactttacaaatagtttttaagaattatttggtgtaatattttatgatttttgtatgaataaagatatcttataattattgtatgactgtcattattgtaagaataattatttgtgtacggtttttttgactcatgtagatggatcggcaatggatgtacgctgaccggcggtccaaagagtttattgacggcgtgcactattttttgagagtggccgaagctaacaggcaaaggggttttatttgttgtccatgcaataagtgtaagaatcagaaggagtattctgcatccaggactattcatttccacttgtttgagtcggggttcatgccaagctataattgttggacatcccacggagagcaaggtgttgaaatggaagaagatgaagtggaagacgacaatattccggactttgctcagtatgttggatttgaaggaaatcaaacgggcgaggaggaaatagctgctgatggtaacgacgttgcggatgatcttggtcagatgttgcaggacgccagggaggactgcgaaagtgaaaaggaggcccataaattggacaagatgttggaggaccacagaacttcgttgtacccaggttgcgagcaggggcacaaaaagttggataccactctggagttgttgcaatggaaggcaaaaaatggggttagtgacaaggcatttggcgatatattgaaactcgtcaagaacattcttccggggggaaacaaattgcccgagacaacgtacgaggctaagaagatagtctgcccgtta

SEQ ID NO: 18085 - DNA, 642 bp, Oryza sativa
tgtccctcacccagcgcgaccacctcccggctggtggcagattccggcatgaatcggcgcggcagcccagcctgcctctcgctcacgatgcgagaaggcggcagcacgctaccgtcgagcggtgcggagccccgtgccatgacgccggcggaggaggggcttgagagcgagtgagtatggcaagggtagggcgccggaaacggagagtcagagcacaagtggcaaaggcaaggggaagagtggcgagaggaaggaaacgaatctcttcctcggcgtctttatacccttgccaacgctatgcccggctcctcgcttcccgcgcccactatctcgccccctcgtttctcgcgcccactcctccactaatcccgctcgcccgtttgcggcgcatgaggcggatgtgcggccgtggcagtcgagatgggacatatcgtgcgcgcgttaaactacgctcgccgaccgatgcaccatcatcacatctccaggcgaaacgaaccggctcgtcccgattcgcgcgctactcaagtaatgtagcggtcttgaagaaagccgctcattattgtcggtcggttttcccttgccgatgcgcgcgatttgcgaccactggattcctgcccccctgtagagaccgggcccacctgt

SEQ ID NO: 18086 - DNA, 659 bp, Oryza sativa
gtactcccgtactcacccttgctctgtataaataatcccccccagttgctgaagaagatgaagcggatcctgctgatgaggagttcttccaggagcaagccggctacgatgagttttagggtttcggcctagttcccaagtcgcgcctgtgttgtttggtccaagtcctggcttccgtttcccttttgtaatgcagttgtgagctcgagatctgtccgcagcccaacatgactgtacctctactctataataaagagacctctgttgctgtgataatctgtcttcctgtgataccagcactgtttcctgggactggtatcgaattacaggttaatttggagcgtcacgggctagttccggtcggtactagttcggggcgtgacataccgcctcgccccggagcacccgctcccggccgcgtatgaggactccgccacgacactcgcctgggtgctctccaccgccgacccatggctcgccgcgcacggtgacctctcccacgtcttcctcgcggaagacagcgccggcggcaacatctgccatcacctcgccatgcaccatggcctgaccagccaacacctcccgcaccgcctaaagggcatcgtgctgatccacccatggttctggggcaaggagcccatcggcagggctgcaggaat

SEQ ID NO: 18087 - DNA, 2688 bp, Oryza sativa
tatattcctaaaatttggtgacactaataagaattcaacagggtcaagacgtaagcactgcccaaacaacctctggtgggttcaattgagcacaggcagctttgcatcagcaggagaattggttctaacatgcatggtgcagggacaactgattctacgaaaagccaggagtaggaacaatcattaccaaagctagtactcacgtccagcgcaactacatatattaaggcaaataataacaccacagaaaggcaaaaggattacattatattagattaaacctaagatgttgtcatgtatttgcgagaaacagtaagctcttaaaattactaaatatgcccaaaaaaaagggaagcaaatgttaactagagataacaataacctgataacaagccatactgtctgggtgacgccgcgagatacaaatacagttgaccataaatattaaggaagcagatacagtatgaggaagtactctcagagttccaattttctatcatacggtacgcaatctaatggagactgaatatcgattattgcatcatccctttcacgatttcaaaccatgagatgccgaaccctacgaagaagccaccggcggagatatcagcgcaatatagaagcgttacgccgcagagtttgaacgctcgtataaacgtaggttccgcaagcacctcaaaaccagactcgcgcgacttaacgcctaccacgaggcccgccagctgacctcggaccaggaaagcgtgagaactgcagccgcaaatgggctgaatcacgatcgtgttcgtcaaacttataacctgcaaaacgaatcgtgttggtttatgttttttccaatcgtcgtgtgagcaagagtacgaacctcaaacgcgcattccgtgcaatgaaggatacgcatggaaagaccaaacataaacaggaataggacatcaagctaagtttaaatcgtgcagtatcctatagtgagctcattcttagcagcaaactataaaatgtcacctctagaagacacaaagcgcatcaaaacgtatgtactatgttggcattctgcagtgggaaaattgtagatatttcccaattgatagccaacttaatgctaccttgaagtagaaagtttaactaaataagaaagcaatactatgaccagtttccaagaagcgaggttagagaaaaagaggaatgcacacatatacgtgacagatgcatgttttcaaagtgaagagtcatattatctgtaaaacaacacaatccatatctacaaatataagtatgttcaccttgcaatgcttcaagagcaagagtagcttgcgcagggttatcaaaatcaacaaagcacaagacatgaggatctcctccaggctgcagaaaattagacagttaaaaagagatatagtgagagcacagaatttcatagcaaaagcatattaagcatacgtgtcttgactccttgttgacaagtctgacttcacgaaaacctacaaaagggcgaaatatatctgcagagcgaaaaggtcaaggagcaaaagcatatacctattgatagccaaaaaagaaatatgccaatacaccaactcatagagctattaaggaaaaaagaaattagaatatcaaacaaaacaaagttgagttgttaagggaacgaaatttagagtagaatacaagtacaattatacaaggatacgtgacacctcccttcgtgtgcagtttgcaggcaggccttcaacgtacagagtgcttgatgcatctgctgggagaggaggctcgggccttgcaccatagcccatacctctgctgtccatgccaacaccaatcatccgacgatcatcaacaggatagcctcccattccacccattccacccataccaccaacaactggcctattggtttcagtggcagcaacagaaggcatctgcaagcatagcatgcagactaaaagttaaggaactatcaactttaaaataatgcgtatatttatacagaggaacttgaagttgtaccccattacgcaagtagcgatcataggatgctccgatagcctcattctctctcagtgcatggtaacctgtcctgtcagtctcacgtggataataaccagtcatgtcttgtcctgcaggcacatctgcaaagtaataatattaagtttaaaagacgattccaactatctcatataattgatacaatcaatacaatggtaagttcaagatccttcaatagataaattgatgagaaaaggaggaaacgatattatagtaacaaggaaaaggatatgatgacataaattatgccaccaaccacaactaccaataaaacaacatgcagtaacttagatactgaaggatctatacccaacagaatctattgaaggatctacaccctgtcagaagatagcatagaatctacacccaacagaatataaacatctgcaacttatatatgctttgtgtaaatcatttcccataaagggagcagcaggaattcttcccaaggctccaaagacaatgaaactagtgactcccaaccggagctccttagtcaagaccataaaaaataattctaaacaggcacatattgtgttacagggctgtaacactgcatggaagatagtgcaataagcatagttagaaacttatcagtacaccttcacccctttgaaagttccgggaagattgaaactcacaaataataaa

SEQ ID NO: 18088 - DNA, 25493 bp, Oryza sativa
  unsure (1)..(25493): unsure at all n locations
actggctaaatcaaataatcatactgcagcattagatcctatattgcaagctttacgagacctaaaagcgagggtaaacatactgactgttacatacaacgaacaaagttcgtatagaaatttcttgtagatctcgtggcgaaactaagggtaaaaacaacgtgaaatttcaactagatcttcgtcaataatttcataaatcatggcacgcaagcaatatcggggagcaaaacaaccaccaaaacgaggatatagcctaaccccctagtacagatccagatctaagatggcgtagagcgcgagcaacggacgaacctccgtagtcggggcgcgcgcgcttgagcggcggcgcggcggcggcctgctgcgccatggcggcctgcgggggcatgcccgccgcggcctggccggccgtcgcgacagtcgccgccgtgggggccatccccgccgcggcggccgccgccgccaccatggcctgctgctgccgcgcgtcggcgaacctccagtagttctcggcggccatcgctgcctccctctcctccgcctcctatccccctaggtcgtggatctcgcctcgcggcttggtgagcttgacggcggcggcggcggcgcgcggctagggtttcgcgaacacgacacggggaggagtctggttcgggcaagaagatgagatctcgagagagagaattgatggggaaaagaaggcgaaagcgttggaagggaatacgtattaggacagggtttccctcgcaaaaatgccaccgcaactcgtgctcgcgtcgatctgggccgcggaattccgatcgtacggctgagggagtcggccaaaataggtggagggttccaaagggtaaaagcgtactactgcagggggtttaacgtaaaacaacaagcgctacctactaccacgatctgggccgtggaatcctgatcggttggcttgtgaggaccaaattaaggattgctaccaatggtaaccacactattgggccttcacaccctgaaagtttatatgggccgaactggagcccggtccccgttaggtgggcctattcggccttagatgtgcccatttcggccggatgagacgttactctacaatccatgggccttttagagatgatttgtggccgtacagtgtgtgggcttctgtctaattatcgtgtcagtcacttcgcttatagatatgcttatcatgcaaatgctaaaaaaataaatctttatctttatcttttatttatactattataaaattgaatatgtttttgctagtactctggtacgttatccttgtttgagtcggtttttaatgttgttcgcttttggaaatatggattcgtgtttgagtcggtttttatgtttgttcacttttgaaagtataaaaggagtcgtataagaaatatctttaagaaaactcacatgctaacttgagacgaaagttggactcctaattgcagctcataattttctaaaaaaagattaagcgaatttctagtgtaaattttatcttagctaaactgtataacaataataagattaaaatagccttcacccattgcaacgcacgggtattttttatagttaaaaattaaattttggtttataggtataaatataaacgaagcgatgggatttaaaaaattaacttgttgcaaaccggagttggtgaatcgtccttttgcaactttggtcatttggtgcatgagcgcctcgttttacttgctcctctttatgcttacatcctacctaatagctatcatgatgaatttgttgaatgccttagaacagaggaacaggaggttcccatgtcaagcaaaagggaatgctttaggcagatcatggagataaagactctatagaagcagcacacgtgaacgattcttgcgtaagtactccgccataatttctgacgaagatcggtttactaataggaacggacctttgtagggtaagtgtgcgtgtagatataagtgctcgcgtccatactacttcctctgtcttaaaaatataagtattttttatagacacgagtatattaataaaatatgtagaaatgattggataaggattgtgattggtggagaagataaagtatgtcaagacaacaacagttgtaaatgtgatctggacataagcatccactcaaaatcccttatatttttgggacggatggattagtatttatcaaaaatagaaaagaaaaacagcaagtaattagtaaggatcagctaaaaagatcaagaaaagcaatagtacgtgattagtaaagatttgctcattaaaaaaaagtataggtacgattacggtgaagaagcggagaaggtgattataaaaaagaagaagaaaggggcgcatcaccttcacgttccgagatgtggcacgaatcccgaggactgcagcccgagatcgggcgcgtgtcccgaggcagcatcggcgccatcaaccaacaacaaagatagtactagtataacaactaatcccaactcgcggagcagcgagatgagatgacactcttcttcacttgctgaacctgatagcgacattattcttcctctcaccttgccccttcacactcgtcactcgctccaaccagccgcctgagctctctcgccgtacgtcggcgctccatcggccggaattatcggcggcgatggggctgctgtcgcaccgcgtggagcggtcggagatgaagcccggcgaccacatctacacatggcgcgccgcctacacctactcccaccacggtacgtccctctgtcgatcgccggcgccattgccatttgccgacgctcccgtttcaattcgctcgccttccaaacccatctgaattatgcgagtttttttccggcaatctagccatatcccgtgcgacctcaatcgccggcgccattgccatgtgcttgcgcttccgtttcgccctccgaaccatgtgaattacgccgagtttttctttctggcaatctagttaattagcttccgagcaggcaagcattttcagtttccaggggttatgagatcagaattcccttgctcttcttctatactctgtagatgctgctgctgctgtgatacttccagcaaaatttttcagtgaatcgctgctgcaaattatttgctaggccggcattgtaacctgcactttccagttcagtgatcatcgatcgcatctgcagtcatcggagctgaatttttcgtgctaaagctgcgcaatgttatctccggtatgctgcttcactaatggatgattcgcactcctgccgcaaccaaatgttggttttacaaacatggttaggatatgatttaattacggttatatctaaccatatatattatccaagccccagttggctaattatttaattgatgactatttattactatctgctagatacccaataccaatccttgttaaccaccattcagtaagctgtgatcaaaggtgcctgcttttcttttaccatcactttgttaccaacacgcatcagcttcttccagctgcgttgccttacactctttttactttgcatctctcacttttacatgctccattgatttaatctctttattacttcaccgacgaacgacctttgatctctgcgattggaagaagcgtaaaggggctcgcctgtgtcgccgcttgctgctaccttccttcctggacggcatggggccggcgttctcgccatgagatttgcaggtgtttttgcttccgatcattggcatatgtagggcagcatcgacatggtggtggttgggtttctccacatgactgcctgcatccaaaagatgcggtgtgtttgcgagctacgatcgagtactgtgtctagtctgtcatttacaccttttgcaccccctccagcaatctctctggcctgtaaaatcttcgggtcagatcgatcaaaagaaaatcttaacttcagtaattgtcgcatgattaccatgctaactaagagtaattttattgtcggtactataggtatcacatcttctaaggtgaattttgatactacctctctcaataccttaggtatgactgaaagaaaatcttaacttcagtaaggaaaagtctatacatactaaattctgtctaactaaacacttattactaaaattgcgtgtcacattattttttttccgaatgtgtaaaagtcttgcacgccaaaatagtacatctagatttcttataacttccatctacttaaatcaaacggttgattacaacttaccattactgctttagttaaccgttagtatattacagaggattaaaacaacaaaaaaattctccttggagatcatgttgtgaacttgggtgttgcaatattcagggatttacgttggagggagcaaggtggtgcatttcacgaggaagaaggaggcagggacggcaggtctggactcggcgatcgccatctccagcctcctctcgcagggctcgccggagtgccccaccttcccggactgcggcttccagctcccggacagcggcgtcgtcctcacctgcgtcgactgcttcctccgcggcggctccctccacggcttcgagtacggcgtcccgccggcggtgttcctcgccaagctccgcggcggcacctgcaccaccgccgccgccgacccgccggacgccgtcgtccgccgcgccatgcacctgctccagaacgggttcggcagctacgacgtgttcgagaacaactgcgaggacttcgcgctctactgcaagacgggcctcctccccgccgacgagccgggcagcatcggccggagcggccaggcgtcgtcggcgatcggcgtcccgctggcggcgctcctctccacgccgttcaagctgctcgccgccggccccctcggcatggccgccgtcaccgccgggatgtactgcgccggcaggtacatcaccgacatcggggtgaggaaggacgtcgtcaaggtggaggtggagaacctgtcggcgcatcttggctggcgtcgcgccaaagccgaggaagaaatggccatgaaaaaacagcagccttcatcacatgatactaaggtcaagaagagtttacttcctctcaagagaaaacgtgacaatttctgcgaaattattacgagctgaaattctactacaatttgtatggttttgtgtggataggttttggagttaaaatgcaataagtcctggaaatatatgaagcgtcaagtgtgctttgatttaatcaagcattcgctgtctctgtgtgtgtgtgatagatagatcgatctgatcatgaattgggtgtgccaaggagattggattgctgtaccactatagtattatagtcagaaaatttactctctctctctctctctctctctctctctctctctctctctctttttcatttgaaccatctagtagtatatatctctgtattctgataagcaatatctcaataacaactttcatgcagagttgcagaccattgtctactagtggtgttgcgagcttgcattctttgacaatgtgtgatgagctgttgatttgccagtgttcagtgagctgaactgtgctttgttcatggatctagccaagatgttccaaaccacagtacatttccagaataataaatctgcgaagaggtccccgtcgtcatttcctgaataattcaggactcatgacagtaacatgtcgctactgtctacttgcagctcgtatacaatgtctgtactcgtcgtcagtagatccttctccccggacccatgattgttaaaatgacaagttgtggcagaatcaatatgaggtcgccgacgaaacttcatcgcctttactccatgtgagaatgtgagaagatgagatctggattggatgaggaggaggaagaagatggtaaagatgtctgttgtttcttctgaaattacactcgggatcggacccttttcctttcctctgtgcttgttctgcctttaatgattggtttcatagaccctctcgtcagtaaatgaaaaggctggccacgttgtgtgatttgtgagatctggggttgtgtgttggttgagccagacagaaaagtaccagttacagactggttcacaggggaggcaaccagaaatattctctgcacaagagttacagtttacagagttattactacagaaaaatgatctctttgcctgaattgtgtcagtgcatgaagatatggagtagtagtatgatgaatatgttgcagatgaaattcagtcaagacacaagtagaagttcatttggttggagcctttggagagcatgtgattaggaggtggttgattaattgttccaatttccaaactgctctcttcgtctagctgaagtagttcttgttcctactatctgtttgcatgagggtaggtaggtgaagaagagaggaaaaaaaaaacgctgtaaagttgaagcaatggcgatgaggcgacgaagacctacccctagaagggcacgaaagaaagaggtgagcttgtaaataatcgatgattgccagggagaaaacaacaagcaatgccggtttctgttcctgaaaggttgtgctcaacactgtttctgtacgctgcacagctgcagctggaagaattccttgcctcttatatggatccaaggagcagagatgtatggggatccatgtggccaacgggaaaattgtttcattgacggtaaaggatgtcggtaggctgatttctctgatcttgtgtttcagattggacaaaataatctcattgttttccttgacaggtagcgactagcttcgattttgctatatatttattgataaattttcttttaaaaaattatcacacataaatacggtataattgtagtgtaattacattataagttgtatgaaactataatgttacttaatttgtatgaaatttttgcataatttcaaaccgttagatttatttcattcatgcaagttgggaagaaaaaaaatcataacgggtatacgggtgaggagatttggtcttgcgacctccacttcatgaaaatagcatgttactgtgggattttttaaagttatatacaattntattatagttatatgcaagtcatgattgcactatatttatatctgttaaatttataggagaaaaaatgtctacggatgtacaggtgaccgatgggaggagcatttacgtactactgatcttggtgagcccatctaatagtgggccaggggcggttgaatggataggccactttgggccgcctgctatggcagtccatcttgatattccgttcctgtccgaaatattgacggcctatggagtttggtgtcaggctgtcagcttacgcgatgtgcggaagcttagcaggctgggccgttttgtgggcctcttttgcttgttctgtgcaaaacaacactaacaacatctccactgcacccatctctcttgcaggctgcagccacccataagtacttcttttataggcaaaatttactaaatgacactaaaaatttgtgtaatttattggtagatatcgtaaaagcgtgtaatttattttttactgtaatgttgtgtttaaaccatgtgattctaggggcattcttgtccttctcaagaatttgtctttacaatcgagttgaaagtgtcatccatcaaacaaccagtttcttaggatgtcttttaaccgtgacataatttttcgatatctatcatcaaactactcaaaatttagacgtcctgtagcagattttacctcttctataatggttgaacctactgttactgcaccaaccagctaaacccatgaatgctgttacgcactattttgataattaaccaactgtttttcatatatttatatttataagctaaattttacttcctccatttcatgttaagtgcaaccatgagttttcgtgtccaactttagtcgttcgtcttatttaaaaaaaatttaattagtatttttgtttatatgagatgataaaacatgaatagtacattatgcgtgacttatgttttttatttttttaaaaaaatcaaataaaacggatgatcaaaattagacacagaaactcatgactgcacttaaaattggatggagggagtaaaacataactatagaactattttttatagtttttgttacagtttattttacaaacctttaaatcagtaaaaacacatacataaaagttttgatatttttttaaggcaatgaacgaggcccaacgaatactctacagaaggatgtacagtacagtaggaggagtctatactctatactacgctccgtacgcacattgtttgcggcagtcttcaagacaacttttttttttttactgccatgaaaggaagcaggcttgcggtgaaagaaagttgtctgccgatgacgatgccaatgccagagactttcgcacagtacagtaatccattgcggtcaactagggcctacggtcaactctgcagggtgccagggtacaggcagatgcagccgaaagccgttcaaaggaaaggaaaaattactacaagccgagcagaaacaaagctctttcaagttcacacttcacactagaggtgtgtttaggtggtgtttgaatccagtgacttaactttaattcacactaatttagagtattaaatatagactacttataaaactaattatataaataaaagctaatttgtgagacaattttttaagcctaattaatccataattagataatgtttattgtagcatcacatatgctaattatagattaattaagttatagattcgtctcacgaattagtccaagattattgatgagttttattaatagtctacgtttaatatttataattagtgtctaaacatccgatgtgatagggactaaaaatttttagtcccatctaaacaggttcttacttcacgccaaaattggaagtttgattgaaattggaatgatgtgacggaaaagctgaaagtttgtgtgtgtagaaaagttttgatgtgatggaaaagttggaactttaaagaaaaagttgggaactaaaccaggcctaggcctagttggcaaaaataaaaattctttgatgtcacatcgaatgtaaaaagtttttagacacaaatgaaaaaaactaatttcataactagcctggaaccgcgagacgaatttattaagcctaattaatccgtcattaccacatgtgagttactgtagcacttatggtttatcatagattgtgtaattagtttttttatctatatttaatactccatgcaagcgtataaagatttgatgtgacatttttaagaaattttttttgaactaaacaatgtctaaaagaaagcccagtcacaatttaaaacttaatttagaactattccaagcatttaaattttgaaaattaattcaaaataattctaagcattttttttcctattttcagccttgaccttaaaatcactaacgcaaagttctttttttcaccttcccaactaatctcttgcttttcacgcgcacagtttttaaattattaaacggtgtgtttttttaaaatatatataaaagtttattttaaaaatgatgttaattgattttttttcagtgttctaagctaatataattaatcacgcattcaaaaggaacacagtttgtcgtaccgggatgtgcagtaactcccaaacacagccgaagagtagaaatatgaaaatcctacccaaaaagcatttctcatcatcagtgctacagtacctatatgtgctattgacggattaattaaatttaataaattcgtttcgcggttttcatgttagttatgaaattagttttttcatttatatccgaaaacctcttccgacatccaatcaaaacgtccgatgtcacaacaaaaattttcttttcgtgtcaccctcatttgtttttctacggtttgtatttggaaggtaaccaatgtgacactgcatcaagcagtcaaatgtcaaataatggaaaatcaatccatttccgtcttctgcatgctcagcaagctgtccttgcctgattggctcgattccctcgggtttcccttgaccacttctgtcggaggcacatgtactccagctgcacggtcgttagacgtctgaagtctgatgtatagacggcgcacgtctccagaccaaaattccaaaccaatccaacagaacatgtgtgtagaaattccaaaccattccaaacctttgttggcctctcggtctccatgttcagactgattaattaccaactgacactagcctaaactctttgacactcgtttcgaactttcgatctcaagtaggataaaaggtaatatgctccgtgagtcattcccaacccaataactaggataatttccatagtattaaataagctaccacctaaaataaaaaataatgtggtaagtgaataaatgagaaaaaaaaagaaaccaaatcttgtatgagatatggtttctacataatatacaagatattatatgagataagtagcattaaatttaagtatgaaaaatagtgtttgtattgaaagagtagtgtcaagtgatagtttctcgatgaggtgagtttatagaaactatatctactgtgggaccggcgttagtcgaagcacactgcacaaaacagtagtatatcaacgcgtaaacaccaatcattatgggcataaaaccgtcataaataaagcacacagcatgtactacagttaagacctactcttagaaaaaaaaaactatagttaagacccctcctgatcattcttgcttcctagataatcagggtgccaacagaaaaagaaccacacgtttctactctcgagtaattgaattcaatcaacaactattggtgttcctgcaaatgaaggcctggaaaatactctcgtgtaattcgctcatgaacacatgtctgtatcacccagatagtgcgagattaaattctagcagaacatggcatcatctactccaccattacattcctatgcaccaactgtttttggtgtagacgcaaaatatcagcgacagacagagaagggaacgtactagtttgtatgtgatcaaacgcatcgtcttcagatcagatcagatcagatcagatgttggatttccagttgtacttacggcgaccaaaaaatatctgatccggcggaccctcgttcagcggctcaggccatcttcggctgttactgttgggaaagagctagctcgttctctccttggctactactagtagacttgcggagtatttccgaaccgctgcgttcaagatggcaacggtgaattcaccatcgggggtcacacccgcgtccccgtcatcgcggtgaaaaaatttcaccgtccccgttccagtcaatcacgacggggctacaatttctccagccccgatcaccacgtggtgaacccgtccccggttaaacaacaaattcatcaacaaatcatataaatgcaatggaacacaaatcagcagtacatcacattgatatttttccaaaataatatactcaacaaactactggtcatatcgacggcgacgaacggcggaggaatcaatggcggcggatggcgtgctggccggaggcggtgggtgccgcgaccacggtctgaggcggcgcgtgcgcgacgacggccggaggcgctggtcggagcgatgacgtccggaggtggcgagcgcgcgtcgacgacggccggagacatcagtcggcgcgacgacggcaagaggcgatgggcggcgcgacaatagccggcggcggcacgcgtgcgtcgacggctgggggcaggaccgcgcccgcacgaggggagacgacggccagcggcgctatgcgcagtgccgcggtggctggggagatatttggagatggggagggttgattagggttagaagatatatatacatggttactgagcttcatttttatgggccaaaacaactgtacagtctagaattggtccctagctacattacatgcgggtcaccgcgggagacggggatggtgaatggtgcaccgtccccgcccccgccatccccgatggtgatgagttttggaccattagattcaccatgggtggtagatatcaaccatccccattctctaatatgtgaattcatcgcggggaatcgatgatcaggtccccattgccatctctattccttacacaagttttccaagacttctctttcgttttccgcgtgcacgcttttcaaaccgttaaattgtacgtttttttaaaaaaagtttctatacaaaagctgctttaaaaaaatcaaattaattcattttttttttaaaaaatatctaatacttaattaatcacctgctaatgaatcacttttttttccgtgcagtggagttagttcccaaccccaagtatcaaacacagccctatatagaactttactgataatcaaatgaatttaattttgtatttttttaaaaaaaataatatttaattaatcatacgcctgattatatatctcgtttggtgtaccgcaatcgtttcacgagccacgtctggttcgaacaaagcctaagtttttaaaagtaaaatactccatcacacaaagactcatttttatccgcttcatttgtccaaaaacacttaatcttcaatacaattaatatattggagtttaaaaaattgatagacaaatgtgttagagtttaaaaaattgaagatcaaatacatcgagtaaactctttatatcggtatatgtgtaaaataggagtaagcaaaaataaaatctttttgggtgaaggtagtacactctaatatcaaattaatacgacttccattgtaaaatatagtattcttgtattttctccaaactaaaatgaaatgtgacatattttataatagaaatctgagtttcatcatatctagaatcaaattactaagatatgtcgtatctgtactaattttttttgaacgaaaaagtactatatataaaagtaagaacgcgtagaaaaaaaatatagggcctcatcttttcgcttatgcttatacttattagtcaaaattaaaaaaattaaccttaaatttagagctgattcgttaggaacgtgtagggcttgtttggtttagtgctgtaccaaaacattggtaatgccaaacttaggcatgttttggtactaccaataatttgctagggtagaattcttactaatgtgtttggattgatatgaattgagagccaattttttttatggtaaagaaagttctagaattataccaattttagcatgggcattaccatctatttgtattaaaccaacccatcatatttactattcaaattgtataaaaaaaataagcatggcacattttaatatcaatctaaagtgacccgtatttttaagtaaagaccgagatattatattttattataaaaaaagtgatccgtatgtaaaagttacccatggctccgctatatgtacaatatggacaagcaagcgaagcaagacaatcagagcaaacacagtagcagtagtatgtaacgttatccgagctactagtagtagtgttccagtacgtgactggctgtgcctttcctagtggaggcccacaccacacccacgaaacgtgtccctgattcccccgcctccaacgaacgacttgaaccttccagaacaaaccaaatccataaaaaaagacacggaaacttctcgcactttcccccacccattctcccacctcccgcacgcaacccaaccctccctccgtccgatctcccgcgcgacgcccatccaaccgccggtcagtcgccgtgacacgaccgacttgctgtgttagcccctctttagattccacgctaaaactttacccccttattaagcgaacatttgaacatatgcatgaagtattaaatataggctaaaataataactaattaacagattacgactaatttgcgagatgaatcttttaagtctaattactctaaaatttaatatggtgctataataaacaattactaataatggattaattaagcttaatgaatttatctcacggtttattgacgaattctataattattttttattaatgtctaaatattttatacgaaagtctatatataatgtctgttgagacacgctaaaattttactaccctaatctgcacacccccatagtttatatctctcccgcctcacccgctcccacctctccttccgtttcctctcattaacttcctctctcgcttcttttctccacgccacgctacccgaaacttccagaagcaaccagacaccacggtgtatccaggccagatctgcgcggccgccggcggcggcggtggcatggctgaccagaccgctgctgccgttgtcgtcggaggaggagcggcggcgacgatgggggagccatctccacctccgccggcgccggcagcggaggcggcgggggtgggggtggggcagcagcagaggacggtgccgacgccgttcctgaccaagacgtaccagctggtggatgacccggcggtcgacgacgtcatctcctggaacgacgacggctccaccttcgtcgtgtggcgccccgccgagttcgcccgcgacctcctccccaagtacttcaagcacaacaacttctccagcttcgtccgccagctcaacacctacgtacgcctcgccgccgcgttttcctttctcttttccgttcgatttcgatcagctcgactaatttttgtctcggcctcgccggaatggattggattatacagggatttaggaagattgtcccggacaggtgggagttcgccaacgactgcttccgccgaggggaacggcggctgctctgcgagatacaccgccggaaggtgacgccgccggcgccagcggcgacgacggcggcggtcgcggccgcgatcccgatggcgctgccggtgacgacgacgcgggatggctccccggtgctgtccggcgaggagcaggtcatatcctccagctcgtcccccgagcccccgctcgtgctgccgcaggcgccgtccggctccggctccggcggcgtcgcgtccggcgacgtgggggacgagaacgagcggctgcggcgggagaacgcgcagctcgcgcgggagctcagccagatgaggaagctctgcaacaacatcctcctcctcatgtccaagtacgcctccacccagcagctcgacgccgccaacgcctcctccgccgccgggaacaacaacaacaacaactgctccggcgaatccgccgaggcggccacgccgctcccgctccccgccgtcctcgacctcatgccttcctgccccggcgccgcctccgccgccgcgcccgtatcagacaacgaggagggaatgatgagcgcgaagctcttcggcgtctccatcggccggaagcgaatgcggcacgacggcggcggcgacgacgaccacgcggcgacggtgaaggcggagccgatggacgggcggccgcacggcaaggacgaacaatcggcggagacgcaggcctggcccatttaccggcccaggcccgtttaccagcccatccgggcctgcaacggatacgagtacgaccgagccggcagtgaccaagacggttcaaactctacctaaaagttgtgtgttagacccgtctcgtttaatcaatctactctagcaattaactacttctactcctcgatagaaaaagaggcaatcaaccttgggatttacctagtcccaatgtctttgtagtgttcttttttacttgtagtatgtagtactcctactagttttttttttcagattattatcctttgtatatatactgctgctgctagtgagaaggcataaaagatcagatcgagttcacttgctatttctaaccttttgtttggtcatagacggtgtggagatgtgagatttggctgccggattaagatattccaagggggggattagtgatggcgtttgttgtgtaacggggaaaatatcttgcccacacggcgcacctactagaaggtgcgaaagccacttttcttccaagccaaatcgggggttttgattttattgcgatttggacagtgacctgtcctgccagccagccaacggtcgagaccacaggattctagtatgggcatttcgtttcccagttcagtttcgttgttgttgttgttaggagcgagtcaaattagtcaaagacgtcgagtaaatatcatttttaattgacctggttaaaatcatgttagttctaccgaacattgatggttaatttttgagtattttttaagcaacatagaagcaaaacggctgtctgatggttttgtgccattttacactttacagttacccgttattatatgatacagtaaattatagccaaagggaatgaggtacaagttgtgaggtgctactctgatttgagtacttgagaccattttaggcacgactcaaggttggaggtctcaaagttgatacttggcgctccatctgcttgtacaatgcaggtttactataaagatttggggccttattacctcatggatggtctaccaatagctatatcgattcaggctgtttttagttcccttcaaactttaaactttttcgtcacattaaatgtttggacatatgcatgaagcattaaatatgaaaaaaaaagcaattacacagtttacatgtaaattgtgagacgaatcttttggcctaactacatcatgatttgacaatgtgttgctacagtaaatatttgctaatgacggattaattagacttaatagattcatctcacagtttataggcgaaatctctataatttgttttgttattagtctacgtttaatatttcaaatgcgtgtctgtatacgttaaaaaagttttagacggagaactcaacacggcctcaatggagatcgacacagaacattcaaaactggtgggagacaaatacaaaggagtgcccaagaaagatctacgcacactaattctcctgattgtctaggagacctggaacgagagaaacccagcgatattgcagctccgaatctactgagaaagattaagcaatgacttaggctctagtaggagtatagctgctacaggattggagctattacctagtaactttgtatactctatgggtgtgtttggaagataggttaggagaggttgtattttctcctctttatttaaggaaaaaacacaatctcatactttttttttcaaaaattgatactccagcaatgatttaatcttttcttgagctataaacgtgtcctcctcacattgctcatattttttcccttttgaaagttcacgttgtctcacacctacgatccatggctgccatcctcaagtatgcttcatggtggccatgcagacatgatgtacctttaccgtgtacgatgtaacaaagagtgtggagccaagccgagcaaccaggacaagaaagatgtgagcactgtgtcgtttaatcctctctctcgaattctcggagttcattgatcctgacaaaaatgcagttaggctgtgtttggatctaaagttttttttttcaaacttttaacttttctatcgcattaaaacttttttacacacacaaactttcaatttctccgtgacattgttccaatttcaaccgactttcaattttagtgtgaactaaacacatagcttcttcgacggtgggttgttctgatttctgaatctctgcaactgcacggccgtcaagttgtgggggctgtgcaagaatggcggcgcgaccgtcgtggccatcgacggcctcctgcaggtcacgttcagttgcgtacttgcgtcaacaacctcctggtcaccggcgccggcaccctcgacgctggacgagagtacgagaccaactccctacccaggccacgacggtgagatcttagggtttgtttagttactgaagtttgaagaaagttaaaagttcggaaaaaaaagttaaaagtttatgtgtgtagaaaagttttcgatgtgatatatgatgtgatggaaagttgagaataaagcggaaactaaacacggccttattaaacttatcgatactaatttactcagattatctcctcttatgaagaaagtagtggggaaattctcgtacatcctgcagattctgaagttggacggcgtgacgagaacacggtgataagagcggcggacatgagacgcggggattccacatttccgcgtctccatgacattgttatggccgacgtgtctacaaccccatcatattttgaattcaggttgtctagcccaccaccttatatagctaatcggaagatccacgggcgtttctcgaccaacattactcctcgatagccgcccatggcaaatgctccaacgccgccaaggtgacaagaacagagctttccattgccaattcgccgttgttcttgcagctacctctggtgcagatcagcgagacgtgacgtccgagaggatcaacggcacgccgaacagcaggaggaagaaccaggtcgatcaatcagtctcagttgtgaccaaacgccggctataatgcagcgcaaagaacagcaacgacgtgccagggatgcccaactcgttgggccaagcacccagcccggtcgcctgagcaagacgctgatgtcagagtactccaacactgaacaaattcaagtaattgagttttgttactctggtgttcaagtaattgagttttgttactctggtgtgtttggttcacgtttaaattggaacgatgtgatgaaaaagttaaaaatttgtgtgtagaaaaattttgatgtgatggaaaagttggaagtttgaagcaaaagttatgaactaaaccaggcctctgatgatagagagttaagggccggaagaaaattattaattgagcggcgaagtgagcgtagcttaactgattatattttttaggtgacctatctgggttcaagtgttagacttgatactgatgcttatatagttatatttacgactaattattcttttagtggtaagtgacatacccgtcgactatgagatacctataatgactttattaatctcagtatatatatcagttcagtttttttaaggtgattatatagataagatacatgcgtgtatattcgtagggacgagtgtgtgcgtgttgtgagcacatgcgcatgtgttgtactatgtttaaaaaaatattaattgtatttataggatttaaatttgtcccaaaataattgtcacaatagagtactcgtaatctcattaatcatttctcatttaaaatatttctaattttatcctcaaccacccatccactcttacctacaaatcatttaataaaagacgtcacaatcttttttcttaaattttaatatatgctaaactatttagaattataattattttgggatgcatgtagtaagtctacttttaacatccgactcgtttggaagtaactaaaaaccttcaaaacactacactactttgtcattagaaatttttaaatgctcataataaagttgggtggcacaaacctctcttcataataatttttactaaatgcttaacaaaatcctatctcctcctgcctgtcaccggtcaccgaccgatggtccccgcaatccaatccagccagccagcctcgcatccccccctcccccactcgccggcgaccgctgccgtcgccgtcgtccacctcattccccacctcgtgcctcgtctcccttccaagccaagccaaaaacccctccacgagccgcgccgtacgccatcgccaaccaccactccactactacttccccccacactcactcactccactcccaccacagcaaccgcttgctttgcttcgcccatctgagctataattagctcgaggagagagccctaacccgccgcgccatggcgagcagcagcggcgaggggaagggtgccggcggcgcggggtaccagtacgcgccgtacggcgggtcgtactacgacgaggagcggcggtggtggccgtggctcgtgccgaccgtgctcgtggcctgcatcgtggtgttcctcgtcgagatgttcgtcaacgactgcccccgccacgggagcccgctccgcggcgagtcctgcgtcgccggcttcctccaccagttcgccttccagccgctccgggagaacccgctcctcgggccctcctccgccacgtacgtaacgctcctcctcctcgctgcttgccatttgattcgattccccgttgcgcaattgagcttggaaattggggggaattttaggtcccgttcgaatccactaaaaaaagtggatttagtcaagcgtgtgaagctggcgtctttgtcgttacaggggatttccttttccgctccaggtgtctaggagataaaagagagagagagagagagagactgcgatggcgactacttggatcttttcaactaccgttttcgaaagagaaaattacaaaacctttagcagcattgcattagattatcttgtgccatctatacatctgatggagtattaagatttattatgctttgtgccttcgtagaatggagcaatgcaaattctggaacaattcggttggcacaggaatattttattcttacatgatttgtctactagtagtgtttacgtcacttgcaggtttcccaaattgcagtcgtgaaatgtaggtagtatttttatcaattagattattagaattaggtgattggcttttgtattggtactactaccccttgcaatccaggattatggaggagtgacgttttttttttccaacacatgttaaaaagggtgaattttgtttgttctagcctgcgaatttcatcacatcggaagctttctgaggactacattatctatcttcattgatgcatactgttctgtaatacgcctgtgcagtttatttattttgatagtgttaagaacaaggggggttcttagtgctaacaagttgtttgctccattggccagtttggagaagatgggagcactagactgggcgaaggttgttcatcagcaccaagcatggcgtctcattagctgtatctggctacatgctggcctaatccacctgattgtcaacatgctaagcttgctattcatcggactccgtcttgagcagcaatttgggtttggtaagcttctacaagtacagaatcggtcctttttaccctcagcacagcataccgtttctgtttgaagcaacttggtttactatctttatacatgatcgtcccgtcttttatttgcaattgagttctccgaggtagttttgacttggcacttttagaagtacttgtcgtaccctatgttactcattattcatattcatatcagagtctcaaacccatatattaccattgtgttaaagccaattaactggttagattgccatgttatcattttgtaggcattacttacaatgcaaggccattgttctcacaaatttgagaatgactttatcttctagtcttcatataaagatgtagtcaatttacatatgtctatattctaaatattggacccataactttcatatgtcaatgtgtacccatttctcattttgagtttgaatctggtaatgttcctgcacactgacaacagtttccttacttactagtgcgtattggaatcatctacttgctatctggctttggcggtagcgtgctgtctgtgctgtttttacgtaataactacatctccgttggtgcctctggagctttgtttggcttacttgggtctatgctctccgagcttattatgaactggactatttattccaacaaggtcagcagaacagagactgtacctatattgtttactccaattcagttgttccctgcaagtttcagtttgttcactcttgcaggcagcggcaatcataactctcctgtttataattgcaatcaatttggcgatcgggatactacctcacgctgataactttgcacacattggtggatttgtgactggattccttcttgggtttgtcctgctggcaagacctcaatttggttggatggaacgtcatgagttgcctcagactaatcaaccacgaaagtacagagcataccagtatgttttgtgggctgttgcactcttcttgctgctagttgggtaagtctctccacttcatctaaaagcacagtgcatgtgcatagttaatactcgttcacatctcacttttgtagtaacaaaagcatagcgtcgacatatgcaatgctatagactgacataaaatagcttgaataagcaacagtttgacaattcatcaataagaagctatacctgaaacctgacagaggtgaattactgatgcaggtttgtgattgccctggtgatgcttttcaaggggaagaatggaaacgatggttgtcactggtgccactacctgaactgcataccaacatccagatggaagtgcagtacttagatgcttcagaattccgttagctcttctccaaattacaaatattcttcgggaaccattttcaagcttgtgtgcttgtagatatctacaagaaatttgccacagagtcgaattctgccctttccaaagtgtagtacaattttctgctttgtaatttgagattgtaacagctgtttatttcagcccaactccatactgcattgctcaaaaaatttgtgatgttcaattggattctcttatatcatctaaagttcgaaacaatgttaatggttatggagtctaaacattcttctttcaaagtttcaaggccttctctggaagactagaatgtgggagtttctactggtctaatggaattaaaccaattcatatgaaactagtaataaattgaaactagtaatatgcccgtgctaatgctacgataaaaattgatattgcaaataaaacacccaaaacattggtactttcagcaatggaacagatagttaaaaagtttacgttagcactgaatttttttcggcaaaatattatgtattacattttgtagtgggtactaaatacgcacacaagacaagccattcctattttagacagaaatcaagctccactgtattttcctttgaagttaaaaaatggaaaataaacacaacttctcagcatgcaaccagaggacaatatggaaagaaataaatgattgcagtgaaacctcatttttatttccatacaaaataaaaattaatgtaaaaatcagaaattcactgagcagaaccacatcaatatctttacattagatgaacaatatctttacattgttcttaatgaaaatacatcaatatatattgtggtaacacctaggaggttcaataaataaaataacttaagatcttgcaacatgtgtcactaatatttaacaaagtggaacaattgccatgtaatttgtctattcttcacttggaggttggtgatgctctggtagctggtagctggcaattgagtgaaaatagctataagtgaaaagatttgccatattctcaccaaccttaaagtgcaagataaaatgttattttgcaaggtaatatgtatcaattgtgatgaaaagaaaaattctcagcatggaaattaaaaaggatgcttctctaatgccaccttggatcctttggaataagatcatttcaaacaatttattctcaaatggtttgcagaaaaaaaaacagtaccaagctagcgccaacatggccttgcatgacacagacacactcccggtgttcatggaagtcgaggcaaattatcatggggtgtgcaatatctcagcaccttaaagcaccatagcccttgcaatctttaagcttgacaaaatattgtccctcaaataattcctaggtgacatacattctaaacacagaactaaaaactggagtcattacctcacttcttttttgagaaagtagtgatcaattgaagtgaaaaatattcattcaaactcatttgtttttctgaatcaatgatcacataaaaatggtttgttgaagttcagtgatccagcactgtaaacaatatttattttctcataatgaggagaaagttgtttactttccaagacataactgcacaacatcttctcgttactattgtacataactgcacaacatcagaacccgaaacacttcctcgttatgcgtgcgtggaaaatcacttctcaaactgctgcaacgaacgttgtcaagcaatctccagtatggcagtatgtgatctttggtgatatccaaacctaagcaattaaaaaaccagcagactccgaatcagctccaagaaactgtagttcagaatggaactcaaacaacaccgagaaagattttttaaaaaaaattaggaatatcaagtgaatcaggaatggagtatgtgtgctgtcaaaaaataatgtcattacaaaggaacaactaaatctttgatgtggtagtagtacaggtcttactttaaatatttccaaggctgaaatgaaccaaaacttctgcaatgtattgattgttttgcctcaggttgagcgattaaggatagcagatctgttgacaaacaatatgggtaagagttgatgtcaggagaccataccaccaatatattgcccaaaattggatatttttgcaaatacacggttttcagatagcaaatagtgcatgcggcattaaatctaacaatttcccttttcttgagagggagagagattctattacatgcagtacaatatacacatttggtgatttgataatataaatctgttatttgttatataaatttcagtatatacccctataggaaataaagcagcatataccatctctataaagaaaaatgcagtatatatgctcgtaatggtgaataaaaaaatagcacatagggaacattgcagtaaatacttctgtatataaaaaatcagtatatgcatttacaggaaacattcagcatatgcatctacaggaaaatttagcatacaaatctgaaagcatgcaaggactgacctacaaaatatccatatatagaaacataaagatattaaatctaatggtctcctaataaaccactgggaacaataaatctaatggtctcctaatcaaccactggcaataagttttggggcatacttttgactcaagtgataaaacgattctcctcacctgcaaacgagtagaaaattttagacactgtgaatgatcttgcattagaaaaacacctgtactaacctgctgctttgccacatgtacgtgaatactctgctgctctccttcagatgtgttcatcacatcgggtcaaaagaaacccagatggcagccgggctgatgtggtgacgatggcggaattcaacaagtcaatatatcctgcaacgaggaaaacaatggtgtcaactgtacatcattgagcagacagacaaacaaatcaacatgttgttgatgaatgtcgcaagcacagattgtcatggaggaaggcgtgcgacggcgatgcagatcctggtgatgcagcgtgcgacggcgaacaggcggcaggatggaggggaggggcggtgctgggttgggcgttggcggcggggtggacggggaggaatgcgtgcgacggcgacggcggtggcgttgatctggccgagggatggactcgagcggggaggggcggcggtgggtggggcgtccgcgataggcggggcatcaacagcggtgtctgtggg

SEQ ID NO: 18089 - DNA, 12071 bp, Oryza sativa
attttcagccgttggatttgatgaatgaagtatgaaggatgtaaaagccggttggtgaattatagggtagaataatgtaaattttttgcgttccaagtggaggcatgagagcatgaaatccgacgctaaaatttataacgtgatcgaagatgtttacatggggcgtgtttggttgcccggctcgtacttggctcgcatctcggatgcaacttgtaggatgtttggttgactgtacatgtcccacaactaagcccagcggatgcaaaaactccctcgcaggcaggctaaggaggaacggccgaaacgagcttcgctgcttgtcctggctccacgcatgcagccgcgctgcacacacgcgtgcaagcgccgcacccgcgcatgcagggagaggcgatggggtcaccaacaccaacctgcctccctcctcatttcttccgtcttctctcttcgctatcgccggccacagccacaagttgcgaccatctccatctccaccagccagatctagctgcaagtcctgctcctccgtattttcttcaacaatgggccacgaagagctctccgcaagtggatccgaagggcatgagctcactactgccagatctaccagtctggtagcgttgaatatggcgggtgctcatcaccactttcctcaccccagagagaaggatgagctcggctccaacttcttcatgtcattgtcgtcgtcgtcgttaccagcgccaccaccttcctcgtcggcttgagctcgtcgctgcacgaatgcccccaccgcagtcggcagctaccttgaatctctctcctcctcacctttctttctttttttttttgagaacacttcctcacctttctttggccggattcagaattaacctaggaacttaggcccgccagatccaagtagccacaagctcctgaccgccagacccgctgcacccacggcggcgaacatgcctggctgggtggcacgagcggctagctaccggcggcgacaagctcctctgcgagctctcttatcattttcttttttttcttattctttcttttttcaaccgaatgttattaatcactaataaatatacttgatttactgctgtgtgaccatatatgcttttgacagtgtcttaaattattgtatatgctcatctgacagtgtcttaaattattatcgccaggaactccaatatcaattttttatacattctgcttatattaaatctgctacaatataccgtaaataaatagcttttacatgataagaattttcactctcaaagaaagtaagtactcgaacctactttccatacaatcaaccaaacaaaatctctttcaaaccgtatcttcgatgcaagcaaccaaacaaaatctcactataatccagctaaaccaatacaaccaaccaaacagctgcatgtgtatctacttggccaggctaaactcggtctggacgagagagatgggccaggctaagaagatgcgatcaaccaaaacacacccaggagatgggccaggctaagaagatgccatcaatcaaacacacccatggtttcacatcggagaaggcaaggtatattcgactaggggcagaggaggtgcagcaaaagtgctttcttttgtgccttcttttgcttcggggagatgcctcgcttctctccctttcctcttccacaagaagatgggcaaagcagcgagtgtagtattttacctccatgcccctaacactgccccggcactgcttcggcttgttcctacccttcggagggtaataacgtaaatgaacctagcctagtgggctaaaccgctaaagcagttcacggcccacggcccaacaaaccttaaactacggggaaaagaaaagaaaaaaaaaagaactcgcaacttgtcaaattaaaattcttcacacacacacacagcctcgtggcttcacaactcctcctcctcttctcatcttgggtttctctccctcctcctcgccgtcgcgtcgccgcggaggcggaggcggagagccaaggccgcggcggtgcagccgccctcccctcctcccgccgccatggtgaggccgacgcaggacgcgatcgacaccttcgtcggcatcaccggcgccgatgaggccgtcgccgcccgcaagctcgaggtgacgcccacccgctccgttcccgtttgttccccccatcacccccccccttctcctcccttcaccgtcgccattctacgcctcggaatgtgtggggcttggatgcgtcgggtctcgagttaggtttgttgtgttagatggcgttgcgctgcggcgggggatgggtggtgcgggtgcgatgcgcgatttgcgggaggtgatgagaacgtggggggggggatggggttctagggtgtttagagttgagaacattttggggattggggattgtgtggtgcaatgccttcgaattttgagctttttagtgatgcatatgctcttagttttctcttcagcttgcgcggtcaggaatgctgaacacattagtggattagtttatgggcattgctatgggtacgattgtgaattgtgattcacgcggtaggacatccaactttgtttatgttatggaactttgttgacacaatcctacttggagtaagagttggatggagtaattcctattttaatgtttttttagggaaatcctattataatgtcttggtcttccattttgtaggaagaccgctgttgtcactgaatggtttaataaatgtttgcagatctgctttctgtaattttattgaacattgatttatctatcgggcaagatggtctttattgatcaatagtctttgtgagaacaattttcagattatggtccattgagtttaagcatgagaaaattactttattcaatctttatgtggatttttgactagtacagcaaataagcattctgcttagtgaatatttggacaggttagttatattgttgttgttgcaataactcttgccaatcattggtctgtttggaaatgctctgttggagtgctgagtgaagtactgctttatacttgtttcttctggttgcagtaggaataacttagcatagtaccttctgcacctctgccgaagatgctgaatcagagtctgttgggccttagcctctttcttcttcaattatgagtttggaaagattgttatcttattttgttaggaatcatatatattaggatccttattacaactcctctttatataaaggaaatatcaggaagaaataatgcgagcaaagtattacgctacttcttctgcctctcttccactgcatttcttctgcctctcttccactgcatgcttctgcccttttccccgttacccttgagtactacttcttccgttctgaaatataagcatatctaggattcaaattctgtacacaatataaggattcctagaatacttgtcccattaatcacctttcattcaaattgtcttcccatcttaccacaaccacccctcatttaatcaggacactatattcttctctcctcaaaacttaatctatgctaaacaacctagaactgcatatatttgggaatggagggggtacaacacacagaggcatacacaaagtccttacacaagtagatatttcaaaacgaatttctaactgactaaaatcattctaccaggaacatcatggtgacctaaatgaagctgtgaatgcctatttcaatgaaggagataggaccaggtacgtgttttttctcctagcggttcttatgtgcatttattgacctgataccatgttgttcccgttgttatatttaactgactcatacaattttcagcaccagagccaatgaaaatcctatacctaccggttatgatgacatggagttggatgaaccatttggtcctgttcctacatttcacatgcctttgggcaaccctttttcacttctggatcaaggttttttagaacgagctgctgctgtgtatggtgagggacctcatattacacaccctagggaggtgaggcggatagatgttgaagttaaggacaacaatactccagcaggtagttctggtcatggtcctgttattgaagatgttactggacatgagttttcacatgggccggaaattcgtgggactgttctgattgatgaagatgatgatgatgataacttgccatctgctcaagatactcgtctcccaagcaatccttcaacttcaaactattctgtaccaagagctcctccaattgctaatgttagtgactacaacaatgacatagaagaggagatggttcgcgctgcaatagaagcatcaaaaagggacgcagatggactgacaaatgtaagactgcttatcagatatctacttttaaaaatttggaacctacacatcttttttatcaaaacatttggtactatgcagggtctaagaagtggagaacgtgaaaatgcatcacgtggcagagatgatgatgagattgctcgggcggtttctatgtccttggaggtagttgttgaacacacaaagttctgtttttatgtgttctgttttttgtgtgttatgctgaattcatttttttttgtgactatttagacagcagaacaagagagagttctgcgccaagtgggagcgcatgtgtctgatcattctgatttatccgataaggaagacattgaaggagcaactgggacagtggaaaggtgtccatcaaatatattgtctaacaatctatgcatgtgtgatttttcattatatttggttattcatatatcaagttttattaggttcctagttaccaatgtccattgttccatgaatcttgagttctcttaatggtttcagcttcataaaagcaatgcattcttgcagctgcacctaccatattctttggatatcttttttgttattaagtttgttgtgattagctgagcatgacttcttctatctagttgtgactgattcattgtacatattatttcttgttgtaggcaagtaccaacttcagggaaagttggaacatctgatcagttggtagatgaagagaatttccaggatgatgacgttgaggaacattcttttgttagacaacactctaggcgtgtaccatctggaaatgatgagtccacagaagcacttgaaagggccaacagtcatccatccagtctcctccctcataacattgaaaacaatcagcagttcaatggagtttttccatcagaggtggtattttaatccatcacacctgtaatgagatagaatttaaccatactacagcttcttcactgcttacaaacccgttaatttttgttgcaaagtggggtggcatttcttctgaagaacatgatgaagctgttatgcttgaagctgcaatgtttggtggaattcctggaagagcagcatatccattttctctcccgtatcatcaaaactcaagtcgctaccccacggttgctcatcctccgtcaccaacattaactgcacaacggttgttaagggagcagcaggtatagactttggagtagtatctatctgtgggataacataacaacggctgcatgcaagtatgttaacctggtgtttgaattgtaggacgatgagtatctagcatctctcgaagctgaccgagaaaaagaattgaaggcagagcaggaggctgagctccgcagattagaagctgctgctgaaagagaagctgctattgcaaagcaaaaacaagaggaggaagaaaagcgaagaaaacaactcgaggaagaggtaattgagttagtagttagcgcgtttgagagttgaatggatagtagtcatagaactgttcatacattagttatattggcatataaccatgctaatcatatcgttatggtttattaaattaaagtcatgccacactgttggcaggccagtgtgcttgatgaattttatcattagtgcagatacgattgcatgtcggtaacaatgtctggattgttgcaagttatattgctttacttgtttcttatctggaggacttctcagactaactaactccttaggtctgatgagaaacattcttctgtattcttctgtaaattatgtcattagtagtaagaaaaggtagttaaaagctagcactatgatctgactgtgaccatctttaccatctacgtaatatcaaataaatgataaggaagtaattatgtgtcctttagaacttgcctactatgccttttccatggtttgtgttattttcaccacacagtggtatattgattatgttatttatggcaatgtgagaataggaattggagtccaagcttgcagccaaacaagcatcattgccaaaggagccattaccagatgatgtaggggccgtcactgttgtagttcgcatgcctgatggtcgtcgtcagggaaggcgctttatgaaatccgacaaccttcaggtaacattcttttagttgccagaatacctaatgaaactcactggtattccctcaataaatttttggaattcttgcaggtcctttttgatttcatagatatctccaggactttcaaaccaggaacctataggctggtaactttgctaaccttttcatttttttcatggtgtttcaggaatgttctatacacagaaatcagtgtagtttaccattaacctgttgaaactggatttgcactagcacaagctggttatttacgccagcacaaaaagaaaaaaaaaacgatgattctgcctgcttttatgtcattatgtgtcagtttattttgctattagtgttatcaagtatcatgtaccattcctagaatagatcaatttctgaactatgtgattttaaaagatttaacatcaatactggaggttgtctgatagtcagcgtactcatcccgttgagctaggtcaggataatatgcctgtggcatggtagactgtaaagagattacattgaaaccgcagcaccagctattttttagcactcacacaacatttagtgggcatgctttttattttcattcctctgtttaggtccctaagatttaggatcttgtttgaatatcgtatacacaatgcattctagcttgttggttttgccatgttgtgatatttggattataaaaaaaaactagttacttaagtagcctgtaaacaggggaaaattaatgcatgggagatttcatgttgtttctgttttatagcatttttagatgttgctgattgaatcttgtggtcctgaatattaaatataaatgaaaatctacaatgtgcaggtgaggtcttatcccaggcgtgcattcaccgactctgagtctcagatgtctttaagtgatcttggcctcaatagcaagcaggaagccttgtttctagagcagatttcaggatagggggaaaccgggaaagagttaattgcaattaacacaacagggattcacagaatttttttttctttttacttatgcctggcacatgttcgtgaaaatattagcaaggttcgcatgaaacttggcgttaaggtctcatgaccctcttttgtgttttggaatggtgactctcaagtaccgggtttcatgtgatactcaccctgcatatttgaacagtcagaactcagaatgtacatagactgctgctttcagagctaccgcaattcatcaattcattaatctatgttcgcttgttcaagatagtatctgcactgttggactgtttataatggcatgaatccaattaaccctagtaaggtactagcatgtatgggtggcctcttggcccttttgtccctgaacataacttacctgctccattgattcgagatgtagccagccagagggtaggttggatttatgttcgagagtgcatcgctggtgctgttccacggaagtcgattcttccaggaacgcaatattgttggcttggatcgtttaacataagctgagaaaggaaaacacacaaggaaaacaaagaggggcacgatagccaaaggaggtcatcgttaatgaaccagcaaccgggcattacatgattgttccatagtacttactggtattattcatcgacatcaatagcaactgcagtacaatctgaagattttactaaacgagacacgaagacaacgacggcttcgtcaacaccttgattattcttcttccatggcgtccggggttaactctcgtctcgtcttaggcagctgcacacagcaaaagaaacaatgatgattagaggcaatcatcatgagaaagaagccgattagttttaagagggggttacatacagcagttgatctggctgaggtggcatctggaaggcaggctgttcatgatgctgatggcgctgcaggcgcagccctgggagatggagctgagcgcgctgcagcactcggcgctggggtcaccggcgccgggcaccgcgtacgcgcggcacgccagcagcctgttcagctgcggcacgcactcccccccgccgccgccctgcgcctccgcgcccacggccagcagcaccagcacgagcgcgcacgccgccgccgccgcgttccccttgctcgccgccatatctcccctgctcctgtgcttcttcagacgatgctgcaaatattaccttacctttgctgctgctgctttgctgtgcttgccggtgacggtgaggagcggcgggttttatagggggtggccggagcttgggggcgcccggcgagctttgcatggctcacctatgccggtgatcgatggagaagccgagcacggcagtttgtgcgcgtggtaccgaacatgcgtcacgctcttggactgtgagcctcttccccgccgtgcgtctcggccggggtcggagaggaagagggagcgcctgctgctttggtgaagaaacggcccatcaacccttcgggccccgtgtgaactaacacgacccaatctcgaaattaatgggccatattatatgggccacgtggagcaggtaatgcccaagtagttctttgcaggcctatgttagcttttttttttgggccttcccagctgccgagtcgagtatattttgcggattaagtccactttggctctctgaaaaaatgattcaagaacctaaaccacaaagccggatatctcgacccccgaactattgaaatcggtatgatttgactcccttagcggtttcgctaatgtggcggtgttgacctaatctgtggggttgacgtgacgcttaagtggcatttgaattaaaaacatatatgtgggacccgtttggccccgcatatcatcctctctctttcttcttcatcccttctctctctttctctctctctctctctctctctctcccggagtggtaccgaccagcgggagctaaagcggcggcggcggcagcgaaggaggagaaggaggcggtcccacgttgtccgctcaggtctccccccagcaccctcaggccgcgccgacacccatctcttggcccgccaaagccatcaaccaccgtccccctactcgatctcgttggcgtcggctctagctcgtcgtcgctgccgctttagctcccgccggctaccaccactccggccctcgcccgccgccgctccagcctgtgctccccgtcgcctgccgaaggggagagaaagagaaagaaagagagaagggaggaagaggggaggaagaagaaagagagagaggatgacacgtggggctcacctcacaaatttttttgtgtgtgaatgtcaaacaggtcccacatatatgtttctaattcaaatgccacctaagtgtcacatcaatcccacagactaggtcaacaccgccatgttagcacaatgtcagcgaaaacgccctccaaaaccgctaagggagacaaattgcatcgatttcaatagttcgggggttgagatatccggttttgcggtttagagtcatggattagattctggtcacttttcaaggagtcaaagtggacttattccatattttgctggacttattccacacacgctgacgctgtgtagtagtgtagtaccgtacagatctgaacacaatactgtatttctgatcaatgtacaaaatacagtgtgcgttcagttgacagaacaagtggctgttgctcgcattgtgccatgcatcaatttgtttttctaagcaagctagcacacacgcatctctgcagaagaatcccacgacctttggcatcttctctgcatcgtccactgaccagcggtctgaattccggctcggctcatcctttcccggaaagaaattctccatgtgcggtggccactggatctgtatcatgcaacacgagggactaattaatttgatataagcttaattggaactaaagtatcagctggaatcaggacgtcaacttgattagatagccaggtattatcaccttattatttctgtccattaggcatgaaccaggaacatcactctgatctcccatttcagtactgaaaaccttcaccaaagcagaccaggccgttcagattgtatttatatatgctcttcgagtgcgattctgaattagattatatcaaaggagctaggtacacaactacacagagtatctcgtaaagcagatcaatgagcaaatcagtgatcactgaataattgcagggcttttttcttctcctttatggtccacatattcttgttcgccatggtccactttagatcataaatatgtgcatgtaaccattacaaaataaacgctaatccagtgtcttttttgtgataaagaacgggccagtcggcaaagatatgaactttattcggatgccattacattggtcatgaacagtgtaacgatctaaaatctttttcctatgatatcctacatgctagcgatgcaactcatagtgactatgagcatacataattgagtgggcaggcacctaggagtatctgtatatatcaataatatcatcgtctaacagttcatttgtcactcttttgtcagctgatcgttcaacttcatgtagctatataggagttgatgttgcaacttaattattaacccctgaaatcttaaccagtactggccaaagtaatctagatgatctggcagcgcataccgtgtggagttaaattggtaggtgcctttgatgctttcacgatttcacctatcgaaatctcaaacgaaaacgatctttttggtgcggtttttctcctggttcttttgtgtactttataccataaccaccagagatacacaccaaagcgatgaacagtgaaaggaacagcaacatccttcagacttgagagttcagtcttccagatcagcaagcgaactgaatttaatcaaatgtactagtactgttttctggcggagctacaactgtatgatccaatgatcagcttgttggtcgtctcaagcatcatatcccaaacaaaaaaagaaaaagaaaaaagaatcagtaaagtacacctctcgcttgattgattgcaatggtggaccaaaaattacagtttgatcgatgtgaagcgtgttgcatcagtaactttttagtttttactacgtactctccttttcatcgaaagagcgagatcgagaaaggatgcagtgtttgcaaattgcaattgacgacgagaaatcaatcgaaaacgaaataattggcagtacggcagtaggtctgactcacgcgtccacgaaaattaagcgacgccaatattcttcaagctccgtttcgtcttcgtcttcgtctacctctgtcatgtgcctgtatcgtacacgctcgtgcgcggatcgagtacacgcgcgagcgatcgagccgtaccgttgtgcgtacgtacgctctcgcgcgaccggtcgccggcggccggcgaccggtggccggctggtggttgccgcgtcggcggcgagggtggggcccccatcgatcggtctcgttcacctcgcgtagtaggttacggcgtccctttccgatcacgtacgcgcgatcctctcgcgaagcaaagaacatcatccttgtgatggaggacgtgggtgcgcgccgacgtggacgcgtcgccgtgctccacgtgtgccccggctgtcggtggcctcccttgcccgaggaagaagatagtgcagctctcgctgacagatggcccccacctgtcataggcaagcgtgcagcatccgactgtacggatcacccgc

SEQ ID NO: 18090 - DNA, 12097 bp, Oryza sativa
tcgattcattcctgtctccaattgaaggtcacaattgcagctggcagctagctcaaatttccattttttgtttggttgtctctcggcagcaaagcagatatagagcagaggaaagctaagctaaattagttagttagattactagtctctggcagctgggtgatcttaatttgatcaaagaagaagaagaagaagcaagtttttttagctcctgagtatattataggattaactactactaggatagtactcctatatgagaagaagatgatgcgcgggaaggatcagaaatttccggcgatgaagaaggagacggcggcggtggcgaaggaggaggtgtgggaggtgcggcccggcggcatgctggtgcagaagcggagcccggagtcggagccaccgccgggcggcgcgccggtgccgacgatccgggtgaaggtgaagtacaacggggtgtaccacgagatctacatcaactcgcaggcgtccttcggcgagctgaagaagctcctgtcggagaagacggggctccaccccgacgaccagaaggtggtgtacagggacaaggagagggactccaaggcgttcctcgacatcgccggcgtcaaggaccgctccaagatgctcctcctcgaggaccccaccgcccaggccaagcgcctcctcgaggagcgccgccattgcaaggctgagcgcgccgccaagtccgtctcccgcgtcgccctcgacgtcgacaagctcgcctccaaggtagctaccccgctgctttgctttgcttgtcttctccgactccggcgtcgttgagctgtttggtggtgtacgtgcaggtgtcggcgctggaggcgatcgtgagcaagggcgggagggtggttgacgccgacgtggtggcgctcaccgaggcgctgatgaatgagctggtcaagctcgactccatcgccgccgacggcgaggtcaaggagcagcgccgagtgcaggagaagcgggtgcagaagtacgtcgaggccccgacgccatccgtgccaagaccaagaaagcggcggcggcgccgcccaaggcccggccgccgcacctgccgccgcgccgccgccggcgcagcagcagcagcgccggcagttccagccgccggcgcccgccacggcgaccgcgccggcgccacagaccgcgacggccagctgggagtcgttcgacctgctctcatccgtgccgtccacgtagtcggccccggtgaccaccatggcgccggcgaccaccaccaccacctcgccgtcgccgaggttcgagtgggagctcttctagacgatgtggggcccacactggccgcatgtgtgtacacgttcattggccggtcggtacctatgcctttcttgcatgttcatctttggtcactcatggtgcatgtcaattgtcattcttcctttcctctctctccccaattctttctttctttctttctttcttttttgaattctgagtgtatattgatctctacaaaaaaaggggctaaaatgtcaagtgagtgagtgagtgtgatcctcatgaagaagacaacatcaaaaccatgagacactctgatgatccatggtctgcaaaaaataagtggtggcctttgagatgatgatcaaaaaggaaatttttcatgacaatatatatgtacagtactgtatactactactagtgtacatcaatggtctcagcatatgttgcctgtctcattcatcttcttctacactgtatgtatgtattatcatcacttcctacattgtacaaacaatgctgctactactacatttctggtactcatattcagtagaattcagctgtctggaaatgcaagtgcagcatatgcatcacagctctgaatttcagattgattggctgaataattgtggggactgatgggcaattattaggcatctgccagtgcagggtagttagcaatttggatgcattcgatcggcggcataaaactatgtgctctctcctccatgctttggaccggccggattttatgtacatgccatggatcaaaagcctccatttttctgcacttgtttagaagctctgtttggtcagcatgacaggtagcagtagtagtagtagtagtagttgttgttgttgttgttgttcagagttcagaatttgtgtgcaaggagacaggggaagctaataatactgggcttgtggggtttgtataaagtttgatacatactttcattcatgtgatggccagatcagcctatcaattgtgagttgagtggtgcagcaacaacaacacttctgctatactatagtgtactctattacaagtagatatgatcctctgtcccattttttcagctggcactaatgacatgatcactgcacaacttaatttgttctgttccatgctagccattctaccagctcttctcttcccttcacctgaatacacaagccaaaatgagagctcaacatttgcatcacgagctcttttcggacaatctacttgggttggtgtgcacacaattgtagtagtacctgttgtgcagagggcagtaattggtgttgtcctcaagttgcagactttgcagagatgcctttcttcagagaagcacagaaagaaaggcaggctgagttggaagcttcatgcccagctattagaaatagggagtctaggagatcacagtagtagtagtagcagcagtagctcatttggtagtaggataaaaattaattactcaattaaagagaaagaagctgcttgtagtagtaacctaggagcagcatcataatcgtattggcttcacgttgtacttttgccgtcaattcgttgcagatgcgtagtcgctatctgcccgtaacttgacaccaatggctggctcgacagagacaacccagcttataattaatcaacatcacagaagaaaaagatcattagcgtccgtcagttagtcctcaagtacgtacgcctccctgttcctttgcttgcacattttcgtgcagatcagaatcagttcagagcaaccaaactttcgtcctcaacacacacacctgcagcctgcaagcttgcgtttttctgaattttttcagtcggtggcgtctcaacagctcggtaggtgcgtgagagagtgaggaggaaacgtcgcatttgacttgtgaagctggtcattccttttggcttttagatctgcgtgtactgcttgggcttgatgctttacctgccgctgatgtttgaagtttctgctaattaatcaggctttgctcatcacagagaaaacacttaaaacacccacttgctgaagctggtcaatggtgattagctatactatttgccattgcagcatgtgatgctcgccccgttgatgtagtatatatgaatactcgagtcaagttttggagcaaatgagaatggtgatctgcattgtcaacggttggctcttcctgtaattatattcactgttcagagctaacacatgctcggccatcttctgccatgtctttcttttgcatttctgacagatcttctgccatcagccatctctagtagtagtagtagtagtagtagttgctcagtcgttagatccattgcaagccaagatttgtagcatgttccatgttgtacattgctgacagaggattcaacacacgattttgactgtgcacattttatatggaaacaacgctcagtcaatcgacaactttcgtgaccattttcacccagcctgccatccacgatccagattagtaaggcagaaatgggctagaatgtaatggtgcttgtgttagagccacacgttgcagctgctctccacacggtacagtggatgagtggaatacagtgtgttgccgtcagcgatcgagtgctttgtggagttcgtgtgtggacagacttcagcaattgtgtagtagcagctggtggcaggctggaccattctgtttgggccggtcaagctgttgctgtactttagatgggccttgcaccatgaaacgaggtgtcaaattttggcacattcaggcccatgaaaaccatcccgggctataaacactagcataaacagtactggactcacagcccaaacagaggaactgtttcagcccacaaagtcaaacagtactggactcagcccaaacagaggaactgtttcagcccaaaaagtcaccagtagccctgttagtgttagcccacgcatgaagtcatcgtcggcccattatcttgggccgtgtcagcccatgaagtcatcgttggcccattttctggagattggaatttccagtcctttttgccctgttctttttcagcccattcactaaattattaaaataaattatttgcctcacgtttcaacaaatacgtttattttttccaaaaagttttcttgcactgtcttgcgtagatcacttgttttaaactatttgttatgtttatttcttaaaatattttattttgctctatagttaagtagaatagtagatactccctccatctatttttaatagttatattttcaaatctgaaaaatttatttttatagacatatttcaatctaacaacctatcatcttaatgacttactcagatttaatgcgtaaatatccattcttccacacaagattggctacatgggcatcgagaaatgtaaatattaatgaatcgcttgtttacgaggaatgactagtagcatgtttaaatagatgataagtagaattacttatctttggtctgtgtgccaagatgaaatatgactatcaaaagtagatggagagagtaattcacaaacacaatgcttttttaaaaaaaataagatattttttttgaaaagatgacaaccacaatgctttcaataatctagggcctcgcaccaaacttccctcaaactcccaactttccatcacaacacgttacatctaaaactttcctactcacataaactcctaactttttttctaaactaccaactttccctaaacttctccccaatttcagaaactaaacacaacctagattaaacgagacagttactttcagtgattcacctagcagcttccaggtgtgtatgcactatgcacacaagcagttgcactgcaggttcaagtgccccatttgtgcagcactcttggtgaaacagtatcagcttaagcatgcacacaaacatgcagtacagtgtatcactggtgatggatctgtggatatggtggcatcaggtggaccagtactacacattgttggtatgtacccctccatttttatatcataagtcgtttaacttttttgttaattaaatttttttgagtttgactaagtttataaaagaaaattctaatatttttcatataaaacaaacagattatcgaaatatatttaatgttagatttaataaaactaattcaatattgtagatgttgctaacctttttttataaacttgatcaaacttaaagaactttaactaagaaaaaaaaatcaaatgacttttaataggaaacggagggagtacctcccaactgtagccatgcatcatctctgcacattttctcttcttgagcccaagaactgaacaaacaaacatgcagactagatagctcctagcattgcctgcatcatcatcattcgtgtactgatcaatcttgttacgaatcatgctgcaacagaggcgacacccaacaaaccagagccatgcctcagatctggtcgattcattcattccgatatcgatcgatgcgtccaaacctgatcgagcttgcctgcaggatcgcccctgttgcatcatgcaccatacatgatgcatgcaattgcaattgcagctgcaaattaatttgcaattgcattcatcagctagcttagcgaggctgcatatgcagtgaaatgtgcatggatggatggaagcaagcattctgttcagtctgatcaggagacccagcaagcatgtgcctccagaaaagcagcttctctaactaaccaggccctgttcatccatcagactttcagtggccagcttgttattatgggcctctctgattatctctttttcttgccctcgatctctaccgactgcctgcctcatcctctgctgtgtatgtgacgttagctcctcgatctcatcaggcaaagatttattacatcgccatgcactgaacatgggagactagcctacatttgctaacaacttgtggcgccgatttggaaaagataaacgggcgaaaaatttggcaatttgcactctaggatttggatgtcacaagaagaggttaggcaagagcaccaagcagtcaggaacttagataattaattattgtcccaagaagtaagctaagctaattctattgccaactagcaagttaattggtctgtttgatttagattattaagtgaattactaattctcatagattatatattcacttaattagaaacaaaaaaaatattttaagtaataattttaatgaatagattaaaataagtggtctaaaaaatatagtaaaataaactctctctttttttttaagataacgcatcttggaaacatgggacaaataatctatttcgataataatctgaaaagagcgcatgaaccggatgacgcatattaaagttcatcatatccactctctgaaatgatcgatctgcttgctaagatggaaatatccagagagtgatatatgatccaaagcagagactatttcccggcttttttggcacagtgaaattttgctggtccgtcacctcatcggtcaatcggcgagagagcatgcatgcagcaatcatttcttgcgtcctggactttgattattgatgctaactgctgcatgctctcgatccagctcccaactttctcaaacgaggtgggctactaggtacaggccagatcgatcggaattatattcattcatgcagcaaatataaagctagaaaaaaaagatcatctcctagctactagataaagtgagaaaaagacctgtagttttggactgatcactgaacaatataggtagctaggggagttacatttcacttggaaaactctgattgatcgatcatattcatgtagataattagatattcttgcgtgacgcaagaatataccggattagacgcacctaaccgaacaattacccaaacagtgcagggatccataaccaaaacaaaaatgcgatgacaaaatggctaattaacccgcccagaggattgcacatctatccatcacatcgcttgtgcatgactcggcacaaacatgcacatatcagcagtggtagctagcttatcaagagacctctaattaatcatgctctttgtgccatgaaccggggaaaattagtaatccaagaatgccgattctagaggcagcacacgtacatagatcagatttgtcaggcaaagaagatcaagaaggagcaagcaatcaatcataaatgggcaggcatgcacctgtgcgtgtaactgaatattcagctagcgtttgcatcattcagatgtggtagtagcagatagtagctactccagtagcatacatcgttcgtcaggatgatggtcagatacatgcatggttaccgactgaattcaattggaccacagcatcgatctcctagtgtttctcctcccccgcaaggagtcaaattcatccccaaggatgacgcacgcgcaagtgcagcccagccagctactatccctatcttgtactgtctcactttctagtgggcagctgcatctaacgaggacactggacacacataaggtgtgtttaaatgcgagtggatgatggacattggcttcatcttttcgtttatacttatgcttatcagctaaaattttaatttttaatcttaaatttaaagctgattttgatgttttctttatcgaagtttatttttcagtctttgcttttagatcgctaagaacacatatataaaagttttattcacaaattactttttgtttgcaaatatgccgtttggtttattccacgaaccaatgaattaactactagaaataacataatccgccatccgttagctaaaaataacataaccttaatataagggtccgtatatgtcagcgcataggctataccaaaaaaaagagatgttggatgtttatgatgtcatgacatatacgatcttatagaaattgaaaaggatgattttaccatccttgagaaagtattaggaggtattatattttttagtgtaaaatttggtaccaaaaattttagtataaaatttaggtaacttgagatactctctaaaggatcataaaattactcaattaaaaatgtttgaaccaaaagagcttactccctctgttgtcaaccggtgggagtaactgaaagattcttacaatgagaattgttttttagtttttgagaaggtgccaagagatttttacattttatagtataaaacttgttatattcaatatttgatatactagtggtactaatttttaccataaaaaagtggcctcgtggtaccactcaaggaccgcaaaatcactcataaaatattcaaggccagtcccttttttttaaaaaaaaatagatactcaaggctaattgtgtaattcaaagggcttcataggaaaaggtcccacaaagtttcaataatgaaaaacaaattcttctcagtaagtactgttgctaatattcgaccttgacatacataggtcaggctgtcaaaactaaattatcatggccttcatggtttcaggcctaactactagggagctgtacagtagcatggaaaactttcagtcaggccggccaaactgttagaggcctgtcactgtggtaaactatgaaactgatgttactgttgtctgttgaagttggacaatggacatacctacctgtgctgtatcatcaacattatagataggctgattttgtttcctttccatgatttgtatagtactagtagtgtacaataataccaccaatgtgacaaattcagttggattagacgtatgagcgagcctagcgaatatgtagacagtgctcacctacagtgtcctagctcgtcctaacaacctgcaaattgggctacaattgggtgccaccacacgatggataagaggaggtagatctatcggggaaaagcctgcctttcctctatctagatcgaccgatggataacaagatactattattcagtaaaaacactccaattttcagttctgacagttgtgtacttccacgttcagaagaacaagtcaggacagcactgtaaatatgacagctagtgttcactgaatgccaactcggtggtatagcaattcagaggtcagaacaggaaagctagtgtagtggactctgaagattggcatgatggagaaaagaaagttcagacttctcccatttcctgggagcatatagctagcatatgcgtgtctcattcccattgcatctctgtatcgtcttttgcaccgaatgcacagcgcgatccaggcaacgatcgatcaaggttgtcaatgaaaagaggaggataagaaaagctgtgcaaccaccgggccactccatgtgtgcatcgatcccaaaccaaagtggaggaacaacttacacacatcatttgccttacagcatgtcacacttactagtgacagagactgaaagttttcttattatctactttgcatctaaattttgttgagagttatatataaaatttgttttaagtactaaggacataactcgatttcattttgttagtagctccaagaatcaaaattagtagttactagaaaattatatgtagaatgcatcctggaatatcttaccaaaaaactgcatgcaccatagtacttgtgtactccaagatccttatgtacggaattttgcagctacttctacttaactgtcattcatgtcattttcagtcatctggagcagtatagtgtcaatgcctgcttgagaggaatcttgggggtcaggtaacttcacatggagacctcatcaccgagcctaattggccttctccagaatagaagatgcaaaaagaccagcataggattcactgcaaatcatttcgcacgtttccaaatagctcttacagattaaattacgagatgttcaatcagtctgcaataacacccagttgtttctgccatttcatgacaagaacattaccgtatgttcggtgtgcattgctatcatggagtccgatagttccaagccacaaaatttcagaatccagggcacttggattagtatggttgagagcgccatgaaaggaaagaattacaaactgttgcttcttatgtactttaggaaaagcagagagcatcgtaatggttgtgtgttcgtttcccgtcaccagtcacactgaaatgatgcaaaccccgcttgttggctgcctcttatctttttgtttgattccaattctactaatcatcatgtttcttgctccaaggtatctctatgctgactctgaaaaaaaaagggccatgcatgcatgatagtttcagtttctgaatgtgtttttccagatttttcacatactttggtctttgcttagctctgcctgcatggttcgttgactagcataaattggttcaggtgtctccaattacattgcacgagtcctcgtgtgtatatggatcagggtttggttcgaaatttcagtaatttcgcctcccccctcccactggcaagctcacatctcgcccgaaattttcccttttttgctttttttttgtaaatttggttaaattttattgaaactcatttaaaattagtcaaattttcaaataaaattagccaaaaacttccgaaattttgataattttggtccccaccggcaagaaaactaattccaaaatttcaaaccctgatatggatctggccgtctaattgtgcgctataagatttgaaactaaactttttgaaatttagtttcaggaagacactctcgatggtacaataatgtatcaggtcttttgcaccccaaattggaaaggataatgaggtactccttctgtcccaaaataactcaacctaggatgagatgtgatatgtgacccattcttatccagattcgttgttctaggatgggtcatatccccctaggttgagttattttgggacagacggagtatgatgcaaatatactcttctttcgatcatcaatagcagcataaagcacctgaagaaagtaggggggggcttcaaatgaaaacgttttagtattcagtattcattccgagggaacttacttcctttttctttactatacacggtacaaatacaaatgcttacaaacatacctcataagatggtgggctagctagcctggattcaaagtctcaccttttttatttatttgatattagatctttccctagtgttcgcatcttttttttaataaagtcacataggcagctcgctatcgacaaacacgtcgtatacaaccaaaagaataattacttgaaaatacgagttggaacctgtgtatacagattcagcttcgcacatcaatctaatttcacaatgaagatgcttatagagccataattaaaaatcttgaatcctaaaactaagaagagaagaaaaagaaaaagttggaagaaaaaaaaatagaaatgcctttttttctgtgggccccatgtgactttgatcatgtcagcagggcaggccggctggatcagttataaatagttccaagtccctcataacttcctctccatcagaaaagcatcactccataacatccttaaccatttgcacccaagaaacgccattgatgatagggtaagctgctgagctaagagtaagagctctcacattagctagctgtaccacacactacactagcagctggagcagcacacacatcacactacaatgtgccactgctcgtccaaggtcgtagccgtagcacaatgccaccagcctctgctcccgccaccggaggcatgccccgccctgcatgaccgccccaggtcggcgcgcggcggcggcggcgcgatcgccgaggtggcatccatcgtgcggctcgccatgccgatggttggagctgggctgctgatgtacatgcgctcgctggtatccatgctctttcttggccggcttggccgtctcccgctcgccggcggcccctgcgctcggcttcgccaacatcaccgggtactcggtgctg

SEQ ID NO: 18091 - DNA, 4945 bp, Oryza sativa
ggcgcgacgacgacgacgacgacgatggagtgggggtggttggtgaagctgtccgtgcacagctgcatgtcggtgtgcttggagtggtggtggtacgagatcatggtgctgctctgcggcgtgctcgccgacccgaaggcggcggtggcggcgatggggatactgatccagaccacgtcgctgctgtacatcttcccgcactccctcagctgcgccgtgtcgacgcgcgtcgggcacgagctcggcgcggggcggccggagcgcgcgcgcctcgccgcccgcgtcgggctcgcctgcggcgccgcgctcggcgtcgtggcgtgcgcgttcgcggcgtccctgagaggggtgtgggcgcggatgttcaccgccgacgccaccatcctgcggctggcgtcgtcggcgctgcccatcctcggcgccgccgagctggggaactgcccgcagacggtcggctgcggtgtgctgcgcggcagcgcgcggccggggagggcggcgaggatcaacgtctcggcgttctacggcgtcggcatgcccgccgccctggcgctggcgttctggccggcgcgcctcgacttccgcggcatgtgggccggcatgctcgccgcgcagctggtgtgcgcggcgctgatgctgctcgccgtgcggcgcaccgactgggacgagcaggccgcccgcgcgcgcgagatcaccggcgccgtcgccggcgtcgtcgttggcgatggcgacgtcgtcgtcaaaggcgatcatgcagacgccgccaaagtaaaggcagacagtggcttgctcgtggtcacagtgctaagttgattgccatataatggagtattcttgactccttaaaattcgtttttttttttacctttttgatctttttttgaagcatccattggaaatttttaggtattgaaacgatggatatttggatgatacatgcatcctactaattttttcctcttcgaaaaaattaactatgtacatgatcgaagagacgagaaatcttctggcaaggtaatcgtgtgtgtgcactattatgcagcagtgaagatcgagttgcaaatagcggcacggtgatgtgattgtacacgtggcgccctcacagcgctttggcctaatctagtatatacttttgggccctaattaactactgttaaaccccatatatatgcattggatctcattattgtgaagttacttttgaaaggatgcatgattatttgatagtggttataatcatctttttaatgtgcatgcatgcacaacctccatggctaatcactttctgatcgatttggaattatgcatgtgtcttttggatctatgcatatggccagggtaatctatggggttaaattaagatgattgagctgaagtgcacttcagtctgatcatttacatcattgtcaattattttgctgatgaataattatgccaaatccgacagacaaatcccttttttgtcggtgtagaaatgacctctctgatcagcacaccatgcaaaactattttcgtcctctttcgtcagatgcattatgcaccaaagtacagtcgttaatataattaggctgatcgagctccccactgccatgtcaaaagattaaaaagaaaaaaggtgattaattaaatgtactactaggactagctactaaccagttagccagctatccctctcaaaagaacaggaaagaggttgctgattggagccctgtttggcccgggaccggaagccatttgggattcctcatcaggagacagctcaaatccttgctgattgcagtatgttaacatcaatcacacgaacacaacacacatggtaaagcccttttttgcgttattgcgcttttctactgttgttgttctgtactactactactttgtactttctcttcttgtcctgaaatgatatagaaaaatggactgaattggagcaaaagtagtatgtagtgctaggtcagaaacattaattagtaataatatatatgtgctaattcagttcagttccgttttgcttagctgtagctcacttggtttagttaatggcttaatgtcacaacaaacacacctaggctgtttcactcaaagcagcacacataacaaaaggagagattcctctctccaagttccaacaaaggtgagcttcattacacactgatctacatctgctttaaacctagtcagggcacaatgcattacattaacttttgtcagatattgtatttttctgtcagatattgttaaaaacgtactcatgcttggaaaagtgtctgcatgggtgtcaactactccctcaattccatattataattcgtttgtcttttttcctaattaaacttcttttagtttgattaactttatagaaaaatatagcagcatttttaacacaaaataaacatatcatcaaaatatatttaatgctagatttaatgaaactaatttgatattttagatgttgctaaatttttctataaatttgttcagacttaataaaatttgactagaaaaaaagataaacgacttactataatataaaacgaagggaataattaacttgatccaattaaagtttctaactagattggccgtagatgcagatatgatatgtgccccaggggcctaggtgtgtgtcaaaaaaaactgtgcattgtttgcgatccacgtaagcaacatgacacaagatgtactgtgtatattaatctattagtaacattttaaaacacatgattacacataaggttctgaacctacagtactagacaggtagctgatgttccctttgctaacgagataattaaagaaactactaattaattagtagtggtcctctgatgatatccaagagctaagccgtgcccaataatgtaacataaaattgtccgaagactatataatacctgtgtggaattgtacgtcgacctttctcctttgtggatggacaatttagaaaccagattgcttatgtgtaactgtaaagacggccaaaaggccatgaataaaaaaaatgttcagattcatcgatcgggcctgaatgtatctgaaattctctctgaacatacgtacgcacgagcagggcagctcagagcactttgatcatcagggactgaactggcggctgccatagttaatttagctcgatcctaattaaatgcctgaacagtacttgagcttaatttgttaactaactgatcagtaactggctgcgtgcagctgctagctaatgatcaattggcagatatagaactttatgaaaaggaggccacatctttttgtgcatgcatgcatgcataaaatgcaggccatatgatggtgatgaaggaacgagcaagctagagagatcaatcgatcgattgagctgggtggcctcatgtcagccaggctcgtagagttagacacttagatagatagatactccctccgtctaaaaaaccaacctagaagtgggtgtgatcccttctacttccttcgttttataatgtaagtcattctaacattatccatatttatatagatgttaatgaatctagagattcattaacatctatgtgaatctgaatgaatctggataatgaattatctagattcgttgtaagaggggtcaaatgctgattttttttgggacggagggggtagataggtgcaagtgggcagacatgtgggataatttggaggaacgtaacgtgtagggtacagtagtgtttgttaaggcgtaggcaagcagcacggcgatggcgatggatcgatcagtgtagtacgtggatcgatctactgcaatgtccaatggcagcatgcatgcagttgcagccgtatgtatgtgcgtcacccagctatctgcatgcctgcaattcctgtagagaaccatgtgtaacctgcactgcatatatatactgacatgaacgaacgcatggcatataagagagactgacatgatgatatatataccgcgcgcatgtgagaaattaattgaaactgatctttcgatggatgggccacttttgtgtagagatgcaagcgggctaacccgtgaccgtgaacagcttatagacaaaattagtgagtaatccgccggttacttactaatttaaataattattatgggttgatccacttgcatctctacgacgcgacaagccaaactatgatgtgaaaactcacggattaccctttacttaacatatataagtagttttgtagatcggtccgcttgcatatccctacttttgttgtcggtcatagtgcagtcgcgatggatcgatgaagacgacgcttggtggtgtggtctctgatactgaattgaaggcaacttttaatttaggccatccaataaaaccgatggacgccttgcagttagttgcaggccagcaaataaagctagagatcgagcctgcatgcatatatatcagcatatggatggctgtattttagcctgtgcatgtgcatgtacattgcacgttagctagatcctagaggtagcaacgtacagccaacgcatactttggtgactttggggaccgataggaattacgtacggtacgtagctatagcagtgtgcagtgtgtggtgtgcatgcatgccaggagtagtaattaaaatgagtagtaggagaactgttttaaacattcgggtggacgtccacccgtttcttgtatgtcatctaaatggttatgaaaaattttcaaaaaaaaattgacatgataggttaatatgtaatatatcatctcacaaacatgcaaattcaaattcgacttctacaagttggaacaagaacaacaaatttgactgtgaatatacgtatactagttagagtttaatttgttatttttgttacaacttgtagaaatcgaatttgaacttacatgtttgtgaaatgatatattacatattgaagtatcttataattttttttaggattttttcataatcatttaggtgacatgtaagaaacgggtgg

SEQ ID NO: 18092 - DNA, 12858 bp, Oryza sativa
  unsure (1)..(12858): unsure at all n locations
acggacaggtttgtgaaatgagatatgacataggggagcatgcaatacgtagctatagcattttttcattatcagttaggttgcatgtaacaaacgggtggacgtccacccgagagattggtggtatgtaaaaaatgggtggacgtccacccgagagattagaatccatctcctgagtagtagcagcagcagcagcagcatgcagattggattttggttgggttagatggggcgtccctgtcgacacacgagtggcacagtacgtagttgaaaggagatcgatcctgccgttggcgagaggcgccagaaataaacgtgcgtcatccaggctatccatgcgatgcatgcatggaccaccaataatataatccactcgtgctatagcctccacctgagacagtgctcttaattgacgcaggcgtagatatcagtagatagactggcagccctctcgtaagtagtagatccagcaacagatgtacgcgcatcgcatcatggttggacaagtatgtgtggtgcataagagcagggtataagccagctgctaacatatatgagaaagatcaataagtagaaagaagagcaccggaatacatatgtgtagtcagctgtagcaaggatatcaatacacggtgtgtgtatgatatatgggaccaggtattaatattgtagtatgtaactattgtatgaatgagctattagattggctatagatgaattggagctagtagttggctatactgttaaacttgctacaaatcatctatagccaatttaacagccaatttatacaatagttgtttattatactattaatatctggtcccacctatcatacaaacattacgtcttggagtccgtgctacagctgactacagatctgtagcccgctgctcttctcactcatcttttatctctttaaaatatgtttatagctggcttataatctattattgtacctaactatgtaagcggaccgacccgtgaacctacttatacgttaaataaagggtaatttatgggtttttcacgtcgtagagatgcaagagtggatcaacccataaattcattaatttatagattaaattaattagtaggtaatccacaccgcgtgttttactcactagttttatctataagcgggttcacggtaggccttgcatctctatcagttgcatgccgcgcgtgtgtacgaaatgaagaagagaagaggcatatatatgatgtcgatcccgaccggctggcccaatcgtgcggccgccacgcgtgcaccggccgacggtatgaccaatgcctatatatagagatgatcagatgaccacgtacccggctggtgtatatacatatagctagcaagatagacataataagctaggagagcttagtgacacatcatcttacagatgcacgcacgcacgcacgcacgtacagctagtgtacaccacacaaattaatctcagatggatcaatcgatgatgccaaattgccccgggccaatgcgtgcgcgcgtacgtctacctatatatatcatcttcatctccaactatttaacatgcagagatatatgcagatgcaggcaggccagcatgcatgttacatagtccttcgtccgtttcacaatgtaaattattctagcatttctcatatttatattgatgttaattaatatgtctagattcattaatatcaatataaatatagaaaataactagaatgaaatatacagtacgtagtatatcccactttacctaatgaattatctatatctagcactttaatgcacgagaccgaaagagacatatatggccaaccggccgccggggcctccatcgccaaccgatcgaccggttgcgctgaaccctgtgcacgcggaggcaggcaccatgaacatccatatgcacacaccgtgtcgtcgttgcgtgtcgcccgcctcgacgcacgttggtcgggacggagtcctagtactattccacaactgttacgtttgtgctgcagccagctagtgtctgacgtcacaagtgttcgtccgatccgtcgcgtagctaccacacacgtacggggtacaccttaatttgccggctccaatatggagtacgtgtacgtcttccagggggaccaataatcatccacacgcatgcttgcagcacacactactgctgcactctactcacctgcatgcatatgcctctgcacacacgagatctagtcgagagtaaactaaccaacacgatcgatcgatgccaccttaattgccactggccggatagcgcgcacgacaacacgttggtgaggatctcgatcgatcgaagcaaattaagatgaggatagctagaccgggaggttgatttccacatgcttcgcgggtaaaacatacgtaatccctcccgtccaaaaaaaaaagccaacctaaaaaatatgatcccttctaatccagatttattatactagaagggaacacatcccctcttaaattgacttatttttggacaaagggagtacgtacgtactcgatcgatactacctagcggacctgtacatatgtcttatgggtggcgggcatacatggccattattcatttgatcgggagctaccttgggaaaaatatatactgctaactttaaaaaataatgtaaacctataaatcattgtactatttaaaaaatatgtatacatatgatcactctaattaaaaatttgatgtggataaatttaatacgtccatttctcaatactccctacatcctaaaatatttgacgccgttgaattttttaaaaatatttgaccgttcgtcttatttaaaaaatttaagtaattattaattctttccgtatcatttgatttattgttaaatatactttcatgtatacatatagtttttacacatttcataaaagtttttgaataagacgaacggtcaaatatgtttaaaaaagtcaacggtaccaaatatttaaggaatgagggagtactatgttagttttcagtttggcactataaatatgcgattttcattacatgttttcgatcccttccctcccagctttgcaccaataataaacacgtactccagctttgcacgcctgatactaccgtgagcctgtgcatttcgggcctacagctacatataacaacacctccaactgttttgtaaactgtataatatttttgtatcttcgattctcacacgagcactttgattccctgtatgtatatgttcactgatctaatttactcttacgggaatagtaaatgaacgaatgatccatgctatgagcaaacgggcacagctagctagaaatggctcttcgcctgctctgaaactcatcgcacgcattgcttgcttcatctcctgttcttcaattaactatacataatcatcaatgatagactaattactatacatgatcatcaatcatagactgattactattgactgtatttaatttgagtacttgttgatgaagtcatattcgatctcttatatggttatctgaattttttatggcaatgctgcatgtgattctcgtacaaacatatattcagccatacatcgcgtgacactggttatgtataatacatgtgtgaagttgaccgatcagcgaatatgtgtatcatcacggatgaacgcataagagatcaagttttgacaattgggcgcaggagactgtatccttatctttcgtccaacaactagcttcaaaccatgcatcacgaatgatgttatcgccttatcgggggataactaatatatttgttcgtgaaatgcatgattaattccattcaaacaactaatttaattttggctacgattaattagttaacttctatgttataagtaatgtgttgaatgattgcaaagtgaacgtagattaactggttagattccttgtggtagaacaagcctatccggttcaaattttcgacttggcacatgatagtctacgtacctgtcgacaatgagacacttgtaatgacttcgttagtatcaagaatacgtggtccaaccatagaggtagggtgtacgtgattatatgagctctaatatttgtattgtgttgtatgattgtaagtagacatacttgctagagcggcatgatcacatatactccctttattttatattgtaagacacttttttaaaatttaagtttgatcaagcttatagcagaacatagtataccattttcaatcaaataaacatactatcgaatatattcaatatatattacatctaatgaaactaatttggtgttataagagttgctacatttacttataagctaagtcaaacttatataagtttcttttaaaagaaattaaagcgacttagttataatttgaaaagcggggagtatttgctaaatgtggatcagcagagcatcaattccgcgctggtgagccggtagatagtcgatcaggttcgtcgcagttaactaaaaaaaggaaaatctatggctacctgactagatgaacaattatgcaaatcatgatctcgtcaaagcctaatctctacatctgttaatttaactcaatatgttggggtttcgcctccattgattccattaatctacttgctggctgcaggcccatgccattatataacagcaccattttccaagtatgttaagcaagaggaggcttatatatgaacaaaagatcttttgcagtcggcattgattgtaatccggagttcctctagctgaagtactctgtcccagattaattaatgcgttatcgagatttggccttaaaatgctattgagatttggcctgtcttttaactattagagcaagtttaataatatagccaactactagcttcaaataatttagagccaatataatagctaattcatacaatagctgcttactatactattaatacctggtctcacttgtcatacacacgttacgtcttgaagtccgtactgcagctggctacagatctataacccgctactcttctctctcttcctttatatgtttaaaatatatttatatctggcttatagcctgctattgtacctgctattaaaatggagctgtagatcgagatcgatcgatcatcagtacgaggattcagcatgaggaagtacgtttagcctgctgaacatttgcctatatatattcagatcatgtaccaaatggttttaattaataatggaggcagatcttgtaccgatatatctatatctgtatgcatcgtcaagttgagcgcatcggaacatgcattactggctctgtatgatttggcagaatctgaatccttgtccatatattgctagctagctagcttgacataaatcgatcacatgtatcctcctacttgtaaatattttcttttccttgctcgtgaagcgaatctagcagcatgtagtcccaaaaaagatctacacataattatcagaagcttaagataatcctgctaagaaatcaagcttccaggttgtgtgtactagtgtaatgtttggtttaccagatccaaacaaacagcttgaggttagcacttaggagtggctgtagcagtgaagttcttcaggtaaagaaatgcatgggcaaagtgatcagcggtccttatattgggccgtacagtaagcccaatacgacccgtgcgaactgttgacttggccgctagcaatggtagcggcccttttgttgatgggccaaacggaggcccaacgttttgcttctaggcctgctcagccggagctctcagggggttcggagaaaaagatgccgaacccaataaacggcaaagtatcctacgcacacataggcttctcgtgtacactctctacataccaactagtaaatgtcttagaaaattttacaaaaaatatgacatgtactcttaataatactacacatattacaaagtcttacattcaaattcattgtattttagccgtaacaaaaaagagaaaaatctaacaattgtaagagtaaaaaccagtaagaattgtcttttttttttgttacggctaaaatataataaatttgaacatgagatttcatagataggtgtaatactattgaaagtatgtgtttaattttttatataattttctgtgcacgggaagcttgtatccgtagtatatgttcccccaataaacacggattcaaaaatgccggcagcccggcactggtgctctagcttgttcttgggcatcgttcaattggcagcagcacatatagctgcatacggctatatatgtattatttcatagatgattgatgatttctgatcgatgtcaatgctagttaatttgtttttgcaatttggacgagcttggaggtccctcccggccctctgcttataaaaacaatctttttgtgtttgcactgtatatgtatagatggttgctttttgggggtgtgatttgaaactctagaaagtatatctcctcgtttttagagcttttttacggtacattctactgctagtatatactaccagtatatttgatctgacggtgtaaatttatctgatttccctcttaattatactgcaatataaattggatagggtatatttgtctttttatctttttgcgtgggagggtatttttgtaaattaatgcgaactcacttagtcagatccgtttcaccacatcgactcaaactgaatccgctcggctcgcatgggcgaccgccgccgctggcttctatgggcgccgcccccgccgccgacagccacagtcgccgccgccaccgggagccaaaatcggcgccgccgccatcgaaatcgattcgatttccctcctcctttcctcctctcgtgtcttttccgtccacccaaaaccctatctcttccaaaaaatccccaaatcggcgccggctgctgggtctacgggagggcgccggctgctgggtctaccgaagggcgaagcctgctggggaccttgtctgccgcagtggcaggggcagccggccagcggtaggcggcagcggcaggggcagcaggccggcggtaggtggcagcggatggctgtcgcggggcagaccctcttgttcggcgcgggagcgatgtgcaccaggagcagcgacgctggaaacgcgagatgtatcgagaagaagcagatgacgacatccacagaaaaaactaacgaaggaaaattaatccggatgaaattaattctctaatttaaaggaccaaaaagccattttcagacttttacctaataccaaaactacccttgtatatactggtagtatatactagcagtagaatttaccgtaaaagtcctcttattttatactaggtatcaactcaactgtaaaattggaaaataataatgatatgatatattaattcacaaacattaagttcaaatataattacaaacatactttaatttgctaactaacattgcattataacatacttttaactttcataagaaaagctgcgagacgaacatcagccagatggccaccggctgcatgcatgcgctactgcacacgctctgttgagcgatcgccggctagcgggagagatggatcagaccctgttaacaaatggactaaataagtagtttagtcatgcgtttggcaggtacatcgatctcgatccagacgacaaaccaaatactcgtagctatttaaaggcttaagcgctctaattaataatcacccctaaaccatatacactcctgtaacctctgcctgccttaagctaagccgatggagatcaagctcgtcttcttcttcctcctcctcctgggttttggcaacgcggaggaggaactcgacaccgaaacctgcgacgtcgccaagctgtcggccgagattggcacctactgcgaattcgaccaagggaggatgtaccccggccggtgctgcgacagcatcatcgacgccgcggatgggcacgatggcggtggcactcagtgcatctgccgcgtctggatggaggatgcggtgagaaagaccgggatcactttcagagagttgttgcataagtacattgattgtggtggtctgcagcccagcctacctcatcttgccgactccgcttgctcagctggtaagtaattaagcattaattgcgtctccatctcgaatcgatcagtctctaattaacttttgttgtttcttccttttctgatctgtctgattaattcacttgatcagctcctgagatggtaggcacacttccaggtccaggcaagatcagcggtgcagacaccaccaacgtcggagtcatcttctccgccatgaggccggccattatcgtcaataaaatgctagctagtacttgatacatatatatagcgagtgttcgttggggtatttgttaagttaatttagtgttattgccggctaataatatatatagtagagaagctatgagtttgatgtcatattgcagtgcattacatcgttttgttattatattttgaaagcagactgtaagttccctgacgctctatttgagagataaaaagattattatgccgaaagagatcaactactccctccgtcccacaatataagggattttgagtttttcttgcaacgtttgaccactcgtcttatattcaaattttttttgcaaatataaaaaataaaaagttgtgcttaaagtattgcggataataaagcaaatcacaaataaaataaataataatttcaaaaaaaaattaaataagacaaatggttaaacgttgtaagaaaaaactcaaaattcttatattatgagacggagggagtagtagtctagtaccagcatgcagtgtgtatgtttgtgtgtgatgttgatttgttttctaattgcatggccatcagccccatgtcttaggttcaggtgtcccgtgctgaatcttgaaagtgctactagtttgatggctcacagaattttcataaattcggtcaccatttaatgcatgtggcccttacaccacaactgtaatttaacagatccgatcaaacagctctagtctacggatttacccagaaacatgggtagcggtttaatctatggattgatagtaactaaaatatatgtttctgttaaacttttgtgcttgagagatgttctagttgtttcttttttagctgtgtgtattttatgcagaggccgggggtgactcagtttgattatatcatcttgatgtaaataaagcttccattatcttaaaaaaaaacagctctagcacttaggattagcggtgatgttcttcttcttcttcttcttcttcttcttcttctttttaatcagccgtgatgttcttcaggtaaagaaatgggtagaagtgatgaaagatcagaccgagacaggccgtcatattgcgctcctactacgcagtaagcccaatacgacccatttgttggttcggtcgatttgttgatgggccaaatggaggcccaactttgtgcttcttgccctgatctgacggagcgctggggtcggagaacaagacgccggcccctactcatcatagctactgattgaatacaattatcattcttctacattcttgagttcctacttgtaacagtctcgaccgcttcgtgcgacgttgccaagctgtcgactgagattaattggcacctagtgcggttcagggaggatggacggcgttgatcagtgctgtgacgccatggaagctcggtggtgctcagtgtctctgcccgtcgtttctacttgtgggttatgttaccgatgaaaaaccatatacatgggtcctcctattcgtcgcagttatactttatttgttaagtttagtgttaattattgtctgctaacagtggagagctatgagtttgatgtcaatgccgcattgtcgttttgttcttttattttgaaagcagacagtaataagttcgaacggattctaaatctctcaaatagagcttcagatttaatgttcagtattatgctagtactaatgttttaattatgtgatactcctatattaacattgaataatgtgactgcaagcaattagcttgtcaagataaaatcatgccatgttgtgttagagctgcatttatacttagaagacagcatgcagctgttcatacaacccccaaagtacaatccctattattgtgtccctaaccagccctttgatgagtgagcttgcncaggtatcagatgatgctctaccaacaagatcacggaatctcaagtctccttgatcagaaatcagtgcatacaccacaccattcatatgtccctttccaatgatcccaacgacagttttgctcttgtttacagctttgctcctcttcagagaccatgcaaggaactgtaaaacagacgacaaattagcttcagatagattgttcaattcagagaccatgcacttggaagcaagatacgtaactaattaactttctgcgtatgagtgatctttctgcaggttgtaaaattcagacaagttaccgaggaatataccatgtcacgctcatgtatcagaggttgcagtagtgagggatatgagatgctcagtttctcatacaactcgtaggggctacctgcagctttctcatcctgctgcattaccactcaaacaaggatatcgacgtaaataacgcgaaaattatgttttgcaatgaaatgatttagaggaaattacactcgtgtaaaaatgcaacactgctgagaacagagagatacttctaggagtatttagaacttacacttgtgtcagttgtagaggtaattccacggaacaatgaaactaccaatttagtcttctcatcccagctaagggatttccaagctcgttcaagctgcaacaacaacttggcatgagcttcagaaaacttatcatttatattttgcgcaactgcaaatcggaaaagagttcgcagatatatagtagtagttgtatatatacagttatttcaattggacgatccccaagaacgagctgagcgccaagatcttcagacaccttcctagccgctcggaactagcaaatgatggagtaaaagaggaattgttttcaagagttgaattaaatcatcagaaaaaaaatgaaaactaatgacaggaataatttaattacacctcttctccgaagggccggtttgcaccagaagagatctttgaggagaaaacggcaagaagcagacgcagagcaagtgcagtctgcccacctgcaagcatcgtcccaagcagaaaagaattaccatcttctggctgattggcagtaggattatatcattgtagagtgaaaaagaatttcaattacccagattgatgctccggttgacggctccgaagaacttggagccaccgagagagaacatgttggatttgaggagcggctcgccggcagaagaatcggtggtcacgtacatgattccagctctgcagtgaaggctctgcaatggcagcaattagctcaagaagagatttcacggccatgtctgactgagcaggcctagctaacgacgatcttgcctgctccggcagagctcgacgacgacgttgtccgggcggacggcgcggagcacccgctcgacgtcggcgacggactcctcggagaggtgggacgtcccgaggatccagacgtcctctggctccacgaactccggcggccgccacgccgggacgggcccgaaccgccgccggggaacgcgcaccagtgcgcctgactcgaccagcgcggcgagcgccgggtccgcggcggtcaccgcggccgcccgcgtgtgccccagcatggcctccctgtagtcgaagcacggcggcggcggcggcagcggcggccggaacgacgccgccgtggatggggtgggccccgctgccatccctggcgcggcgcggcgagaggaggaggatatgagagcgcgacgcgacgcgacacggcggtggcgagccgcggggtcatacaacgttgtggatgacgtagatgggctcgctgcctctcgcaactaaagatttttttatccctacttttccttgatttttttaattttatttattataaaatatttaaaaaataattttctatttgaaaaatttacaaaactagtcacccatagccctctataaaagtcaccctcctaaaaggcgattttattggcttggcagatggctgtgggcccttccataacggttggccactgaggacgccgaaattctgcaggcggcccccttccgctctcgaggacgatttttttactatgcgactgcctgcaaaaataccaccccctaccatcctttaagcaagtggcccctcgcattggaaaaaatcatcctcctaaagggcggtaaggagaccgcctgcacatttttggctcttttggtggctggccgttataggaggttcaatggctgtatgccacgtcggcaaaatcgctctttgggagcgataggcgactagttttgtaaattttttatttatgtaaatattttaataaaaaattcacttttccttaccggcaaatgggccgcattttttatgggcccgcaagttcgtgtccgaatccggtccggactccaacccggcccaacgagcaagagtttccgatcgatagtgacgaaggattaataagtagaagaagctgaagcaaggaaaggaagaggccggcggaacacgtacggcgacgttgatggaggacctgccggacgacctgttgctggaagtcctccgccgcctcccgccgatcagcctcgccgcgtcgcgcgtcgtctgcagcgcatggcgcgccgccgtcgacgccaaccgcctcctgcgcgcggacctcctccccctctccgtcgccggcatcgtcgtcaaccccctctccctgggctcgcgcttcctctgccgccccaatgccgcggcgaccatcgccgacgacctcgacgacatccgcaacacgagcagaggcatcttcaaccgcttcgatttccgagtca

SEQ ID NO: 18093 - DNA, 1989 bp, Oryza sativa
agtcaacggtgtcaaacattttgaaacggagggagtagtatttagaatctcaccttgttgtagattattttgagtctgtgttttagtggcaagcagatgaagagagcagatgtactatttcatcccaatatatacttacattagttttagtagcatcaatctttgaaatttttaggattatatgatatctttcttaagcaataatatatatccatggcaagagtactgcatgccacattgctacactgaacatgcttaatcagcaaaagaaaacctgtagcaccgcacgatatccacaaaatccatcgaactaattaaacaaatatacacggacaggaacggctcaacaattcaacggatcactgatgaaaggattgatgctctagctgctacacatggccaaatggtctttctttacaacagcagctagcggaggagtgttgtttgtgtgtagtgtttgtgtggatggaaatggagctactagtcctacatggataaactccgcacgtcagtcgccctggtggtcgtcgctgcatgcgctttctgcactttttttctgaactttttgcttacaaaaccttgcgctttttgcccttttccccgacgagttgggcggttatggcgagggttgggtttctggacgcaagttggcagcggtgtagcacgcaggattgattgcacgttcgttgcagcattgagaatctgctggctttcgcataccagcggccggacgtgtacgacgccggttttgggctcgagaccaaaaacgggtggtggcgtccttgcctctattgggctctgacgaatgctatgtttatccggatgaggtagttagcctactagtagtagaagaatatttgtttccgttttaaggcttattgtttgattaatcgccgatcgagattgtcatagtggagtgctactctacgagttgatgatgggccgaccaacgagaattgcttactccctcaatactaaaaaagaataaaactatttttacacctttcgaccaagcataactttttttatttaatttattcaattattttttttcttcttaataaactaatcataactattttttatttaatttattaattttcttctaaagcaaccataacattttacatccactttcttgatccacatgaaaatattatgctgatatgttttttctttagaaacatagtataaatacaggcgctcacagagaatctattacgctcacttggttctgtgctggcatgttgaccttcattttctgtgaaactctggatgcagaaacatttattcagtttaaggttgcccattccattccagagcgagtgcgacctgtgcacgccgtgaccaccaatcaggatagacttccttccacggctgcacctctcgcccactggaccaaaccaaaccaaaaccattgccacccccacaaccttccacgtctcgtcacaagccgcttacaaatactcgcgttccaaaccaccatttcccaccacaaacacctccatcaccatcaccacggcaccaccacctccaaattccaatgtgtacgagcaaactagaggagatcaccggcgagtggccgccgccggcattgcaggccgcctccacgacgtcgtcgtcggagccgtgccgccgcctctcgccgcccagcagcaagcgccccgcggggcgcaccaagttccacgagacccgccacccggtgttccgcggcgtgcggcgccgcggccgcgcggggcggtgggtgtgcgaggtccgcgtgccgggccgccgcgggtgcaggctctggctcggcacgttcgacgccgccgacgccgccgcgcgcgcccacgacgccgccatgctcgcgctccgcggccgcgccgccgcgtgcctcaacttcgccgactccgcctggctgctcgccgtgccgcccccggccaccctccgctgcgccgccgacgtccagcgcgccgtggcgcgggcgctggaggacttcgagcagcggga

SEQ ID NO: 18094 - DNA, 19036 bp, Oryza sativa
gggagtcatcatcgtccgtgttcccactcgccatgaacgtcgtcgccgaggacgccatgtccgccacgtccgagccgtccgccgcgagcgacgacgacgccgtcaccagcagcagcagcacgaccgacgccgacgaggaggcatcaccgttcgagctggacgtggtgagcgacatgggctggagcctgtactacgcgagcttagcggagggcctcctcatggagccgccggcttccggcgcatcgtccgacgacgacgacgacgccatcgtcgactcaagcgacatcgctgacgtgtctctgtggagctactagcattgaagcagacgcgcgtcatgctcttgtacataaaagagtgacttcctaattaacagcagctgagcatgtatggccttgtatatagggtttttttttttttgatcgctgtacatttttcctacctctggaatctttgattcctatgtacggtttcctcatttcggcatgttttgagtgattgagagtgaaattataaaaaaatgtcatgcataatcaaagactagggaggaccaaaatattgcaaatgaacattgtttgtgtgtcgctacgtttcattaatagtgtagaaagccaaagttatgttttaccccgaaacggctaaaattcaccaccggtttttaactcaaatcccttaatttcaactcaaatcagggggccgttccagggttccatatttcaggctgaaaggcattgtttcggctagaataatatttttttcagttaagcaaaatttgatcatattcaactttgtttttctagtttttgttttttttttttgaaatttcaattctacccgatcccctcgaaatgttttttatttatatccctagatggttccaacgacataaaaggtaagaacataatttttattttttttatttgaaatttaaaactagaattattttgacgggatgccagcatgaacagtaaccggatgtatcgataagcagcatgaacggtcaagatcgtcttggatctgtctaggatttcccttatcattttcggcacggttaccgaaactccatagtaatatagttatcacgataaccacgagacatatcgtggttttaaaaactataaaacgattttgtaaaccctggatccatctgttgcagggtcctaagtgtgcgtgcacttcaccacacacgcacccaaaatactcttccgcttgggttgattagttcctaacaatatcaaaccaaaacgtcatttcgtgagaaatcgatggacttcgatcacagctaatacccgtgtacagtggcgaatctagaatataaattgagggggtgctagagcaaattagagatatgtcaactcgagaaatatttttgatgaaacccaaatatgcataagatcaacagaaaacacattgtttgctccattttaatttccagttacattaatatgcatctacaaaatgtatgaacaaattagtattttgtactgagagagtgtaagagtgcattatatatttgcaactttaatcaccaaactcttcagctaacatcctggcattctttacgtgcggccaattttactataaattactgattatactcactaatgactaactaaatacatgggacggagctggggcttgcgcaccaacaagcaccaacaatggattcgccgctgcccgtgtataagggtgtgtttcaggagaggagatagagaagatcggaaagatacgcaaaacgaggtgagccattagtatatgattaattgactattaagtattttaaactttaaaaatggattaatatgattttttaaagcaactttcctatagaacttttttttgcaaaaaacgtaccatttagtagttcgggaaacgtgcgcgtgaaaaacgaaacaaaactcactcacaatcacctagatcacctagtaaagaacacagcctagtcttcatcctgatcaataatgctaaacaatcagtagtacgagagatggtacacgaactgaattcgccggctactcacaatgatactactccctccgtcccacgatataaaggattttgagtttttgcttgcaacgtttgaccactcgtcttaatcaaaaaattttgaaattattatttattttatttatgacttactttattatctacagtattttaagcacaactttttgttttttatatttgcaaaaaaaatttaaataagacaagtggtcaaacgttgcaattaaaaactcaaaatcccttatattatgggacggagggagtatcatactacaacttgcctcgtacggaaataataataataataataataataataataataataataataatagtagtagtagtagtagtagtagtagtagtagtagtaatacagtacagtactagaatgagtagaatactctgctttgtccgtacacctgtggggcgcatcaatagatccagaagaggcaaaaacagcagcggcggcagcagcagaaacgcccgcccatgggtgtgtgctcaataccagaaatggcaactagcctcggatttttcccttttatgtcattgcaggctgacacgagaggtttgcatccatttgacttctttttggataataagctaaacaaaagccatgctttgctttgccttgccttgctctggaaaccgaggacaaccgaaccaacagattttggccgcgcgctggatacggctaagcaattcgattcccttgtcgacacatgcgtgtcagctccaggtttataactactcaatttgtctcaaaataaacgaatttctatagtttagaatttatcctaaaataaactaatttctatcgttttacctatcagtaaagcgagaaaattttattactttattcctttcaaaaaaaatattactttaacatcctttgcttatccatcaatcaatataatttttacatcaattaagagcattgtgatatattgtttctcaccttaaaattttcctgagatattagggtttgggtaatttgggtacagatagtactctgttgcaccaatctgatgttgtattattgttactttgtgtttccagtgagcacgacacgagatcgatcaaccgacctgcgacgagaaattgctacgacattttcttcccctcgaagatatccatgtgtatgtcaatgtcacgtgatatgtcttgtgttgctgctacaatcatcatcatcatcacgtccgtcatgatggcgcaatcaaactaacaccgctttacgctttcgccgcctggattaatttctcctcttctcttcctcccgtttataataattctctgtttaaaattaaaagccctccaaaatccaccatttttcccgcgtcgcagccaccttacaatacgcagccatacctatatatacaagctttccccgtcgccgccgccgccgccaacaccaaccaactgcggcttgagacgtcgcgcgcgacatggagaagaacaccaccgccatggggcaattgatgagctcctccgcgacgacggcggcgacggcgacggggccggcgtcgccgaagcggccggcggggcggaccaagttccaggagacgaggcacccggtgttccgcggggtgcggcggcgcgggcgcgcggggcggtgggtgtgcgaggtgcgcgtcccgggcagccgcggcgaccgcctgtgggtcggcacgttcgacaccgccgaggaggccgcgcgcgcgcacgacgccgccatgctcgccctgtgcggggcctccgccagcctcaacttcgccgactccgcctggctgctccacgtcccccgcgcccccgtcgcctccggccatgaccagctgcccgacgtgcagcgcgccgccagcgaggccgtcgccgagttccagcgccggggaagtactgccgccactgccaccgccacctccggcgacgccgcatccaccgctcctccgtcgtcgtcgcccgttctgtcacccaacgacgacaatgcctcgtcggcgtccactcctgcggtggcggcggcgttggaccacggcgacatgttcggtggcatgcgcaccgatctgtacttcgcgagcttggcgcagggtctgctcatcgagccgccgccgccgccgaccaccgctgagggtttctgcgacgacgaaggatgcggcggcgctgaaatggagctgtggagctagcatcaaattaaccaaacaatcttcactagcttgttggatgtagtagtagcagttctagctagcacaagtgcagaacacaaaaggatcgtttgtgttgtgcctgcgaaaaattccccaaggaaatatttgtatgcatttcatttaatttgcatggttacaaattcctacacattctatttgctcgaatacattataaaatctatgaattgtcaaaatatcaattctttcttccataaacacaggataacacaccagaacttcaccccttttcagcaggttttactgcagtcaactaatatgaccatcacaacaaagtagccacagaagtaacgatggcgacctgatcatccaaagtcaaacacttgcacggtacctgtggccacaattagaaatagagagagatatgatgttaggatgagatctagcgttagtaacagtaattgtactcacagagttataataatttattgaactcagcttgcgatctcccatcagacggggactgatgatggtactttgccatgggaggctggaggtcggcatgacaagacggctacgtggacgcctgcggattcattcgatcagagctgataaggtaaacgctgcagacggcagcgtcgacatcagcgtacgtggccgccgccggccgccgtggcgcgcagcagcacaaatttgctcctacaactcagcccaaattttatatatgtcgaggacgtgatgaacaattcaacgacgattagtgtcgtcactagtcactacacgcacgatttgaaaacaaaaacggctgcggttgcaattcatcctcgtgttcattcccctggccggccatcactataaatctttttgctcatttaatctgcaaagatcacctctgacggatttgttagtacgtagaagaggaggagtcgtagatggcatcgttgtcttaggccctaagtcacacggcaaagccgccaagagcgtttgctcctctgatcgatgggttgacttcatcatctccatctgatcgccatgaaaaaaggcgattgttgtcgtgtcccgccgccgaggaaacgtgcggccaaacgtggttgttccgcgggtcacacgcgtcgcgccgcggtatagttgggcgtcggcatggcaaccgcgcaccagcagcaagttgggcgtcggcttcggctaacgacgcgcgcggacgaggaaaacccggagatctcgcggaggccgcgaccgttttatgggcttgcagcactcgacctagctggcctcctactaacctggttctctttcggcccaactattactagctccgcagagcccaatatcccatcgctgcattggacgtgacaaccgggactatgggctggataaggaataagttcacctaccatccctcaactttacgtcgagtctatatgacatccctaatccccaataccagaaatcttcactcgtcaaatgtttaaaactgtacaatcaagtcccatgacagtatatatgggtgatctcgctaacgtagcatcctactcaacaatctagacctatatgtaagtgggtaaaaaatattttgggggccacatcccttctttccaccattttcttcttctttttattttttcttctcctctttttgttcttctctttgccacaaagagaggagcggctacggcgtggcggcggtgatggcaggcgagcacacggccgacggagtggagtggtggccgggccatctgccgccggttgcgcgtcgagaagattggagaggaaaggagaagagaagagaagaaagaaaagaaaagagaaaaaaagagaagaaatatgatatgtgggcccccattttttcatctcacttacatgtggatcacatatttttttattttattgtttactaggatgcctcatcagcgaaactacccatatatactgccatgggatcttgattgcacggtttttgaacatttgaagggtgaagatttctgatattgggaatgtcatacagattcgacgtaaagttgaggggcggtaggtgaagttgttaacgttaatgagttcaaaggctagctcggtttggctcatgagttggctcattaatgaggtatatctcatttgtatcatattaattatttcaaatttaccattttatcatgtattaatataataataaacactaattaataaagtactcaataaatacgaatagttttaatgtaactaaaagacaaagtacctgttaaaaagcaccaagtttacgaaggtttggttatatcttgtactaacgagttaaacgagcagctcatgagttaaaaggctagctcagctcgactcattaagattacgagtccaagctgatccaagccgaacttgctacaagccgatccgagctgcgagtttcgatttcccccctcccacccctagtgttcaacaaccatcgaatgaattgaaacagacaatgcacacgcttagtccatgaggacagaacgttgccgccttttattcatgtagagacagacagacacggcaaccagcaaagcaagcacacatttttttgtccgatcgacatacgttccaaacccgtcacatattttgctgtcgatcgatcgatggatggatcgatctagaggttgaacatgaccttgatggcgtcgcggccacgggcgctgacctcgaacgcctcctccacgtcctcctgcgagaacccgaatcggtgggtgatgagcggcttcacgtcgatcttgccgctgcggaggaactcgatgcagagcggccacgtgtccttgtaccggaatatccccaccacgtccacctccctgatcgccgccgacgtcagcggcaccgtcatctcgttgtgccccatcccgacgaggcacaccttcccgccgccgcgcgtcgcctccagcgccgtcgccaccgtcttgctgaacccggcgcagtccaggctcacgtcgatgtccccgcccatcgccgccctgatccgttccacctcctcgccgacgtcctccgcgcgcgccgacaccctcacggcggcgtcggcgccgagggatcgggccacggagaggcggtgttcgtccacgtccacgatcacgacgcgcgtcgcgccgaacgcgcgcgccgccagcagggtgaccaggccgatcggccccgcgcccatgatcagcacccccgtctccggcccgacgtcggcgcggcggcacgcgtgcacgcccacgctcagcggctcgcacatggcgccttcctccaggctcacgttctccggcagcttgaagcacagatcaccagggtgcacgatctgagtaccacgacattgatcagaattgcatcttcttcttggagagaaatcgaaatcgagctgaattgcttgcttgcctggttggcgagggatccgtggacgggaggggtggcgaagaacttcatgtcctcgcagaggttgtagcggccgcccttgcagtgcctgcagcgccagcagctgatgccgggctcgagcgccacgcggtcgccgacggcgaggtgcgtcacgccgctgccgacctcctctatcacgccggcgcactcgtgcccgatcaccatcggctccttcaccacgaaatgcgcaatgcgcatctcctgcacgcactcaaacaacaaacatatataagccacattatctttcattctttctgtgagcgaacaacagatcaccctgaggtagtgcacgtcgctgccgcagatgcccactgccttcatccggacacggacatcataaggccctgaaaatggtcatctatctcagtgttgtttcatccaacatttttactgaatttcacactcacatttgtagccatatacagcagacgaatgcaaatgcttgacgcttataaagaaacaaatatcataaaaaacatatcaaaattcaggagctgagcttttgagactcaggcatagcatgagctgattgcatagtgaagtagtaggcgtccacatgaaacagactagcatttcataaacaggaaagggatatttcttctttctaagtgccaaaaccttagttttgtactagcaatcatcttttttcgcgaacacgcaaaagaattacacgtcaatatattagaagaatagagtttttgttacacgatgcactcagcaagtactagcaatcatctttcaggaaactggaaacgtgctactattactcaacatgctttatatattatccaagacaggataatataaaaaaaaaagggaatagtcagaactacctgggttattggacaggaaaataaactaccacaacaactgatgaaattatcagaaaaagattggaaaagaaagtatactactacacccaggggatttctgaactgagttactgctacaccaaaaattctgaactattcccaaggaatcaaattagcacaacaaccggccaattttttatctctccacgaaagaaaacatatcaacaagaagagagtagcactcccatcacagagcaaagtgaatttgtttatcaaagaacaaccaaggtcagggacaggagaggatttcacacgaaccaactggcgggagcttgaagggcatgatcttgagggtgttcttcgccaccagccacgccgccatgttctcctcctcaccggctccggccaccgccgccgccgccgcctcggctcctttccctcccttccccatcttcctcctcttcactcactcactcactcacccaaagtcacagtgtttgcagagagcaggtgatgactgatgagctagtgatgtgacgattaaatagggatgaaatggcacggatgcgtctatttttagcggaagagaacaaagagtacacggcctacgctgcgatgcttatcgccatacgtgacagacacgatgccttagcaagttgaggacgcaagaaaacgacagtggcagcgtcagatttttcttggcttcatggtcctgctcacgtaattatctttgcaatcattccaaggagagaagaaaaaaaatcagtgggaggttttagaaggagccaagcaaattgtgtgatcagaagagcgaagcactgcgctttacgattggattagacaaacagcatttggttctttcagggaaaaagatgtaacaaacatttggtatctgcttcgtgatcccaggacgcgtcacgaaatggggagagattgttaaaaatctgggtatcaaaatccacgtatatgccctgtttggaccacggtttttattgcgttccgtccacaatcagacggcaaccggtgacgacgaaagcagcttcaggcttcaccttggctgtgacgatcgatgaatcaagggcaccatgtgatcagtgtgtactacctataacctactccatccgtctaaaaaaaaaacctaggagccggaccggtggtaccagatcctccgccggtctggtccagctaaaagattgcctgtgcatgtgaacacgtaaaaaccagctggaccactcggttttctgggaaaacagcttaaaaccggtcagaaaatcggcactaaaccgctaggcaggtgctgtagtaacttagagggcaggcgcatgcgggggaaagaggagaccggcggtcagaccggaaaaaaaccaaccagagcggactatccggttttcaaatcggcactgcactaaaccgctaggcaggtgctatagtagctcagagggcaggcgcatgcgggggaaagaggagaccggcggttagaccggaaaaaaaccaatgctatagtagctcagagggcaggtgcacgcgggggaaagaggagaccggcggttagaccggaaaaaaaccaatgctatagtagctcagagggcaggcgcacgcgggggaaagaggagaccggcggttagaccggaaaaaaaccaactagagcggaccgcccggttttcaaatccagaaccagagcggaccatccggtttttatataggtaaaacggttgcacatgcatgctggggaaagaggataaaatataggtaaaatgtgtgttgggtaggatttgaacccacgatgggttgattggaagcacgagcgccaaccaccaagctatgcttgtgtttgaaatgaataaattatcaaccggtcaaaccaatgacccatcaaaccgagggcctcgccggttcaatgaccggtccggtctcaattacaatatgatccctcataatacaataaatttggactactcttcgtccagattcgttgttctatgagggatcaggttgagtttttttttgatggagggagtactcttcgtccaaattcgtcctaaatttgtactactactctaaaaaaagaaaaaaaaatcctaaatcacagacgaactgatcaaaaggcccaatcaaattgggctcttcggccagattcatcctaaatttgtactactactctaaaaaaagaaaaaaaaatcctaaatcacagacgaactgaacaaaaggcccaatcaaattgggccgtttcgatgagtttgggccagggtgcagaagtctgaagtttgctactaacggcgacatagacgtcccaatgaatagacagtgatagaagattataaataactccaataggcgataaatgaacagtgcgcaccggaaaaacattaggtagtactccctccgtttcataatgtaagaatttctagaattgttcacattatgtctagatttattaaggccccgtttagcacagctctagctcccaactccaatttacctggagcgggagttgtgccaaacggtccagattcttttttttttcggagtggagttggcagagctactcctagaaaatgaactacgggggtggagctgggtttttgctgctccacagctccactccacccaaaagacccactaccctctaatattatagtgtatttacatgaaaataccactcaactaccccttcacccttctttcctcccgttctctctcctccccccaatcttcctcccaatcccgagctagtgcggcggcgtcggcgggctgcggtggcagcaacagcgtcaacggcgacgggcagcggcagtggcgggcggcggcggctgcgggacgacgacgacgggcggtgcgcgcggccggaggctggcggcggcgggctgcggcagcggcggagagcggctgttgcgggacgaggacgggcggcgcggcggcggggccagcaggtggcggcaccccatcttcttccccatcctccgatgacggccacaaccggttgtggcggcgtctgcgtcggcagcatacggggacagtgagcatgggccgcgacgcgtcggcggtggcaggcagtggcggcggttgcgggcggtgttgtggtggccgcgactggcggcatgcggtggcgtcggcatcagctcgcgagcggcggcgtcgacaggcgactcgcgtgcgggggcatcggcagaaggcagcctgggcgacggcgcttgcgcggcggcttgggaggcggcggagatgcgtgggcctcccggctgcggcggcaacgtcaaggcggcgcctacaaagtgttcgatgaaatggtgacaaaggatgtataaatgtggagctgagtaatctagccaaacacttttttacctacctcagctcctagaggagccagctctcactggagttagagtttggagttgggaattagagttatgagctctaccaaacggggcctaacatttatataaatgtaggtaatactgaaagttttacattataaaatggagaaagtacggagtgtatgattgagttattattgtggcattaaaaaagagaggttgattagacaagaaaggaacgtttaaggtagtataaccgatcatgcacggcattactactatattatatagagctgaaattctggatgctggagtatatatgaagttggtatttggtaagttgtcggttgcctcctttcatcagatatcagcgacaggtattcttcttcttcttcttcttcttctttagcttgacctggtatggacgtcattagcccatcatggtcctaatcatggtgtacgggccaacgttaatcgcctcgtctgttcaagtgtaagattatgcagtactactactgttgtttaagcataattaataataagtgattagttaaggcaagatgtacgtatgtacgtgtaggaaaggatagtgcaggggagagcccacatggtcgatgatgacttgaaacaggattatactacatttatactatgggcagctgaaaattagtcgatgcatcgccgtcagggaagatggggatttgatcagttgatttgcagcaataattaaatatttcagtggacacggtaaaaaaaaggaagaaattaactcaacgccgacatctatatgagtatgaccaccgaattgtctacttttcacctgtgtcggtacaaaatccagccgcaatatattaccggtcgccttttcacatacagtagtcctcccttcgtactcgtataggaaatcgtttagaacaatttaagtcaagactttaggaatataaatcataaataactcttaagttgttgagtttgaaaacgtaaaaattatattaatatatttatcttgaaaaatactttcatagaaacatacctatatcacttttcaataaatatttttgtaaaaaacaagtagttaaagttgtgttttaaagatcatgtcgctgttctaaacgattttcttacgagtacggagggagtacttgtatacttgatcgccgcagtaaacatcgatcgagacgactccagtttagccatagcaattggagattgagaagcacggagcccacacggttgagagttgatgtggggggaaaccgcgtcgattcgagctagctggagaggaggattggaggatattctcgatcgtcggcgagcggcggcggcagagcgagcatggatgaattcctccgtacgtcgacgtcgttgaacaggtcgcgggcggcatggatcggtgcttttctccttttcttctcggctattgtccgccacgacgaccggctaaactccatcactgtcccacatggcaaatgcccattggagctcctctcctcagatgacacatattctagtttctgacgagatgtgagcctgtggcgatccttggagtcacgtctgttttaatcttaacctcaattttttaggcaaaacaaaaaacaaaaattatataaaaaaattaagtctaaaagtctgttagaatttatcttttttaatttacctatatatatatatacatatatatatatatgatgaattacacgtagatgtaatattattgagagtacatatatattttttctagaattttcgatgaaatttgttagttggtgtgtatgatgtgtacacgtgaaaacttttatgcataggatatgattccattaaagttaatattaaaaaattatgacaaagaaaaacctttaaattaaattttggttgcgctgataagctgaccaacaacaacagaacggtatgcattcatacaaatatcaaatgtcggccaacccttatcttaggacccactgtcatggcttcaccgatgctatggtgcagccccggtcatcggatgaaaaaaaaaacagggggcttaaaataagggattatctatatcatatttaaaaattaagaccaccaagtctacttttcaaatggctcatatcggtttgatatatatgcagcctcatgcctccaccttatcccctccctctcctcgctcaaatcggcatgctcgttgccaaaccccttgttcatcgcgctacactagtgagccctcccattcctcctccccatctccagtggcttatgtaaccgccgctctcgtctcctaacctctcccgttccctcgcctccgtccacctctcgtatccatcacccataccaatttggtcactgctatgggtcatgacccaattacccaatcccaatctcaaacgccaattaattcattcataggttctcaacgtcaacgaggatcactctatagttaaaaggagaagggtccgagtgagttttgatgcggatacaatgatccagttttcattttttttaaaaaaatatacatcaaaatttcttagcattttcattttttttaaaaaaagggtcaatgagcagccgagctgaagcaagaaaggcaggtcaaacacaaacaccagtacatcactctgaccgcccggcacacggcgctttcaatcacccccactccacactcgtttccaaccatctttccacagatgaggaggccttttgccaccatcaccccctcatctcacatggcactagcactgtgctaatgcgatgagtgcatccatcaaacacacagcagcaagcagtggccgtcttgtcttgtggcatctgttgtttggccttcgattccgtaatggcatcgtcaccttgcaattgcaagcttgcaaacatttccccgggggttgaaatggtcagagcaattgcaacctacagcctcccaaagttggggtcccccccccccctcctactacctccctgcctggctgcctcccaagttgctgtcaacaatttactctgaataattgtgtccttttttcggtgtctgattctatttgttcttgggtaagtagtgaatcggttgcgatcgcagaaagacctagcggtgatatggaaatttaccgacatcagtaagaccgcgtcgatgtctaaaacgataacgttgttaggctgcgttcgagaaggtaactttcctatcctttttcgccacacacaagatgagaatagttattagcatatgattaattggtattaactattataaatttaaaaatatatatttttgatttttttaaaaaaaactccttgataaagcttttttacataaaacggtatggtttagtagttcagaaagcgagaacggtgagttggtaaaaataaatcgggagactgagccgaaattcagtatggaattcacatacataaacactcaataggagtagaaattgggccggtcagcgccggcagcgcaaataggggagccatatggagtacaagacaaggcgtgaatgctggggaagacgagcaacttgatttggtttctgaccaaattaagagaatatctggaggttgggggctttcacacctaatattaaaaaaaacatgttcttttcttcacctttttaaacaaaaaaatcccctttccctatataaataagtaaaaccctatcctgttcctatatgatcatcttgtcagtcagcaggatgccattgactggattgtagtataacaagatggatgatgcatatcagcatttgcatcaccttcatcaatcctctgcttggtatgttgctgtcactccctgtgagcctgtggccaactgaatgaaaaaaaaaaggaaaaaaaaacaagcctttttcccagcagcaggacagccactggcgcgcacatcgatccatcgatcaccacttcaccaccaagagccgagcaaaaaagctagccggagaagaaaaccaggaggcggcggcggcggcggccggcgacgagggagaagcagtcgcatgcggccactcggcggccatccggtcgctctcgccgtgacagcagcagcagcaattgcaactcgccgagctcatccaagacaaccctatccatgaggcaaccatgctcttgctcatcaacaagtacctgtccaggagcaagaacccggcagccggcgacgacaaggagatgccaccgccgccgccgccaccgccggcgaacggagcggagcgtgagttcatgtgcatccccggctgcgtgccggtgcgcgtcaagaggggaaccacgacgacgacgacgacgacgaccacggcgaggacgtcgcggcacaatttcgtcaagtcggcggcgtcagggctgttccccggcgcgcagttcaccaaccacgagtcgctcccggcgatggaggaggcgtacgccgagttcgtcgccgcgttcccgcagtacgccgggctcgcccaggccgacgccatcagggacggcgagtaccagcacctcgaccgccacgtgtgcctcgactacaccggcatcaacctcttctcccacgcgcagatgaactcgtcggtgccgtcgacgtcggccacgccgccggcgtcgtcgtcgggcgcggcgtggcagccgccgttctttgacatcgcgtacaagtccacgagcctgcggtcgcaggtgcaatgcggggacgacgtcgcggcggcgtccgcggcgggcgggatcggcggcgccgtgacgaggcgcgtcatggcgtcgctcaacatccccgacgacgagtacgccatggtgtgcacggcgaaccggaccaccgcgttccggctgctggcggagtcctactccttccagcagcacggcaagcggctgctcaccgtgtacgactacgagagcgaggcggcgggcgcgatggcggagagcgcgcgccgccgcggtgcggaggtgatgtcggcgacgttcgcgtggccgggcatgcgcgtccacgccgccgacctccgcaagaagctgctccgcgggaggcggcgcggcggcggcggcgggcaccggagggggctcttcgtgttcccgctggtgtcgcggatgacgggggccaggtacccatacctgtggatgagcgcggcgcacgaacaagggtggcacgtcgcgctcgacgcgtgcgcgctgggcaccaaggacctcgacacgctgggcctctccctcctccgcccggacttcatcgtctgcaacttcttcaaggtgttcggcgagaacccctccggcttcgcgggcctcttcgtcaagaagtccagcctcgccgcgctggagcgctccgtcatcgcccgcagcatcggcatcgtcagcatcgtccccgcacgccgctggtcgctccacgacggctactccaccgagctcgacccggtcgccgcggcggcggacgacctcgacaccaccagctccttctccggcccactcagtggcaccctcatcgcgctcacactcaagaacgtaccggagatggacgccgcaggcgaggagaacggccactcgccggagatccgcgaggccgatccgccgccaccaccaccgccaataatggaggtggagtgcagggggctggaccacgcggacgcgctggggctgatcgccataggcaaccggctgaggtgcatcagcaactggctggtggtggcgatgcagaagctgcggcacccgcagtcggagcaggggaaggcgctggtgcgggtgtacgggccgcgggtgaagttcgagcgggggccatcgctggcgttcaacgtgttcgactggaagggggagaaggtggcgccgccgctggtgcagaagctcgccgaccgccacaacatctccctcacctgcggcttcctccgccacatctgcttctccgacaagtacgacgccgacagggccgccgtcctcgagcacatcgacggcggcggcaagaggaaggacgccgccggcgagatggggatctacgtggtgaacgcgtcgctggggttcttgaccaacttcgacgacgcctacaggttgtgggcgttcgtggccaagttcttggacgccgatttcgtggagaaggagcggtggaggtacaccgcgctcaaccagaagacggtggaggtgtagccgacatgtccatccaccttcagcttccaccattggtacacttcactgtcactgtcactgttcgccattcttttgggatcagctcgatcggctgtgcagagctgctccgtccattctttgtgtgagagaggctcgctccagtgtgttcatgattatactgtaaaatgtagtctttgcttccttagaaaaaaatatgtgcctattacttgttcgctatactgaaatcatttggttgccatctccaggatatgaattctgcatcattgtttcaaagcagaaaaagttacagctattttcttttatctgctcaagacttaactgaattttttagataagataaaaattacatcttcaacgtctgcatcataagatgcacacagccaacagttttgcaggatattactgagaacaataaagcatggggagggaattagctagtaacaatgaagcaatagagctagaggaaacaaggatactaggacctagtactactacagtactacacaaaggtttattgttcagcttaaagtaaaaacaagctgaggggcacgaggggaacaatgaattattggaagatatctagactgagcactctaagaataaatacatcaaactgagcaacaagatggctaataatgcgcgtgagctcacagcattcttggcacccaatcagtgaccgtttgcaatgccgttgcagcccttgatttttccctcggcggctttcttgtcatagaacctcctgtacatcgaatcaacttttgtaagatagaatgttcctggtggcaacaagctggtatctttgcttgtttcaaaatcttttgctccatagcggtgctccatcagcttcaatgtctcaataaacttctcaggtgaggtctattataacatgtaaaggaacaagttagcttgctgtagagaaatcacactaacgaatggactattcagagatgactacagcggagcatttcacaatcagcaaacatataatatcatggaaactacagttgcatcactttttatacgaacaaatcaactagtggtatgtagccatccttaacaaaggcaatttttaaaatgcttgaaacaattaataacacccccccccccccccaagaaaaaaaatgttgaggtaaacctatccaatagtgaccgcccttgccctttctttccctggtgacaggtttggtggtacagtatatttgcataattgcatttgaccaattctttcatcaaatagcgacgtggccataatggaaataaattccaaaaccatgtccgatcataccgcatgtatgcaacaaatgtacatcataatatgctttatcgcatggg

SEQ ID NO: 18095 - DNA, 3596 bp, Oryza sativa
actatacttactactatcatacatggcctccatgccacaatacaaactgacactacttgtataccttgggtactgtagcatttccggcaaactagctagctgcaattttaagttcacaaagacgcggccacgaaagacgtcgagtatacggtatgttattattgagttgcatgcaccaaccagttaaactcaaaagcttaagctaaagagctaaggcgggcaattcaggacatatagattgttggtatgatcaaggagtgtcagttgacgaccctgcaagatgtcctgacctcgccggcgtcgccctccttgaggtcgagctgccccatcttgagcatcccctgctggaacgcgtagaagaagtatgcctggttcatggcgaacatgttcaccagccgcttcgtctccggcgactcgaacagcgtctggtcggaggtcagcaggccccgccgctgctgcagctcgcggaagtagaccccgtcgaacacgttgctcgtccggtcgaacgtcgccgtcgcggcgtccccgccggcggcgcacgtgctgcccagcgacgacgccagcgccgcgtccagcgtcgccgcctccgtcgccacccggttcttgaagttggcgcagtgcgcccgccccagcgtgtgcccccccgacagcgccaccatgtcctgcgcggtgaacccgtgcgtcccgaacagctggatcagcgccgtcgcgttcaagaacggcggcggcagcgccaccgtgtcggccgcgctagaccgcgtcccgtccctcctccccgtcgccacgccgtagtacgggccccccgccatgatgacggcgtcgcgcgcggcgagggcgaggacgtcggcgcaggagacgacgccggggcaccgcgactcgagggcgtccttgatgcggtcgatgacctcgaagccgcggaggctcttgttggcgagcgcgtccttctcggcggtgttgtccggggtggagtcgaggaggacggaggcgtcgcagccctggacgaagcagtcatggaagtggaggcggaggaggctggcggcgagcgacgggtcgcccatcagcgcctggctcaccacgctcctcaccaccatctccgcgaacgggcagctcatcccgtagtagtccatgctcagcgccgccgctcgccgcggcgccgccgccatggccaccacctccaccatgatcagcaacctcaccagcttcttcatcatcttcgattcactcttactagcttgcgatgaagaagatgagagtgtgtgtgagagtgagtgagtgatcacatgtatgatgcggtatttatagctgaagctgaagcacatgaacgatgtcgattgatttgaattatgcacaattgattaatgtacgtagtgcacgacatggatgaatccaaaaaccagagcactaaacggtggagagatcatgttgtagcaagagtcaaaaaagctctctgtgcctctctgaagatagcggcgtatgtagtgtcactcatgcatgcaaacgcaactaactgaatgtccgaatcgtatcatattaaccatataaaattgccatcagggcaatcaatcagtcgacgaacaatcttctgaaaccattttttaatcaatatttctgtggcattggtataatttcagacgtagtacgtgggcgtcgcatctgcagctggcatccatggccagatgccatgcatcaccttggctatcgccgtacgttgccatcgcagcggcgaagtgggtcactctcgatcgattcatccactttaaaaatccctttctgaatgaacaattgcacgcgcgtgcgtgcctggaaattcagtaatctctgcattacagttctacgtatgcagcgcattgcaaatgtagtgcagaaaggtatagccagccgccatggatttcaattcactcaaactgcgcctgcgtcaccgagcattatttcagttagtagtatatgggtagatcgcatagacttttcccatactgtgcaagcgatgcaagatgtgataggcccaaggcattaagtccacaatctctagctctgaatttgtctgcatattgtactagtggttggatcactagtaggccattaccactaagctaggtagtgatatatcatactgaaaaatctgaatgctgagagagtcatcccatcaagttgtttcactcattcattgattggagtgtatatggatagtatgttttcaccatcgtgcgaaatggtgagataactctgaataataatcttacatgtggttgatgtttagttgaccttgtaaggactaaggacggaaatattagtatttgcaatgtggacgtaataatgcatggagatgagtttatcacactaggaatatatgttgatgaacttatgaattataaaattaactgttaatgttctgtatatgtagttgtttaatcactacaattaagctagtgatactgaaaaatctgaatgctgccgagttacccctttctcttgtttcactgactagctcctgatgcatcatatgtacttaattatgcgagctcccccggtgacatttcaggaaaaaaaaaagagtaaaatgtattggcagttcttaaatttgtagggttgtgttatatatatctctaaactctcaaaatacatatccatgtcctaaaacttgccaaagtgtatcatctaggtcccaaatcgacacatcccctctggtattctacgtggcgctgatgtggcatactacatggacgtgacgtgtccttttctttttttttcttcttttcatttatttttctttttcgttttcttctcattcttctttttttcctttcttctgctcgggtcacagagaaaggagaagaaaggggaaaaggagaaaaaaagaaaaagaataattttaaatgggtcccattaatttgtcagtcaaaatgatgccacgtcatgtccgtgtggcatgccacattaatgctacgtaggatcctgaaagagttgtggcaatttggaaactagatgataaactatgacaagttctataacttagatatgcattttgagagtttagggatctaggtgacacacctctacaagtttaagaaccgtccgtacactttactcaaaaaaaaaaagtatgcaatctgaaacatatatgatgtttgagcatcgtgcgaaatctgaatgacaggttgtttcatagctttgtactatgaattgaaacctgaagaaacctatatgtttcactgaactagctcctgcatattagtagcatatgtatgcactaacgcagaggataaaattaggcaacactactttataagaaaaagggattgcttgtcaaaatagtggctgtcactccagaccaattagccatgagcccatgacattactgacatttcggagatggatttgttttgcgcatgttgtctagtaagtcatcaaaactttgaaaaaaaaattaacttatacaaatatgtaagttaaatttgaacctacatatttgtgcagtgatatactacctccgttttttaatagatgacgccgttgactttttctcacatgtctgaccatttgtcttattcaaaaattttatgcaaatgtataagatataaatcacacttaaagtacta

SEQ ID NO: 18096 - DNA, 14314 bp, Oryza sativa
ttaaaaaagggagggagtatcacatattaaactattttgttaatttattttaaaaaataaataactttttaggtgacatataaaaacaagtagcgcagataaactccttagactccacatgctatatcataaaagcagaggtcaataggctcagacgcatagttagcaacgcaaattggaaggaaaatgctttgtacatgccattttttatagtaatccctccgtcccaaaataagtgtagttttagcactgttcatatctaacatttgaccgtttgtcttatttgaaaaaaattatgattaatatttttattgctattatatgataaaacatgagtagtactttatgtgggactaatttttttaatttttttataaattttttcaaataagatggacggtcaaaacgctaaacacggatatctatggctgcacttattttaggacagatgcagtaattcacactgcaagttttctgatgccttattacaaccaggaatcacgcatgacagagttgagtagatattttatacacctaggtagtttaaacaattatataaaagattcataaaaattaataagagagattatgataatataagacactatataaacatgcaagtctaaattcaatttaatatgaagaaataaaaaacaacaattttctttataggtactattcactatatgattttattatttttatttctctaattgtagataaatatagtcttgcatgtttgtatgtagacttatatcatgatgttaatttttttttaaaaaaattatctataactatttgagtcgcgtcaaatgatggatgctatggtatctagtgcagaaaatccatatccagagtcgagtaaacaaaaagagagaaatacttagtagcaagtagcaacaaccatttcaatagttttgctcatgcataagcatgatccagttagcttattgctaactaggagtacttgtgatctacagtatcaactaatttcctgccatttagcatgacagggttgaaggaacaaaaataaatagctgatcaaatatacttgtagcatcagctcagtggcttaattagctgaaggtgagcacactctcatgcatgctgtcatcgatcatgcatgatcatcgatatctaattcgtttattgctattgatggtttgatggatcgattcagagggcggcgaggcggcggacgttgatgggggagacgacgtcggcgccgccgtagaaagcctccctggcgatgagcacgttgaccgccgccgtcgggtggaaggcgtcccagaacacgtagcggtcgcggccgtcgcacggcggcatgaacgggaggcacgtcacctggccggcgttcctcccgatgccgcagcatccgcggtccaccacggcgaacccgtgcgccgccgggtcgccgaggatggccttgaacacgccgtagttgtccaggaacaccaggctcgcgccggggaggccgccgccgtcgaggcggcccagcatcgccctcacgttggcgttgaacggcaccaccagcgcgtccacctccggcgagcaccggctctccacgctctgcgccagcacgttcgggatgcaccccatcgaccccactccggccaccacaaacttcctcgccccggccttgtacagcctctgcatccattattgaggacattgataagctcgaagatgatcgatcaatggcggcggcggctaattacgtacggtgagctgggcggcgtagcggtcggcgaggaggtcggcgaactggcgcggggtgtagcggcggcgggtgttgtagttgggcatgaggtagttgttgaggtagtcgttgctgcccagcccgacgaagaggatggaccgcgccaccatggacgccgccgcctccttgccgccgacggcgccggcgatctgctccaccgtggcctcgaagttgtcgatctgctggttgaacggaatccgtcccacctgcatttgcaatcaaacaacatcagttcttgatcgatcatttccttgcatgaatgatcaatccatggatcgagaggaggattgattgattggttgtgatttacgaagttcccgccgctttcgtcgaggatgccggcggcggcggaggcgaagttgacgccctgaagaagctgctgcacatgcccggacgcttgggagtatggtggcaccagtggcagcccaagcagctcagctgcaattagctcagtcagttaccattttgttctatattatgatgttttgagtttatcttaagtcaaactatttaccacttgacaaaatctatctatctatctatctattatatactaaaaatccattaaatttcctacaaacactcctaaaccgccatgtggcttatacaaacgctcttataccgctatgtggcgctctaacaaattatagaaattctaaggaaaaaataaaaatccgaccatcgattttcacttaatacggtggacccaccatttcacaccattagatatctatcttgtaacaaggaaaaaaaattcacaaaacccatccgtatcccctccatcacgtacataccgtacgtacgttccccaccttctctctctttctttccatttatttataggtagcaaattttatattaaaatattaatattaaataattagaatttcttataatatatttgattttaattattccatgtgttggagtgtgtgtgtatatgtgtgtatatatatatatatatatatatatatatatatatatatatatatatatatatatatatatatatatatatatatatatatataagaaatatatcatttgcatataaactcatatcctttatataataactaaatattaatacatatcatgcaatcgtaaatgatctaccctctctccttactcactttattatccttatttctggctagcagcttagtatataaataattaatatataattcttattatataataaagatttggtaagcagatccccataaaatatcatgcagatctatccattatacatcctttatagtgtttctagctcatcacatggcacatctaatatattataaaaagtactataaatgctgcaaaagaaacatttaatcaatgattttcatttaaatagataaacctattattttcaaccataaaatctatctatataaaacttttaaataaaaaacgtctcctccccttcctcctccttcctctcatcttacattattctggaaacatgcatatgtaaattaaaactacaatgtcaaacaaaaattagaaattcaactattaaatagtgttttgtcgagagacagcatccctgctttttttttccatgtcatccgaattgacataataaaatatgaaataattgaaaaaaaatcacatgcactcataatttatatgaaatatgccttttaccatggaatcattattttttttaccattagatttatcttaatagatagacaaaaagagaaaaggcccaatcccaaccctcctgtcctattacattatgtccgtacatatgcatgtctgcgccctcccccctcatgcacgagcacaacctcgcctcctattttccttctctcccattgtcctatttttatgcttattaattagatagaaaacatattttgtgatagcaatttctaaacaactataccacctaaactattttttttatctgtgcacctcattagattatttgcagtaaactttcatgagtcgaatccaaattaactactacttctgtcccaaaatgtaactatttttagctaaaaatgcttacattttaggacggatgtagtatatttaacaagtaaaagaaataaattactttagaccatattttggaggctagctattggtcagtcataaatatttaggaaaagccacaaagatttttaaaccatatgattaacaacatgttgcttacattataacaatgtgaaacacttttaagtagttagataacacatttgtggaaaataacaaataccgacgaagaatatttgtggagaaaacatactttgaagtatgacagtgctatccggttaatattatgttcttataagtttttgaaacacgcagaccacaatagatgcccgcgcgaatgcgtattaggaaatagttataacccctcaagccgccacgtggcatcctaaaaatactcccgagtcgccatgtgacattctaataaaatagagaaatctgaccatcgattttcacttaaacaggtgggcccattattttagatcgttagattatctttaaagaaaaaaaaaccctaccgtccctacctccgtgcaggatgcgtattgtacgctccctatcaccccttcttttttttttctctttgtttctttcttctttttttatctttatgaaaaaaaatccctacaaatagacatcatacgagtaagtccattaaacttcttagaaacgcttttaagccaccatgtggctcctacaaacgctcttgagccgccacgtggcgttctgataaattagagaaatataagaaattccaagaaaaaaaaagaaaaacatcgtaccatttattttctctttacacaccattagatctatatatgtaaaaaacaaatgtcacgtacgtccacacctctccctaggtccctcatctcctaacatgtacgtacatccaaagtacgtatgtctccccacccctctcttcatccttccatttatggtagcaaaattttgtatataaaaaccacaacaactaaatatttagaatatcttataatatattcgattttaatttgaactatgtttaccatattttggtatgtacatatataagaaacatatcatttgacataaacccctttatcgcaactaaatagtaataaaacattacaaaaagtaacatatatcatgccatcgtaaatgatctcctattatctctcatgctcactttcttatccatattttctagcgagcagttcagtacataaagaaccaacaaatgctatattaactatctattatatacttaaaaattcattaaactccctacagatcctcttaaactgtcatatggttttctataaacactcatgagatgccatgtagtgctcaaataaattaaaagttcctagaaattatgataaaaaaatcaaaccattgattttcctttaaatatgtagatccaataattataactgctacatctcacaaaaataaatcctatacccccacctccatccctaccgtatgtgagcatgcatgtacgtacgtacctccaccgtcctactcatctccgggatccaattctcatatcctatttttaagataacttttcctattttctacctagcacataatatatagaaaaataataatagctaaatgatcatgactctcaagttacatgtacttttctcagtttatttgactttttgtgttatttataattaaattcaagacccatattgcacatatttactatatataagttagataatactgctattctgactacaaatatttgagcaaaatagcacttcgaaaatgatgaatgaattcaaatgtgtgggtctaaagtccaagttcaatcaccaccaaagaagcttggaaccagaatgcacactctgggcctgaacccgatgaaggcggagctacaagacattattagcgaggtggacactgacggcagcggcatcatcgacttctacaagttcctggacctaatagcgcactaaatgattagatgaaggacaaggactaagaggaggggagcagagggagacgttccatgtcttcgacaaggactagaaaacagcttcatatttgccactgagccccgccacgtcatgtccaatgtatcaagagaggataactgatgaggaggtcaaaaatgatccgcgatgctgatggtgacaggcggatcaccacaaggagtttgtaattaaattcagaacaaaaatataaaacaagcaatttgattaaaatacacaaacaaaaaataaaaaacactaaaactataaaaaaaaacaagattccatgtagaatataaaatatcaagagtccctataaaagtataagttataaatatctaaaatttggaataataaaataagtattaaaagaagagatcaaatacaacacgagatgagattaagcgcaatttaaaatccctaaaaatacaatttagaataaagtaatttgatttgaatacaaagtcgaattaagaatcactcaatcactaaattcagaatacaataaatattttttaaagaatttttctatctttattgattcacatgcataacaaaatgcatatatatgaagcaattaaagagagggctagcagaatggtaaaaatatatatttattaccaatgaaagtttgtcgagatttcttcacgaaaaaaagatataataaatactcaattaacagtagagaatacattactttaattttttattttttagaactattttcggtacaaactaatacgcatgcccgcgcgaatgcgcgggctatcttcctagtttatagaaaaatatatcgatatttcaaacaaatatactatagataatttaagtattttctacacctggatgctatggcacctaggtgtatgcacgtagtttaaacaattatataaaaattttataaaatttgataagatagactatgataatataatatactatacaaacatgcaaggttaaatttgatctacatatgaaaaacaaaaacaacaaattttatccgcattgtacgggattcaatggtggatgttgctaagttatttacaaaattggccaaatttaaatgtaagaatgtttgacttagaaaggtaattagtaacacgtgagctagtaaatcaacaaaactaaactgataactcagcctttgtactactagtatttagtacaaatgaaattgtcagccaaatgaatcctatatatacatatatgcatcattgttttgttcagttcattcactgaaccattgctgacttgtgcgcatgtgcgcaggtcgctagctagccagttcattcagtgtcttgcagtcgagtatgaggtactggagatgaatcacgaaattttgcaagctccaaacaggaaatgccaactgttgcaattgcaatgttactgctacttctgcagatctggtctgcgaggaggaggagataactacatcgtggtacgtttcataaatgcgagtatgtaatgtgctccatttctgtggctctgttggtagtaaattgtgctctgcctaggatgttggatctgtgttcaacgctcggtgagaagatataggctggtcaacatgtacagcaacatcaccaatgttcatcacaatcaaacatgtgggctaattaatcacaagtcagtaagcagcctaatcaacaagcagaaaaaaaacacgcctaaaacctgaactctgttcgctcaaaaagatcaaaaaaaaaaagagaagcaacctgaactctgaaactcttgctagaaatctagaatggcgttcaaaaatcttcagattgcattgcaacatggttcaaacacaaatccattttcagcttagcttaaaaaaagaagagtaaattgcactttggtccaccttttattacccaagtttctatttggaccacccttaaacctatatttttaatttggaccaggtaaatttaccattattgcggtttggactactatgaacaacttttctcgtcatgtctaacttccctttcggcaaacatatgaaccacacatagaggagttcggccgtatattagagctaatgtgtttaaggtcgttgattgtacttaaaaaaaatcattcgtggtggttcaaatcacaacaatggtaaaatttatccggtccaaagtgaaaagatttgtttaagggtggtttaaagtgaaacttaagtaataaaatgtggtacaaagctttattcactccaaaaagaaatcgatatgcaatacactgtctgacagtggtgaacggtgactagcagatgcagtttgtgacaggggcggatctaaagtatagtcatcggtgtcaggtgacaccaacgactttcggcaaaacctatagcaaaactaattatctatatattataacatcatattctaaaatataattagtatactatgacatcgataaacacgttatgacaccaataaattaattttctatatccgccaatggtttgtgaggtaatgaacataccgagctcgtcgacgatggtgtagccgttgcagaagcggccggttgggccggcggcgaagtcgatgccgtaggggtagtagttcgccttggcgaacgacgccaggttgttgttgttcccgttgtcgatcagcgagtcgccgaacacgaacagcgccggcaccatcgctgctttccctgtcgacgccgccgcctcctcgctgccgccgccctccgccaccacgacgaataccgcgccgacgacgaccaccgcgcagagaacgaccatcgacgccggcgccggacgcagcgtagccatcagcatttggaagcgaaacgcaacactgtgcaggtgggtgcagtaggctgagttaatataaagcagggtgggttcgctgcatttactccattttaacaaacttaggcttagtttcaaatactacattactaagcaaattctggttacggattatctatttaattataaatataaattaaatattttggtaaataaacctaatagatagatttaataagcaacacaataataataagcaacacaataattcttcatgtgagaaaatatagagtaaattgcgtccacggtacataaacttagtaggtgggtgcgatctagtgtaacaacttgaaaaatgattattctggttagtacgtgcattctggtttaaaaaaacaatattagacaccacaccttttaagccacgtagtaaaaaaaaatcgtcgttgccaataatctaataaggataatgattgtcaaataataatggtctagatgtattgtatttgcttgcttacaataataaataacatgtcgattcgaaaccgaaaatatcgttaaaactaagtgcataaaaattgttgtaacatagtttccgaacgattctactactcaaatatattcaattgtactcatcaccaataattataatagaacaaacaaaataggttgaatcatatgtatgtaacaacgttttttaccaaaatgcacttaattgctaagtttatgtaccggtctatatattttttaagttgttgcactaaatcgcaacccatggtagttcttatactactgattcaatttactcgtgaaaatgtatttcttgaagcgtgaagtaaataatatctgtttaacaatccgatgaataatttgaaaataacctagcctgacttgccccaaatctgaatttacttcgaggagtaaatgcgctgccgtgccatagacatactgtcatattgccactgtgattggcgtgtcatcgaccgtggattgtgaaagtgcttcttcaatcgtgtaaacggaggcacatcttttctacgttaagacttagattttatttttggttaacacgtttttcaaattactgaacaatgttttttacgaaaaccttttatataaaagttgctttaaaatattaaatatattgacttgttaaatttataataattaaaacttaattagtcatgtgctagttaataagtttctcgttttacgtacgccaacataatcttcatattcaccagatgagcccagacatgtaaaagtggactccctctcttgcatgtcttttaggctgttttcttaagtccacttttccaacttcaactcacctgtttttcgcgcgcacgttccccaaacttctagacaatactccatccgtccaacaatatagcaatatagtaccagataggacacttcatagtacaataaatttggatatagtttctatccagattcattgtatcatgaagtatcatatcaggtactaggttactatattatgggacagaggggtatgtttttttttaaaaaaacatttatataggaaaattgctttcaaaattcatataaattcattttaaaagtttttaatctaatacttaattaatcatgcgataatatgtcgctacattttgcgttcccgaggaagaagctcccaaccataagacaagaacacagcctatgtatggatgagatttggcttgccctatcaaaacacgcctgatctaaggtgctttggtttactaccttcattttttaatatatgacactattgatttttttaatcatgtttgatcatttgtcttattcaaaaaatttaagtaaatatcttttcttttattgtggcttgatttatcactaaaggaactttaagcgttacttatattttaagatttgcacaaaatttttgataagatgaatgatcaaatataatgtaaaatgttaatgatgtcatatattaaaaatagaagggagtatctttttttgggaaaaaccgtccggtctttcaaaggaactgagccagacaccggttcctgttgaatcatcggtccggtctggttttctagctgtggtgggccctgaccaaccatgccggcccatattgagttccactgcaatttgggccaattgaggcccaaagtgagaaggcccattagtgactgctcctagtcgtcccctccccttcctcctcgtctccaggtagaagccaaacgcgaggcgaaaccaccacacctcaccgtcgaatcgaatccaaggcggcggcggcggcggcggcggcggcggcgatggggatccacgagcacgtcgaggggatcaaggcgcactgggcgaagaacttctccttcctcgactacttcaagaaggtctacggccgggacaagcccctccccaagtggaccgatgccgacgtcgacgagttcatcgcctccgatcccgtctacggcccgcaggtcaccctcctcctcctccttcccgcacaatccgtctcctgctcgtccggccgcccgtctaaccacgcgaattttcccgatcccccctgtgtttttgcagctcaaggcgatgagggaatccaggaagttcgcgctcggcggggctctcgtcggcggcgcgcacctcggcggcatcgccctcaagtactccaaggccccgcacggtatcaccaccaatcgcgacctatctagtaatttcaacttgcgctgtgattgcgcgtgcatccggtgcctgatttggttgggctgcaggtgtcgtcctggccaccggcttcggggcgatctgcggcgccgtcgtcggatcggaggtggcggagcactggtaccagctctacaagacggacaagcagggggccaacctaaggttcatctactggtgggaggacaaggtcgcaggtatcataccaccttcttcgtctcttgttcttctcattctcatgtgctttacttgctctaattcgatcaggccatttcctttgcaagtgaacactacatcacaatgatgattccggtagttgatttccgatgtaaaatttgtagtaattatgaggtatcaatattgtgcccctttagtgaattgggaatattagtttgcaatcatgagatggtctataatacagttggaatgggctaggaatatcgagtcgtgaatgcgaggtgtcgactctatgctgtttgagtaacttagaaacgtttgaagaatacaacgaagttgtgtgtcagtttttggtcgtggacagttgttaacacaactgatcaggataaagggactgcatgatgttgttccattgagctagcaagtaaatgcatcgcatttgaaggcctccttctaaccgtgttcgattttctttttgggtgcttttgtgaacaggaaaccagaaaagttgagtggtgtctatctggtccagcagcttggcaagagtgatgtccccccgctgggatttttagttgctcattcctagtatttccaaataaggtgtgtattggttgtgacgattacgcagatggagtatgtttccttttgctagtaccgtgagctctgtctgttcacagcctgaacaacaacttttgtgctctgaatggttcacaaactaaatgctgatctttaccggtatctgttgatctttgtccattaaagattactttgcatattgtaagtactgctttaccttgaagataataaggctacataacgtaaccaattcccccctgttagtctttctcaatggatcataattcctaagtgatcattggtgtctcctatgggatctcattcctagtagttttcaaatgaagtgtgcgtggttgtattttgcaattatgcagacgtagtgtgcttccatttgctactactgtgagctctatctgttcacagcctaaaacaactttgcacgaatgattaaattgcatctcggaagtactactctattttaaagataataaaggcttcataatgtgatcaaacttgtttttttctcctgttagtctatctcaacgcatcctaagtgatcatcggttatgagggcctaaacttttgacgttgtagttacttccaatgcatcaatgatcttgattccaatgaaggtcgaccattaatgtatgatgatatagcgctggaattgccatttcttgcatggtatttaaaatgcatatatttttcttccattcttttactaccatgtatggtgctatcatggcattgtgctgcatcctgagcaatgttgtgtaaacatcaacatttcatatgtacatgttgccaaaggactcgagtagttcattttctgatcttggttgtaggtcttcttttattttctgtaccatacttactgttagagttaatttttgtgtaatatgggtggagagcgctggaaaggtgatataagcattgagtttcagcgcaatttgacagtgttaatagttttcctagcatgacctcatcactttgatatttacagttattatttgcacatagattttgtgagcttaaacctggcaaactgaaaccatatatttagatagattttgcgagcttaaacttggcaaactgaaaccagatatttaggtagattttgcaagcttaaacttgtaaactgaaatccgataaaaaaatgcttaattctacaaatgtaataaacgttccaggaaacaatagtctcaattacttgaaatggttcaacaacagagctcctcaagagttctttagggaaaaacaaagcaccacagcccaagacaaatacaatactaaaagacacttcctgcgggaacttgtctaaataaggtacatcagaatagcaaagcaaacagcaacacaagcattattaaccatattacacactagtaatgaacacaagtatcccccaggccattattagtgttagaaggaatagcccatctccgagcccctacaagtagaatagccactcagtatagtcagtgggttagtgatctcttctaacagtgggactgtactaaaatgcccattctgttgatctgctaccatcatgcctacgtcgatcagaccattctgttctactatctgcaagcaaaagcacatatctgacatcagtttacggcacgctgcaacattttatcttcatttttaaaactggcaagtgcacagttctatgtcaatggactgccagtaccttttcttggagaatttcgttagcagctttcaacatgccttcctgcacgattagagataaactatgcttttagttagttattaatcattttattggatatttatagagttaaacaagatagtttggcttgccttgctctttagtgcttggatctcttggatcattatctgcatctgttagattaaagattttagatctcttgaacaatttgttctttatgaaatctgaagactttcaatgagttacctttgcggagcgaatgttgtacatccatatctctaagtacctctctagggcattcagctcttcaacagtcatgtgttcatttgccctgttcccatagatgtacctgccatgggttttaattttgtcaagagttaagtgtctgaactcattataatgtaaataatatatgatgtattcttattacatcaatttctcgagtaaacagttcggtttggtgaatgaagctcttttacttagtgtgagttcaacaatttttttgtaacacttccatgtatggttatgttacttgcagtgatctagtgaatgatactgagtgtggaccaagtctggatagcattgcatacttgttgcgatgtgaacttactaattggacatagaaagctatgtttgtttatgaaatcaaacttggatatttttgctggaagattgtatgattttatctattttttcttctagaa

SEQ ID NO: 18097 - DNA, 4978 bp, Oryza sativa
tattgctgagatgtacatgttttatagatagcaccttactttaccattgcgggtgctcttataatattgaaattataattagtatgtacttgattaacatatttatcatttggacatttggtcttggtctatttaatgtgttgacgatacattcctgggtgtgtacatgtatgtgttccactgtaatcaaaataagacaaaacgaaaaggtgacactgaaaatttacacatacgcactcgcgggtgtatgctggtgtttggttttaaacggctgaggcaacccggattaaacaaccctaataatatggaggctactgtcaaactggataattttcgccaggccatcgtcaaactagattgtgtttttaggccaacggcctgacgtcctgattttatagaatgcaactaaattcaaacattagactcaaaacaatactatccaagaagaaaagcattagactcaaactgcattgttgacatgaggatttcaaactttgttgcaatatttgactcttttggtccctttgcaatggagcatagtgccggtcaaatagtaactctatgtatatggagacgcacttgatagtgcagtggtaaggggacgtgtggtttcaacaccgagattccgtgtcaatctccaacatattcataaatttcttctttaaaaagtattcgaagggacgtcttttccttcaaatctcgattttaataattatatgtatatgacaaaataattttaactaaagaaagagggttcctcccatcctttagaggcatatacctccctatatattatttaagagcaaaaaaaaaccggttgaactgataaacaattttatgataggagaaaatctcgttctgtgcatggttctctcaccccgtcacccgaggtgtatacctcccaatatttgagagaaaaaatattaaaccgattaaactgattattaaaaaaataagtttataattggcaatgagctatagacttttctgggatccacaaggtatatatagggatatataccttctggctaatacaaatatctatacctcttaaaaaattatatacaaaaagggctctcaatactattctaatttaagtttagttttgatatctactttttatagctatgtatatcttgattatgacgaagtgtatacctctcccagataagagagaacgacttgtagttgtttggcacaaatccaccttagcaacttccccatttgctaattaaaaagagtatgacctacatatgacgacaattaatcgacgtaagtttaggggaatcataaaaagtaaaaaagtaaagtacaaattcatacagtaaactaggttttttcaatgacgtaaaacatatttttctccctatatgttccatatagtctatcatggttagcatagtcaacacacgcacttgattaacttacagtaaaggtaagccggccgccaaatgaatctagctaggcctcaatagccaaatttcccaacacaatatatatcttgtgtggagctagattttaaaaaacaaaattaaatttcacatacaactatataattctctttctaaaatacaattttattttctatataattgtgctgaattcggaaccaccatgattaaataatgctcatgtttatccggttctctgacaaacgtggccttctaagccttccggacaaaatgtggttgctcattatataaaaggcatatcttgagagggcaccaaggattaagaagagtatataaaccaaggcaaaattgagttaaaattaacatactgtccctatttgaatacattggaaatagagaagagtagttagtgagatgtgttttaggaggagactatacaataaatagggacacaaggaaaatgtcacgccccgaactagtaccgaccggaactagcccgtgacgctccaaattaacctgttagtcgataccagtcccaggaaacagtgctggtatcacaggaagacggattatcacagcaacagaggtctctttattatagagtagaggtacagtcatgttgggctgcggacagatcccgagctcacaactgcattacaaaagggaaacggaagccaggactaggaccaaacaacacaggcgcgacttgggaactaggccgaaaccctaaaactcatcgtagccggcttgctcctggaagaactcctcatcagcaggatccgcttcatcttcttcagcaactgggggaggattatttatatagagcaagggtgagtacgggagtactcagcaagccaagggaaaataagtgtttaatgcaggcttcaaggaaaggctgttgtttttgcaattgattttatttgaactcctttctgaaaacaactaagtgagtgcttctcaaacgacacggatgagacagtgcgtctcgtccgatcggagtatgtgcaatgtatcagtctttagaattgaatcaaggttggcacccggccaacagcttttcaaacggccacccgggccaacagcttttcaaacggccacccgggccaacaactttcaaacagccacccgtgcctagctgatcccgtcagctgcagattttcaaacatcgaacccctttccacaacagcaatttcacaagcagtagtcaaacaaaactacgctaggaatcacctcacatccgcccatgaccgtgggcacggctgttcgaacagtttgttaacctctgcagagggggtacactttacccacacgacattactaacccggatcacccagcccgtggggatcagccacatcgggagacctccaagctttcatgacaaggcatttccaaagccgacacaggtttaccatataccgacgagaggggtcccagatcaacaacaggttaggtcccagaccatactgtgccaggaagcccaggggtcctccccgacaccaccccggcgaatccacatgtctctcggcatcaaggctcccctgataagctagttactcagccaggggtgtcccattccacccatgtggtcgtatttgtcttatgtttggatgaaattccaaggaaacggtccttaagtgcaagagcgggaaaccgtacacccggtacgttccccggtccgcggttttggaaattcatttagttcgcaagcaccgacccaggtgtcgggttttccaagtcttttgcaaaacccaagttttacccaagtttttttttcagattttaagtttgaaggcgtccgtcgatactcgcacagggtgcacgaatatcgagacgcaactagatggttacaaggggacatgatataacaattaacaaagaaaggatcaaatgcaacaaattaggtaggtccgccaatctgccttgcagacgggacaaacagattaagtgcgatcctatcaatgcataatatttttcaagcaacataattaaatttcaaatataggctcaagatgttcaaaggtggcttgccttgctcgagatctggagcttgatcctcgaaatcctcgcactgcgggtcttcgggctccgaaactacacgcgaaacgggataactcaacaaacggcaaaaataaagccctattaacgacctctaagcgtgccattagatagatctcgatatttgaggaattttggaagttgaacggagtcaaacggatttacggttgggaagatattgaatttctaagattattggatttttggtctaaatgaaaaaggatttatttaaatcctttttgaaaaagaaaaagaaaagaaaagaaggagagagggaaatcagacttccatcgggcggctagggcgcggcccgagagaaaggggcggctcggccgagctaaatgggccggccggcccaagaaggcggcccaaagcgcgcgcgcgggcggagaggagagagggagccggtggaccgagtccatctcgcgtggtcccgggtgggacccgcttgtcagcagctcggctcaccgtgcggagggagcacgcggcgtggcgctagggtgtggagcggggcgcgatgcatgcgtggttcgcggtggacgcggatgcggcgggcccacgcgcagcctcacggctcgcggtggaacacgcgcacggggaggggctgaccggggtcggctcgacccggtcttggccgagctggcgccgacgtggcgcctacgtggctgccacgcgggccggcgggaggtagacgacgatgtcggccggaacggacggcggacggcggctgcgaaaggcggggcgaaccacggcgattcaggcgaaagcgagcacactgggtggttgcacaggacaaggggagacgagccaacggctcggattcgccggagggagcttgacggcggcgaatcgcggcggcggcaaccggcggcgggagaagggggaaatggcgacgaggtcacgaggggccgattcccggcggcgagagcatctacgcggctacgggaatccgatgctagcgttggattaggaggaaacgcatcgagggaggccggcgacgagaggcgcttccgagctcgggcggcgacggcggcgagcacatggcgagcggcggcaacggtcggggcggcgccggctagctacgaggaggctactcgtgctactacccgagtctaaggggaggagatggaacgaggaggaagaacgggggaaggcactcccgtgcgggcgggcgcagtgacgagaggccgacggcgcgggagtgatctctccggcctcgggccgaggaagaggaaggagagggcgcgcccgaagtccccttccgtgtccttgctcgtgccggctcctccgacatgcgcaacgacgaacggcgacggcgaacagagcacgggaggcggcggcaatggcgtggaggcgaatgggagaggaaaggaaagggggaggcttgggtttataggggcggcaatgtcggtttgggacccgacttagggtggtcaaaggagagggctagcgctcggcggtcgcggccaaagcggcgacagggaggagggaggaggatgacgccggcggg

SEQ ID NO: 18098 - DNA, 7637 bp, Oryza sativa
  unsure (1)..(7637): unsure at all n locations
catgttttctcgcacgtttttttgcttgtttttttcgaatgttcttttttgccttttttcgatacaggagaatatatgacgaaataaaaccatgtagtagatggcaaaaaaatcgatggatcctatccaactcaagcgtccattaatttagcttttttctgacagttttttcagagcgatttgtttttcaatagatggtgttttttttcttgcgcgattttgccatttatatgaatcagattttttttccgttcggatctacagtttttttcgccacttaggggaaaaagacttttgttgttgctgtttttctttattttcttttttgtacggcttttctttttctttttatgcccctttctaattttgttctctctcttttattatttttttaacaaaaacgacctcaagtatcttattgcaagattatagggactcaaatgtaaatataaaaattacagggacttaaatgcaaaagtacagacccaaaaattaaaatcaaataaaaatggaatgctctcgacttgtatgttccgtttttgcaaacagatctccaatccgacacatcaattttttttcaccaattagagtcggacttttttttcccttctaagagggaatcggatataggagttggactttttaattttttcgctatttttttacggacgaaggaagcatctcttattttttaagtagtagagatatcaacatttttttcctgtcctatatattatataggaatgttttccgaaactatgtttatcatttaaagaaaatgctatacatacttttaaatatttattaaaatgtctatgtacaacaaacttacgaatattataatcacacaacaaatttctatacttccaacaatatagtttacgaatttctacatatccctcatgtattgaagggtaaaactgacttttctatacctattaaacggtcaactaacagacaattgatggcaagggtatggaagggatccaaatcaaaattcagaggntatacaagggagtgaagaaaattcaggggcatagaagagatcagctaaaatttcaagggtatggaaggaattttctcgctgatataactatatggagtatatggagtagtttgtagccactagcaattattaaaatctaaaactcaacacgtaaacatatcaactcaccattcactagcaatttctaggacattataaatctcatacaagtatgacacatatcttccccacatcatttcacaacatttcaatattcattatttatataataattcacatatatttatctctgaatttcacgggaaagcctggagtatcatgtggtatatatgtacttacttactacctccgtcccaaaatatagcaactttaatttatagataagaatacttatattttaggacggatggagtatttgtttgcagcgacccaaggccagagacttggtggtacgtatgcctgttgactagacttaagggagtgtttgaggagaaggggattgaggagattaggaagatacgtaaaacgaggtgagccattagctcatgattaattgagtattaactattttaaattttaaaaatggattaatatgattttttaaagcaactttcatatagaaattttttgcaaaaaaacgcaccgtttagtagtttgaaaagcgtgcgcgtggaaaacgagagccaatctcccctatcacccctaaatgaacgatgccttagcatcttggcccgaatgcccaatcagtcccagaataatgctatcaaagcactgagatgcttcaagctcttttttctaaaaaagataacgagatgctccaaactcttggagactttcttagaggatggtacctagctagttgggaatgagatggaaagaacgtttcggttaaaaccggagcttccaatcacatactggaaattccgatttgaaccgaacattttcatcattctaatataatatgaagttgtgataatttttaggagcgcctattcaccccctcttgacgacatcgagatccttttagtctcataagctgcaacctctcttttattataatgtgtaatttttggggggcaagtaatataaatataagacatagcatataaataaattatctaattctagacaatagataaaatctgatatttctttcaacagaaactacaatcacttattacaaaattattggcgcaaagccaataggatggaaaagaagagaaatattaactgcaccaacaaaaagaagatatacaaattattcagatagtaatcctatcagtaatttttcatccaaagctggtcatatatattactaacctaatcgatctgaagcttgacatttggcccggtaattttaaaaatgaagaggggcagtataagaagcgccggtttgaaccacggttgcctggctacgccatgcaggaaggcccgtagtgatggcgagaggtagttgagcgctagcattgcacgttcaacaacgggttggagtaagttgagtagaaactcgcggatgtgctgctcgtatgtttccattaaccatttcagcacgaaacaggccatggcgccataaactcctccgttgagctcgatcgctaactgccagccgtccggactgtgaagatgtatcgcggtcctccggcgccatctgctacaaaggataccccataacgcagcatgtttctcctcgctccctcttgccagtcaccggtgctatcgctctcagaggtgtggcttcccatgtcgctctgctctctgttggtttcgacttgtccgctgacggcctccatgaactcctcgtcggcgatgagcttcgccagcacggccggagccaggcaaacctccagcgacatgctcccggcgccgtccggcccctcgtacaccgtcaccttcccgtcgaacttgttcgcgccgccgctccgcacgctcaccggcctcccccacccgaagtcgttgcccaacacgtcgaaccgcggcgagctccccgtgatcagcgccacgccgccgccgccgccggactgcagcttcgacatgtacgtgaactccggctcccgcacccaccgctccagcgactccctcgtgcccgcctcgtcgaacgacgccacggcgcggttcagctgccatgccgtccacccgagccccttctcctcgatctcgccggccgtcgcctccgccttgctcagcgacagcgcgttcccgacgtaccccaccgggatgccgttcacgcgcccccggcattcgaccatcaccgtgtagaacgtcacctgctccggcgggagtcgccgggcgcggcacacagctcgccacaggtgcgcgagcacggcctggagcgacgagatggtggccgtgcccgtggccgtgccggccatctcctcgttcgccctcgccttgagtttccgggcttttgttgccgagaaggtgaagaagcattcctgcacttccggccgctcgagccgccggacgatgtgctgcagtttgccgaccggcatggggatcggcaccgggctggtctcgacgaaccaccgccggaacaccggcgccggcgtggagatctccctgatcaggccgtcgctcacggcgccgccagcgcggcggttgatctccgaccatgcgttcatgaactcccagaaggtggtgccgtcgccgacggagtggttcaacgacatgccgacgaacaagccgtcggcgagctcggtgacctgcaccgacagcactggccgcgactcgacggcggcgtcggcgccgagcaccaggttgtacgagtagaacgaccatacctcgggcggcgtgtagagcgacgagacgacgtcggacacggccacgccgggcgccgccgcgtggacgaactcggcgccctcgccggtgcaccgcagcgtgacggtgacggtcaagtcgtcggtgcgctcctcggcgacgagacggccggtgaacgggtggaacaaagcgagggcgcgcgcgaaggaggacgcgagggcgtcggcgaggcggtcgccggagagcggcggcttgggcaggaggacgcccttctggatgtagtcgatgctgaggaggcggaggtcccacggcgtgaggtggatgtcgcacggcggcgcgtgaccggacgacgacaacgacgacgacggccggacgaggcgtcgggacaggacccggacacggtcaacggcgagtgctacgtttcggtggtcattgcttcccatgtcacgctgctctcttggagtccgtacgccttcttttttttttttttgaatccgtgctactggggacaccagtcacaccacgtcttgtgcgtgtgcataatagtgtattttatgggcaataatatatagaggtccaactaaagtattactccaccagtagaccctaccatattttagaaaggtgacatgggatttctttctcttcatttttttttatctcttctcgttaactctagatgttgacattttaatttagaaactattaaagtaatttctatactcatatatatatatatatataaattatatacctagtgggttgtttttttggaaacaaattattatccaatagcctctcgtctctctcttttcatccaactattcaattgtttccattgttggtacctaaaaagagttgggttttttttatgagaaatgatttttttcagctttgttttgctctctttattaactcttttatcgcatcagttttttttcttacacgacaacatatttaatgctatagaaactagctaaggtgaatgattggtactgctttaaaagctagatctaaaatgttatcaaccaccctaatttgaccatatctttaggatactccaatatcatatataattaacaattcaattttagtgttggatctcaatccagaggatctcttccatcccttgaaactgcattgttgacatgaggttttcaagaagaaaagcattagactcaaactgcattgttgacatgaggatttcaaactttgttgcaatatttgtctctttcggtccctgtgcagtggagcatagtgtcggtcaaataataactctatgtactacctccatcccaaaatgtttgacgccgttgacttttttaaaaatgtttgaccgttcgtcttattcaaaaaatttaagtaattgttaattctttttctatcatttgatttattgttaaatatacttttatgtatacatatagttttacacatatcacaaaagtttttgaataaaacgaacggtcaaacatgtttaaaaaagttaacggtgtcaaacatttagggaatgatggagtatattttctatataattgtgccaaatttggaaccaccatgattaaataatgcacatgcttatctggttctctgacaaacgtggtcttctaagccttccggactaaatgtggttgctcattatataaagggcatatcttgagtgggcacaaaggattaagaagagtatataaaccaaggcaaagttgagttaaaattaacatatcctatttggatacattggaaatagagaagagtagttaggtcatttacaacctaatgactaagatggtgtccatagtattaaataagttgtcacttgggatgaaaaatgatatggcaagtgaataaatgaggaaagagaaggaaaccatgtcttgcatgagacatggtttctacacaacatccaagacatcatgtgagataagtagcattaaattgaagtatggaatagtggtgtttgcattggaaaagtagtgtctagtactagtttcttgatgatatggagtttatgaaaactatgtctagtgtcataggttgggaatggctttagtgagatgtgttttaggaggaaactatataataagtagggacacaaggaaaacaagcaagaaattgttatgcatgccttacattttaaaacaagataagaaaaaccatatgctttattaaaacacggattaaaatataatggatatattaaagaataaaaccataatgatatggctgcacttggaacattgcaaaccaaacttggctgtcaagatgctccatgtctttggagatgtgtataactagtataaaatatatagcccagaacacgagactgccatctctcagtcttttactagtattttaaatcattgcatttacgacttaattatacacgtgagccaccattgggagactagcaactttctatctgacctgtcttggttttctcttcggttttgtcttgatcatctctttagtttagccgatgtggttgccaatggcgtgataaaagaaaacctacaattaataagcctaaaaaattacaattaatgcccctaatgaaacccaaaaattgacacgaacggcgtgtgagttagcaagacttaagacttgcactcagtagtcaatatatcaataaataaaattaagggtgagtttgaggagagagggattaagaagattgaaaagatacgtaaaacgaggtgagccattagtatatgattaattgagtattaactattttaaatttcaaaaatggattaatatgattttttaaaacaactttcctatagaaattttttgcaaaaaatacaccgtttagtagtttgggaagcgtgcgcgcagaatacgatgtccttttgtcacccaatcccccagaactcatcacaacgaacgcagcctaagagcaggtacaatagcagggtataaactaactgcaaacatattttaagaagataaatgaggagagagaagagcagcgggctacagatttgtagccagctgtagcacggacttaaagacgcagtgtgtgtatgacaggtgggaccatgtattaatagtgtagtatgtaactattatatgattgagctattagattggctatagatgaattggagctagtagttaggcatactattaaacttgctataagaagattggtacagtggagcaaaagacaaacatagtctggcacgatatgtcaacactttggtgacggtatctggtgatctactatgtgtgttcgtgactccctttttctaacccctctcccttatttttcacgcgcaagtttttcaaactgctaaacgatatattttttacaaaaatttctatacaaaagttattttaaaaaaatcaaattaatcttttttttaaaattaactaatatttaattaatcatgcgctaatagatcactccgttttccgtaaatactattcggttggaaaagtctactggcgaacacagcataggaccgcagcgcgtgaccggacgacgacggccggacgaggcgtcgggacaggacccggacacggtcaacggcgagcgctacgttccggtggtcattgcttaccatgtcacgctgctctcttggattccgtacgcctctactagacacacaacaccttcagcatatgcttcggcacataaaaccatgtaatccctcgatcaaaaaaaaaaccttaaccggatatgaccttcttagtattacgaaccatctccagattcgttatactagaaagggtcccatcttctagtagattaagttttttttaacagataaagtatacactaacacatactcctaattatttaatttttttaaaacacaccaattagtttgataagcatgacgtacggaaaacaagataaatgagttgagaaact

SEQ ID NO: 18099 - DNA, 2247 bp, Oryza sativa
  unsure (1)..(2247): unsure at all n locations
gtgtttgaccgttcatcttattcaaaaaatttaagtaattatttattcttttcatatcatttgatttatcgttaaataaactttcatgtacacatatagttttacatatttcataaattattttgaataagacgaacggtcaaacatgtgctaaaaagtcaacggtgtcaaatattttgaaacggagggagtatgagcaagaaaagttacggaaagagggttcctcccatatatatcctttagatcctttagagacatatacctccctattatttaagagaaaacaaataaaccggttgaactgatatacaattttgtgataggaggaaacctcattccgaggttctctcatccgaggtatacacctcccattatttgagacaaaaatattaaaccgattaaactgattattagaaaataagtttgttatttgcaaggagctagctagacttttctggtccacaagctgtataaataaggatatataccttctggctaatacaaatatctatacctcgtaaaaaaaattatatacaaagacgggctttcaaaactattctaattttatttagataatggaatataagattagttcaatactattctaatttataagattggttttgatatctactttttataggtatgtatacgaagtgtcccagataagagagaacgacttgcagttgtttggcacaaatccaccttacactactagaaaaatggtctttagcgacgttggccatttattttttcaggcgggtagacacctaaaacacgcaacaccgcctaggaagccagctaccggggccatggttgctttccgcctgcgaagatagttctttgcagacggaccacctaagctagccgcctgcgaagactaagcttcgcaggcggaccacataaggggccgcctgcgattattccaggcggtcttgttatgtggttcgcctgggaagctcaatcttcgtaggcgcccattttatgccgcctgggaaatttatcgcaggcgacatattttaccgcctgtaaaaatctggccgactatatagtcttattcctccccgagctcctgttcatacccgacgattttctctctcttaaaggcaccaaaatataggggggaggttttaaactttaaattttcaagggatttttctacggtggttagatatatgcctttgtactctatatacataatttttttgtaatttaaactccctttttaccatggatctatgcatcaggtcgtcgctcatggcgccgccagcgcggcggttgatctccgaccatgcgttcatgaacttccagaaggtggtgccatcgccgacggagtggttcaacgacatgccgacgaacacgccgtcggcgagctcggtgacctgcaccgacagcacgggccgcgactcggtggcggcgtcggcgccgagcaccaggttgtacgagtagaacgaccatacctccggcggcgtgtagagcgacgagacgacgtcggacacggccacgccgggcgccgccgcgtggacgaactcggcgccctcgccggtgcaccgcagcgcgacggtgacggtcccgtcgtcggcgcgctcctcggcgacgagacggccggcgaacgggtagaacagcgcgagggcgcgcgcgaaggaggacgcgagggcgtcagcgaggcggtcgccggagagcggtggcttgggcaggaggacgcccttctggatgtagtcgatgctgaggaagcggaggtcccacggcgtgaggtggatgtcgcgcggcggcgcgtgaccggacgacgacgacgacgacgacggccggacgaggcgtcgggacaggacccggacacggtcaacggcgagtgctacgttccggtggtcattgcttcccatgtcacgctgctctcttggaatccgtacgcctcgatctactggacaaaccacaccttgaagatgtatatagtgtattttatggttgggctcttactctgagattctagtattcgaggagctaacgatccaataaacagaacctactatatggagtattttagaagtgcagaattaaaattgtatgaaattgaatattgttagagtgaagtgcatgggtggtccttaaacttgtacggatgtatcatttagatccctaaactctcaaaatgtatttttgagtccccgaacttgtcatgagtgtcatgtaggtctaaacggactctaacccgcttcgtgagatgatgtggcatgccacngtgacgcttac

SEQ ID NO: 18100 - DNA, 4964 bp, Oryza sativa
acatgtcactggcttacaaaatacaatttacatatagaggggagagagagagagagaggagaaaataagttttttaattttgaaaaaaaataaatgaaaacaagagaggataaaaaatgttttttatttttgtatatatgactgacatatgggttccaatgacacataggcgccaccatggcatgccacatcagcacacgaagtgagttggagcccatttgaacctatatgacactcgagacaaattgagaggcctaaaaatacattttgagagttcagggatataggtggcacacccgcacaagtttagagaccgctcatatactttactcatattgttatataaggacaattctaattcagaaactactaaagtaatttccatactcaccatgtcatacatacatacatatatatatatatatatatatatatatatatatatatatatatttatatatatttatatatttatattatatagtggtttgttttttcgaaaaaaaattcttgtctaataacatctcatctctctcctttcatccaactattccattgttcccattgttggttcctaaaaagagttggttttttcaagataaatgatttttttcagctttattttgctctctttattaactctcttatcgcatcagtatttttttcctatatgacaacatatttaatgctatagaaactagctgaggtggatggttggtactgctttaaaagccagatatgaaatgctatcaaccaccctaatttaactatatcttgtcacgaccggaattaacccaacgggcgttcctttcgtgcgtgtattattccttgtcccaggaggcaaggtacaccaagagttgatacaattcagagtttaacaagcggaagcgtaaatagataatttattacatgggcgacgaaggcccagcacacacaaagacaaacgagaaacagcggaagacaagggcgacgaccacaggcgcttgacggcaggcacgagctagacaccaaagccttcatcaaccaggggctcctcttctgggttggaaaaaattaagcaagactgagtacaaccaccgtactcaacaagacacacccacaagtgcataataaatgcaagggagtacaagggagttataatataaagggttagggttgcagtaaacagcatttaaagatgcttagttgctcaaagctattttgtaaacacgattctagaactatgcaatattatttatcaaggccgtgaacccacacgaacctgccttaacccaaggcctacgatgattcaaaccgaaccggcaacccgaccctgggtcctagctcgtcccaagccaacccaggccaaccattccacattttagttgttaagcaggttttaagaattaaaacactaacttgggtacattgctcggcttgcccataaccgagggcgcggctattcgaatagattatactctgatcagaggtgtacatctttacccacaagacacatcttcctcacgtgcaaccacgtgccacataccaccacggtatacagacggaagacgtgacatagtttccaacccatcctagccatagacaagagtaccgacccaatcccacctacggccggaacccccgggacaggcaggcaggactgagcccctagcagcaggacaccggccctgtgccacgacatctcgactaccgggccgcagctcgtgtagccttcatttgccctggagatgtccatcgacccccgacttcgtccatctccatccgtgtacttttgtttataaccagactgagccacaaactaagccttacccactagacatgtggaagtacggtagtgctttgcaacagaggcccgaagaccggtccttatatggccgaggtgctactatcaaaaccatgcaccccgagcccagcctaaaaccattttggggattttgaatagagggggcgatgtgaattcaattccacaatactccaacaattccaaagtgtccaggtgatatgaatatcccaaagtctagagttgtaaaaccgcctaatgttacctaattaaatagcgaagcatctacctaacatcatactagtggtaccatgagtagagtgtccactagttggggttttgtttaatctagggtgaacaaggaaataataacaataacaataataaggtcataacaaaggtaaataggcatgctaaataaaacagtgataacgcgggaatttaaataaagcgataatgcaataatttaaatcaacataattttataaactgggattcaatatgttcaaagatgatgtgacttgccttgctcgctttcccaaacgtcggcttcaacctccacgaagagcggatcttccgaagttgcagcgtctacacgaccaacggaaaagaaaaggcttttactctaataaactccatataacaagcagaaacaaagcacaaaaatgggttcttgacttcttaaggaaaaattagagacttgaacggtccaattccgagttcaaatggccaagttatggccatttgaaggttatatgctctttaaatgaatatttgcgaatttcttcatttaaattttaatttaaaatggatttattgcgtcagccgaggggaggggcgcgcagaccgggtccacgggagtggggcccacgcggcagcctcacggtccacggtggaccgggtgcacctggctcacaccggccggcgccgtgggtcccacgcgtcagccgcacccgagggcgcgggcggctgacggccgggccccacatggcagccgcggggcgcgcccgaaggcggccacgccggcacagccgacgggaggcggcgcacccgcgccccgatggtcgccgccggcgaccaccggcgcggtggagcggcgcccgagagaggggagggaagggggaaacaaatcggcggtccacagctcaccccgggtcgacggcgacgacgggaacggcgaccggagcggaggaaggcggcggcgcggctcgggtagacggggacggcggcgttccggcggtcggcgggcgaaacggaggggtggacgaggtcggcgaggttgcggcgaaaccgaaggaggcggcgccgaagcgggagaaggtccggggcgacgacggcggcagaccggagctcggcggtgacggcggagagagagagcgacggcgcgagctcgattccggcggagagagggagcggcgagtggcggaaacggtggagggaggcacggggagtgtttatatagggttgggagtgagagagggtggccggatgagggggaaacgggcgcggaagatccggccgccattgatgcgccggcgaggtttagggggaaagtttccgaacgaatccgagggagagagggagggaaaaatggggggaaagcgggagggaatcacggggaatatttcccccctcttgattgcacgctgggcggacgggagcggcgggatttgcagcggcggcggcgctagggcacgggcgatgcggcgggagcggcgggaggaaggggatgacgggtgggccccacccgtcagcgaaggtggcgggcgggcccgcccgtcagcggcgcgcgcgcgggggggagaccgaatgggccgcggggaggaggagagagagggaagaagatgggccgagccggcccaagagggggaggggggaaaagactttttaggatttttctttttataaaatcattttaactttgtttatttcttaataattattatttgtgctctgaaaattccactaaaatttatttacgcattttaggcttttaggaaatatacaaaaatcctccaagccttatttgacttttaactttgcacattttaattgtgggaggctttcacaaggattttaattattctaggcataatttcgaggatgtattttagagtcgttttgggacgcgacatatctttaggatactccaatatcagatataattaataattgaattttagtgttggatctcaatctagaggatctcttccatcttttgactatcttccttctcccaaaccttgtgtattatattggtgctaccaccttaccaccaagctatatttgttcctacaagtctacctacttgcaagacatcatcaccgtcttctctcccatgcaattggagatagatgagggtaagaaacctaccgtttcgcagaggagcggcggcgcagctgtacggcgacgatggcagcgcgcgccgtgaggatggaggggcgccgtcagcggccggcgccactagccggagccgtcgccgcggccgctccgccctcgccctcccgttgcctccgccggccagacctcgcctgcccaccatcgtcgctaacatgtgggatagagagagaagagattagagagagaagtgaagaaagggatggagagagaagtggaggggatagagagagaagagattagagagagaagtgaagaaagggatggagagagaagtgaagggggggatacagagagaagagagataggagagctgacatgtgggcccaagggcatttttgacatttcacatgatttctctctactcttcaaccaaaaattattactttaatgcgtgcggtgtccactagcaaaaatccaacttttgggagtgttttcctccaaaagtcacttcgtgcgatgtcctacagctaaaactgcgaagtcacggtgtcctgtagcaaaatttgcctatctaataacctctcgtctctctcctttcatccaactatttcattgtttccattgttggttcctaaaaagagttggtttttgtcaggttatggatactgcataactaatggtaatcgactaagttcagcggggcccaccatataccaagtcttatatggaatcataccacgtatatagaagtagttccggataaagaaggacgaatagagttctatatggaaacaacaatgactacttggattgtatctatattggtctccctagttctacttgg

SEQ ID NO: 18101 - DNA, 7871 bp, Oryza sativa
actttcccatctctcagtcttttactagtattttagatcgttgcatttacgacttaattatactatcttcatctcaaaataaacataatcatgagttttcatatctaactttgatcgttcgtcttatttaaaaaaattataattgatatttttattgttattatattataaaacatgaataatattttatacatgacttatgttttttattttttttaaataaaacgaataataaaagttggacacagaaacttatagctgtgtttatttagggatggagggagtacatgtgagccaccattgggagactagcaacttcgcatctgacctgtcttggttatctctttggttttgtcttgatcatctctttattttagccgatgtggttgccaaaggcgtgataaaggaaaacctacaattaatgagcctaaaaaattaaaattaatgcccctaatggaaccccaaaattgacacgaacggcgtgtgagttagcaagacttaagacttgcactcagcagtcaataaataaaattaagaagattggtatagtggagcaaaagacaaacatatatagtcgttgctgacacgatctgtcaacactttggtgacggtatctgctgatctaactacatagtttgtagccactagcaagtattaaaagttaaaatttaacgtgtaaacatatcatctcatcatccactagcaatttctaggacattataaatcttatacaagtatgacacatatcttctccacatcatttcacaacatttcaatatgcattatacaataattcacatatattaatctttaaattccatagcgaagcgtggattatcacatggtacatagtagtatgttcttatttgtttgcagcgacccaaggcccgagacttggtgatacggatgcctcttgactagacttttaaatagcttcttggcccgaatgcccaatcagtctcagaatgacgctatcaaagcactgagatgcttcaaactcttttttctaaaaaagataatctcggggaataaatctgaatatgcacttatttagattcgccgtcagaagtttgttttttcaaagagataatttgatgagagaggcttgcgggttggtgttagggatggcaggttaatttgatgaggtatgtatggaacaggcagactgtcgttccaacttagaagagcgaggtgtgcccatctacgtacaaaattaggccaacaatacttgattgtttcatcggtttttatatgtgtcaatcacatatttttatctatttgtgatagacctaaacttaaagctcagtctaaatttgtaagaccgtaatctacagttttaatgtaataagtatgtatttttttaattcacctagatatgctattccctttatatttttgtttacactagcaaaatgactgtagttgcagtgggtgaagaagaagaaagatggagatgattcgatgcctttagtgtgagttgtcaatcacactatctagataaaaatatgtgattgacaatattttgttaattattttgacaatatttgtgatagacctgaacagtgccaaaaacagtgccgcccagtgataaatcgatggctactttggtgctgcattttggagccgtgggaccgtcgctgtgctgctcgaccgtcccgcggacccttagtctcgcgttttggagctgcgggatctgagtatatttatgcaaatccttcctatacaagcatataaacgtaaattattaaaaaaaaagtatattcgtaaatttttcctgattaaaatgtacccatagtggttcggaattttcttctccgaacccacaaaagatatttttaatggtactcgtaaatactactccatcccaaaaaagaccaatccagttaggaaatgaggaattttcatgggatgggtggtagacatcaaaatgagggatttttacttgttgcaaccttcagttgcatatttaacatgctttaaaatggtaaataataattttaaaattgattggtactctcacaatactaagtttgatgaactctaataattcagctgatgaagtagaccaaccctaatacttcagggatggagtagacttattcctagtaaataaaatacatagttctctcttcctctcataaaaacaaatctaatataaaatgcgacattacaaaactacgaatctagataggacagtggacatcccgtactagatttgttttgcctttgtctagattcgtactagaattaaccatgtgtcgccgttcagccactgacgtcagtgatgtgtcggcggcggcgcagtcaccgcgctcatgaactcctcgtcggcgactagcctcgcgagcgcctccggtgccaggcaaatctccaccgccatgctcccgccgccgcgcccctcgtacaccgtcatcttcccgtccaccttgttcccggcgccgctccggacgcccaccggcctcccccacccgaagtcgttgcccaacacgtcgaaccgcggcgagcctgagatcaccatcacgccggcgttctgcaggtccgccaccatcatgaagctcggcttctccggccacgccgccaccatgcgcctcacgctcgcctcgtcgcccgacgccgccacggcgcggttcagcagccacgccgcccagcccagccctttgtcgaggagctcgccggcggtggccttcgcgacggcgcccaccaccgtgttgcccatgtactcttgtggcacctccttgacccgtgctcgcaatcccacggaaaggccatagctcgtctccatctccggcgcgaggcggcgggctcggcacacagctcgccaggtgtgcgcgagcaccgactggagcgaggatatggtggccgtggcggcggcggcggccatctcggcgttcgccttctccttcagcgtcctcacgctctccgccgagaaatggaggaagcactcctccaccggcgtgtacacaggccgccggaccatgtcctccagcttggcgaagggtagagggatcggcattgggatgccgtccacgaaccatctgtcgaacaccggcggcggcgtggagagctcgaggtcggcgctgtcatcgctgcggcggctgatctccgaccaggtgcggaacaagtgccagaaggtgaacccgtcggcgacgccgtggttgagcgacatggcgacgaacatgccgtcggcgagctcggtgacctgcgccgccaggacagggcgggactccacggcggcgtccgtgccaagcatgccgttgagcgggaagaaggaccacaccacccttgggacgtagagcgagtcggcgatgtcggcgacggtgacgccgggcgccacggcgtggacgaactccgccccctcgccgttgcagcggagcgagatggagatggtcggaacaccaccaggcgacgccgtctcggcgatggcgaggcggccggccagcgggtagaagcgggccagtgcgcgagcgaacgacgagacaaggtgttcgacgacgtgctcaactccgccgggaggcttgggcaggacgacgcccttctggacgtagtcgacggtgatcatctggagatccaatggcgtgaggtggtgcaccgtctcgtggtccggcagctcgccagcgtgctccgccgccggtcggaccatgcgccgcgacatgatgtggacgccgccttccatttcgactagctctcgagctcagtggtacgtacgtgttggactaatggtacgtagtagcttaggagtttatatcaaggtatgaatctgtgattgctttggctggtgacatgatataaatgcatgtcgagctctcagatgttagagcatctctaacaacctctctatcagcctctccaagccaaattttggttattcaaccaaaaaaggaggtccaacagattggctaaccggatggccaagccatccagcagaccaaaatcgttggctggctagctagatttggccagtcaaaacgtctcgccaacggtggcccgcagcaactgtactcctcgcgaggtcgtcgggggcgttgtcgtcgttgtcgaggtcatcgtcggggtcgtcgtcgaggtcgtcgtcgcaagccgctgccaccatcgccatccccgccctgagctccaccgccgcgccccccaaaccgttgtcgccgtcaccgcctcccgcctccccgcgccaccgcaccaccgcgccatgcgtcggccgcctcgacgggaaggaagggggaaaagaaggaaagagaaagaaggggggagagaggaagaagaggagagagagactcacatgtgggtccgattttattttggagaggattaataaagattctgttggagtaagtatatagtttgactagctaaatcagatagagagttggctatatgggtgtttggagagttcgatttggagaggctgttggagatgctcttaggccttgtttagttcccaaaacaaaaccttttcacctatcgtatcgaatgtttggacacatgcatggagtattaaatgtggaaaaaaaccaattacacagtttacgtgtaaattgcgagacgaatcttttaagcctacttgcgccatgatttgacaatgtggtgctacaataaactctaatgacggattaattaggcttaataaatttatctcacagtttctaagcggaatctgtaatttgtttttttattagagtacatttaatacttcaaatgtgtgcttgtatatccgatgtgacaaccaaacctaatttgtttcccaactaaacaaggccttaatattgcttgctagatggaatgtatttttttcatggcactgaatctctactacttaaaaaatctggattagtgatggtgaagccaaagtagacatgcgatccaacgtagtaacgtagactagtttggagcgacgaaaatttaaaagaggtacacgcgatgcggaacaaaaaagcgtaaaaagccatgtcgccccgcaacccgcgccccctcctccgcgcgcctccatcgccgccccgcaccctcccctcgcctctcctccgcgccgcccctccaccagcagccgtctccacactgcgccagcgcccctctcctctccacccgcgtcgccgccgtccccactgcgcgccgccgcccatcgccttcccaccacgcctccacccctagccggagaggcgccggccgcgccgcccctccacctccaccagaagccgtccccacaccgcgacggcgaccctcgcctctccacccgtgccgccgccgtccccactgcgcgccgccgcccctcgcctccccaccgccctcgacctgcgccgcctcctcgcccctcgacgccctcgaccgctcaaggtggtcacagacgccgtcatctgaaggtatgtatcccctcctatcccctcctgccccaccatgtcgcccgacaatatggccgccgcatgttcgatgaaatgtccagtaagaagctccatccatggactcaatctgctttggggaaatgagcaccaaatgaacatgcacttgaatattgtacagatcagttgcaacatgtatggtttcttttataattcttcatgtacataggttgaatatgaaataatacctcggttaccatgtgcctgcctcacttccaaacctttcaatcagctgacacatgagctatagaacaaacaacgattcatgctttttacgcgggttgttctatatttatcatgatgactctcagttcaggttaattatattgaaaaactatggtgtcaagagtagcatgcttgagtgcttaggaatacaacaatatttttagatgaaagatgaaggttgaaaaatcattagtttacaaatgcagacttcctttttttctccaacccacctcactgttttgctaatgacatgatgattggaggagggcagcgttgcaatcattcttgtgtatatattattggtatatacttttgacggatgatttcggtaggcgtataaatgaatgtactgacatataatatatatatatgcgatccttcattaccatatcagttcgaacagttgcttcccacccacataacctccttccctgcattgaaggtatatccaattaattcgcttaatttcctttactgtgtgttgccaattttcaacgtttttataatactaccatcagcaccactgggattctgcctgatggtttgtactggattgaactctaataaattttgacttgtgcatttcagggttccaatggatagcaactttggggcctctcgaccgacatcgttgacaggatcaggtgagtttttcaaaaaatataataataggtcaatagctcaacctttgccctatgttcttatttgttccattcatatattttttccattcttggttcagccggtgatcctccccttggagttctttcagacattactaatctcagtgctgctgaattaagaaggaaacgtgctagagagaggtacgctttgttgagtgtggacgagaaggaggcgaggaataaaaaggcccgtgagaagaggcgccaaaagaaggaggaatgccaaggaggaaatcaatctggtgctgctgtgaaaggtaactacaagccaactcaactcatcttgggccatctattctattgattaacccacatagcgagtgaccaaagatatccacaaaaaagccatctattctattgatttgcatctcttcaccgaatatgaatgaagaacccaacagctattgcatcttatttttgaaggggtgcatgcttatttcctttagctttcacacacttccaatgccagacaatgcaatgcataaccataaatttaatcaagcaaccatttaaggcagaaaaaaatacttactgcaagtgtgtgggataagtgtgttaaatgcctcatcaaatgataacaatcacgcatgctggacagagctagcccacatggcattccaccttagaaaaaaagaaaaactattagccttcttgctcaactccatgtatcctcggtctctactctatgatgctctcctcacccattgctccctcactgcctttcttcttgttagaaagtataccacagaaaaaaaatagaatttataaaaactgacaaacaaatgatattttgcatgctccatggtaccagccaccaaaaaacacaaaaaggaaaacaatatgatgcaattttagtgttatggatgttcgcatcagattattgtttgcatttcatgttactaaaaaatatatggccccatgttaagaggtaaacaactgccttcagtatattttgtggcttcgtgcacatttggtagcatatattagcatgcatagatataactataggatgactgcagaaacaaagtgagaatagggaaacaaggcatgaaagcagaaggtgatacaattataatctccatcttcatgtactctaatacccagaggatcctccgtcgcctcatatatttctctattctttgctgtaatatgtatcggtactaatgaaaagatattctgccaattatgccaaacaatcttctaatttcgcggcgtcggaacagccccacttggcgatattacaaatataagcgctgctgatataacgacgtgccaaatggaagtgaatgattctcccacactgcatcaaggtaagaataacatattattacattccgcatgctataagagggcggaatgcaatgccattattgttgtgtacagtctgataacgtgatggttctatgttttaatagaaagtgaagcttcccatctcaacatcacacctagacgtctcccatttacaatcatcaacaatgtagctcactatggtcccaatgaagtacctttgagctgcgtaattcaaacaacccaaatatatatatatatatatatatatatatatatatatatatatata

SEQ ID NO: 18102 - DNA, 5154 bp, Oryza sativa
ccatccagtattacaaaagaccatctacagtcaaagctacctcaatgtagcgacaagcctgcgactcttacaacggagcagaagcaagctaaggtgaaccggcagagatcacgacatcaatcactaacaaaagaacaaagattagatatgaacgcccgacgtagggtagcaaggcaaaatatgccagatgtggaaatacatgatatgaatgcccgccttaggtcaagacgacaaagtgttactccaggggaaaggtctgctcttttggcacgacgtaatgcactctatgcagctaggcgtgacaaaccatgtgctgaatcaattgcattggagtgccctgagggtagcagcccgtcgttgctagatccaacgccttgcttggaaacaaccggtgatgtgccagctacatcgaacctgcaagctgagcatgctgcagatcatcttgcacgatcgagcaccttcgaggatggtatcatatatatatgttatcgttcatacttgcaatttgtaaccttccgcatactaacttttcattccactatagatgatatggattccttcatggatgatgacaccgacgatgaatactacttgtttgctaggctaggtaccatcgtcgttatacctgaaactctctttcacttcagtagatatttgaaactaaactacttcccactaaacaatcccaggcgatgatgaggatgacgatatggtacaatccgatgacgacgacacgcaagcaccgacctcttcgattcctgatccatttgactgtgtgtatagcaacatcccacaaagcacaaatgttctgaagcctgagcctgactgtaaacattgtggcgccaagaggttccagtacgaaccgtcgggcttctgttgtcgggatggcaagataaagcttgtagaaaacgagacaccccctgaactgatgaggctctagacaagctcggatccagatgccaagcatttccgggataacattagatatttcaacggtcacttctcgttcactacccttggtgtaagccttgacaaggcctttgcaaacatgagctcgggtgtgtacacatttcgggcccatgttcagatctatcataacatacattctttcggtcctagagagtctagtccagagcatctcgagttgtatttctacgatgacgatccaaccttgagtcacagattccgtcgttctccgagccttgaccaggatgtgatcaggactgtttcagacgtcctttggaacaacccgtactcggagacatttagaagtctggggcaggctgatgacctcgcgaactaccgcgtgacactaaatctagatcataggttggaccaaaggcgttacaatgtgccggtgacaactgaggtcgctgctgtctgggttgaaggaaacgagagaaggaagtttgagcctagcgtgacaatatacggtaacgaccgtacccgtaaatgcatccaacctttctacggatgttacgatccactctcgtatcctttgttcttccctagaggagagagtggttggcatcaaggtcttccaaaggacaaaataaccatggaggctgcaaacacgcgtcatggcgatgatcctagtaagtttatcttcgtactgtgttgactaaaacaattgataattgtccgttacatgactgcactaacccagacgtttctcacgtgcagattgtaacagcgggatacgagtttctgtaagggactactactgctacaaattccagatgcgtcgtgggattttcaatcctatacttcacgggggacgcctgttccagcagttcgctgttgacatgtacatcaaggttgagagctcccgtctggactatgtgaggaacaaccagaaggagataagggccgacctatatcaagggttaatggacagcatccaggctggggagagtcgagcaagcgcggtcggcaaacggactgtgttgccagcgtcgttcgtaggtggtggccgaaatatgaagcgccgctacatggatgccatggccttagtacagaagtatgggaagccagatgtattccttacaatgacaagcaacccaaagtgggatgaaattactcgtgagcttgagcctggccagacaccacaagatcgtcctgatcttgtggtctgtgtctttcgagccaagttagaggacctaaagaagcagttgttcgagaaacacattcttggcaaggttattgcacatgtttatgttgagttccagaagaggggtctgccgcatgcacacttcttgttgatcatgagtagtcgatacaagctaacatctgcggaccaatatgactgcatcatctcggctgagcttcccgataagaaaaagtatagagagctgtacgatatggttgttaagcatatgatgcatggcccttgtggtccactcaatggtaaatgccaatgcatgcgagatggaaagtgtaggaacaactacccacgagagttcaaccctacaacctcgcaaggcaaggattcatacccgttgtataggagacgtaatgacggcaagagtaggatggttagaggccaccctctcgataataggtgggttgtcccgtacaatccatatcttctaaggatgtacaactgttacatgaatgtcgaggtttgttcaagtatcaaggcaataaagtacctctttaaatacctatacaagggacacgagagggcctcgatatccataaacgaggcagataacaacggcgaaatcgatgagattcagcgctacagggatgcgaggtgggtgacccctccagaagccttgtggcgtatatatgggtttgacatatgccacatctcgccgtctgtgaggcagttgcaacttcatctgccaaacatgcacatgttggcttccgatgcagacaaggatctccgtgatgttcttgataaggaagacgcaggcaggtcgatgcttacagcgtatttcgaggcaaacaggcagcatgtctgggctcgagatatcctttatagggatttcccaatgtggtttacttggcagacgccaggtaaatactggaaaaaaagagagaaaggaggccaggtcgggagaattgtgtgtgcccacccggcagagggggagcgttactattttcgggtgctgctaaaccatgtggcaggctccacctcattcgaagacctacgtattgttgatggcgtggtcatgccttcgttccgtgctgcagctgaaagaaggggtcttatagaggcagacaacaccctcgacgagtgccttacggaggccggggtcttccagatgccactgtcgctacgcaggttattcgctaccatattggtgtattgcgaacctagcgatgtccgtggtctttgggacaaacatctagatgccatgtctgatgactacaagcgtaacaacacatgccctcatgttgtccaacagatggtgctgatagatatccgaggcatgctacaatcaatgggaaaggaaatcacatcgtttccgctccctgaaattgacgaatcacatgatagtaccagaggagatcccagagagattattgaggagtcatccattggtgtggagacggacgatatgaacctctcagaccagctcaatgatgagcaaaggtctgcattcaacaaaatcatgaatgcagttggcagtgctcaggggggtgttttcttcgtagatggcccaggaggcacgaggaagactttcctgtatagggcgctgctagctacggttcgcggcaaaggagatatagcggtggcaaccgcgacgtcgggtgttgcagcttctataatgcctggaggccggaccgcacattcgcggttcaagatccccctcaacattgaggaagggtcttattgcagcttcaccaaacaaagtgggacggcgaagcttctccagatggcgtcgcttataatatgggatgagacctccatgacaaagaggcaagcggttgaggccctcaatatgagcatgagagatataatgggttgcccgcattctccgtttggagggaagacgattgtgtttggaggggatttcaggcaggtgctcccggtcattaggaagggcactaggtctcagataacagatgccactctacgcaggtcctatctttgggattgtatggttcaattgaagcttgttcgcaatatgagggcgtagagcgacacgtggtttgcggactacctccttcgagttgggaatggaaccaaggaggtgaacaaggaaggactcataggccttccttcggatatttgcgtgtcgtgcaaagggaatgaaacagacctcaaaaggctcatcgataccgtgttccccaacctaaacgataacctgacggacccaaactacatcacatgtagggccatattgtccactcggaatgagttcgtcgatcgaataaacatgaagatgattgagcggtttagaggggatgtgatgacatatcatagttttgattgagtagaggatgaccctcataactattacccgccagaattcttgaactctctaactccaaatgggctacctccgcatgtgcccttaagctgaagataaactgccccatcatgcttttgaggaacattgacccagccaacgggctttgcaatgggacaaggctggtggttcgtcagttcggaaaaaatgctattgacgcggagattgttgtagggcagcatgctggaaagagagttttccttcctcggatacctctatgtccttctgatgatgagatgtttccgtttcgcttcaagaggaagcaatttccggttagattgagctttgcattgaccatcaataaggcgcagggtcaaaccattccaaatgcaggcgtctacttaccacagcctgtcttctctcatggtcaactatacgtcgcgctgtctagagcaacctctagaacaaacataaaaatactatcgatgccggtagaagacaagaaacaaaataaaaagtctaagcgtactggcgtgaaggacaatgagaagaaaggaaaggaattgtctaaacaggctgcaacatacacaaaaaaatattgtgtttagagaggtcctcacggattagaaaaggtatattatgtgactaattaaccgtccacaatatgcttgcttaaattccattcttactgctgagtgtttcttcacagtttagttcacgtatggctttgtat

SEQ ID NO: 18103 - DNA, 18826 bp, Oryza sativa
gtgttaagatcctttggttaattttggttttgaaatgcagctcaaaagatcaagtcattgtggattgcagaatgagagggtcacgttttgaagtaactgcagtcagcatgaagctattgtgtagatactagatactggtgttggattgagagggttgcattttgaagttactttggttggcatgaagctattgtgcagatactgtatactgtttttttttaaagttggatactggagttcctgtgactaattgaaaatcatagctctcttggattgagccttccaagctttgacaagttagatttgagcgtgtttgcatatttcgtatgagtacaggaaaatatgcattacatttccatgatactagaatatggagtaatctggaattagatggtttacgaagaatgtggtgatattttagtgctaaataattttatcttttctctctttttctttatattaatctttaatctatctcgtggattagcaactgaaaaaaaaactttttgtatgcgtgcctttaccgattaaaaagggcatactgtaaaataaactacgacaaaatacaacaaattcaacttcaaaattaagttttgaaattttaattttagctttcaagcataagacagacgaagctgatattgtttttttatttgtgttattatatagtcgttacagtcgtgatgatcagggaaaccacttaggtgttaatccttgctaatatagcctggtgatatgccatgttttgtctaggaagagtttaccaggatgtttactacgcatacatgattcaggtagttctctatggaggaacttgtatatgtagtgcactatggatgtttgccagcttaacatgattgtctgggatgatttgtagaagcgggctatattttactcaacttgtttctgcgtagcatgctgataaactaagtgtctggtggtttagggcactacgcaacattgtgatgagtgagccattgccactatgctggtcatggagcagcaaagcagagactatatgttaaggtgatgtcctctgttcataaatcctcaaataataaagatttgagtgtgaaatttgagtcatatcttttaggatgaatctatttatgtagttgcaatgtgtgcttatggttttgtgattggttagtgcaatatttgactactgatttgctccatccataaagagctcgaaataagattagttaaatcttatttgagttttaaatttcagtttgttaaatttgctctttttcatgccagtgtgagaaggaatatgatttgtgcattccttaatatacttatcagtggtatttttgaggttctgttcggatgtattatatctttgtgtccttggataaaatgatctcctatttacttattagcgtactgaagattttttttcttctcacaaattcatccatctccattcattatgtttcttcatcacattcgatagtaacacaaacagcaagacccaattatcttccttaactgatcaactaactttggatcaacacattgtcgctttcaggacattggcccttgtagtcctggaaattattctggaggtggctgtgacctgagcatacagtacagactggatcctccctctaaaccatgttatttcagtttctgacttgcatgctctatgctatttcagttggtgacttaaaccttggtagaaccctgcacaaataggaggcgtcatcttaatacaatgaaaaattatgggaactccatgccagatttgtcaagacaatcaagtctattctttcgtaagttatatcttcactgcctatctataattaataggaagaggcacaccaagttattgatcacataatggtttgatttgagttttcccggccacatgttataggaagaggcacactggccaatgtaacaaacttaactgctgctgaggttagaagaaagcatgacagggagaggtatgcttcactctctaaaaagcatgtggtttctcaatagtaagggttcatattgatctgttctatggaaattcagggtcttgaggtcaaggtcattgacgagagcatccaattaaggttgtgggaatttgacatgacagtatttaagtttgtcaaaccaaaatttcttttcaaaagaagcgaataatgtcaagattgtgtgataagacactatttgactatgaatgattgatgaattaagctatattaaaaggatcaacaagaaatcttaataaatatactgcaatatgatgaatagtgtgaaactcactcatgttatagcttatatgttattatctggaatcaactggcgaaaaaatggaatctttatcatgtaagcctgatttgcgatttttcactacgtaggtactttcatgaaggtaagtagcagaaattcggtgcccgtatcctgttgtttctggttgacgtcttcagatcctcaacagaatcgaaggtaaacaaactattttccctgttttccttgtgtgaatgatatgaaaaaatattttgcacttgttcagtaatttgtgcaaactggaaatactgaaaatactaaggacgaagaataatattcgaagccaatccaaaagcattgcaaaatgtcgaaggacaaaaactcccagtaatgcttgcatgaaaatagattaaaacaggctctccgcgaacaaaatacatttcttaatattgctcatttgataacgaggctggaaacctaagcttttttttgttatcaaatgttgcacatttgataataatccatatttcttaatattgtctgcacctttcgtttgcaagctccaagttgtaaaatccaatcctgactgcaagcttgtttacaattgtttggctagcagtttgaagcttctggagtattaccactagcaacagtaggagcaaggtctgatcgggtgctccctgtgcatagctgctattggttcattgttgttccaaagtgagcaatagtatactttagaaggaaatgagggtgttgaggcgattgtcaagcaccaaacttcttccgcaataaccctgacttccatgggaaccgttctgttatttgttttgctatagaatgagaaccattgtgtagaattttgtaaacaactttaaccattgcttctcagcatgcaaatgcagatccattcctttccaaaaggattaggtaccatttagttttttaaatatatgattagcaattgtctataagcattaggaatgagaagtagatgaaactatagacaaactttctaatttgtggtccttaatgtgccgttccattcattaattttgttatatgtggtactagcatgtgaatactataaagatgtgaaaattataaatatgtgacatacttatcattagttctatattaatgtttttgttacatccgatttacacccaatgattatttaacatcatttcacttggtgtgattttccctgttgcaatgcacggacaccctactagtatttataatttttaaacatatggcatataactccgcgaatacacaactttaaatttgtctttaacaaatataaccatgaacacggatactagtcagagtttaattcattgttttgttacagcttgtaaaaatccaatttaaccacgcatatttgtgaactgatatatctcatattatttaaaatatttttttatatctagataaaatgcaataaagcgaatgagaggacgcttgaagaggaaaaatcattattattattattattatttattattattattattattattattattattattattattattatttttattattattattattattattattattattattattattattattattattattattattattattattattattattattattattatgttgttgttgttgttgttgttgttattcagagctcatttcattcatcaagaaactgcagaattacaaccttcagtcactaggtgctcgatacaagctgggactgaatgccactcacccagcctgtcatcagcttcgctaaggcatgagctacacgattacaagatcggtgggtatagagtaaagtaaaaccatgaaaaccggagctaagctgtatggcatctctggtaatcggcgcagtatatatgccatctttggatgccaccctgcttccaaagttgtacttctctcgggaaattaacttactttctctcggccggcaagttgtacatcccatcccggcaagcaagggcctccatcatgtcatcgatgagagcatccaggccatgggaatgccatctagctacgccggccgccctagctttgaaccacttgatccaccctgcgggcggtggcctccatgtttgccgctcagcagtccgctttacgtacggggtctttgaaaaacaaacgagtaacgtacaatcgtgaatgaatgatttgatatgataaagggcatccgaggaggcttacccgactttacacagggagatccacaattaaaagagctaaaagatgaaatataagagaacaatgatggggttaaatagtagtggtgtcaatattccagtatccaaaactaaaactatagatggccaaacgggcggcacggcccaggcccagctgtgcctgggccgaggttagtgatcagggccgtggcgtgccagcccaaaggcacgacggtccatcgtggttttccacagaataagtctatttttcttccctcaactctgtgggctgggtccatatggctggaaataagtctatcttgtattcctcttctctttgggccctatctgatatggttcattaagtctattttacgtccctctacttttttaattcggtcatgccgtgccgggccagcccaccgtgccgagggtgcggcacgggcacgaccccgagttgggccgtgccgtgcttgggccaggccaaaatggcgtgccttgggccgggccacgggcctcgggccatatggctatctatatccaaaacacatacaattataaatttaccactgatttaaattgcacgttattaaatccgctgcctacttataatccaaggtttccttattaaatccgctgcctacttataatcccaggtttcctttgaaacgaagaaaaagggaagaatatttggtgggatttgttaagtaagaaaaaaaatccaatgaaatccttttcataaaggataccaaaggattgatccctatatattattttgcaatttctctactgccttccgtttcccctcctgtatatatatagggataaattcctatgaaatccttcaatgtccactatagggataaattaaggccctgtttgatttagcttaaaattattataatctagcttattaggagtaagctgaaacaaacaagtagattattatagcagattattataatctataagtcagattattataatctaataagctgctctaaaagagcttttttcagattattgagtggctaaaaacccactgcccctacatacttgagaaaaattacccacctatgccatcaaccgaacagatagctgagggcattatagactttagactttcaaacccaataatccatgcctccaataatccagacaaacaaacaactcacagcttattttatatcagcttattataatccagcttatagcaatctggtttaataatctagattataataattataagctgaaacaaacagggcctaggtctgatggaatccttccgtgtctcttcctcccaccacgtgcaacacgctctcaagcgttaagtatacataagcagatccaatgttttgtccatattgaactcatctctatttatatgggcctaatcctttaaaacgtaagagcatggcatgttacacccatttataatgagccaatccataaaaaagttttgattaaaaagagcacgaggttatgccttagttcctgcttgtttttctaatgtatcatccaaacattagtttggaaacttttctatggtttggtttctgtaatactccgaattcaacacgcatgacattttattggtacatttctattatgtttcagtgtttgaatcctgcattctaatggtgttttaagaatttgcggatgagaaaatgtgataaacctttaatctttgcttaataactaacgggaatgcccttgtgtgcgggggagaaaatgggagtctccggtgaaggaccacatgggcaccgccccctgtcatccgatggcctggtcgaggatgtcagacgatagacggtactccatctgtctcataatataagaaatttcagaagcatataatatatcctaatactttgaatctaaactttaataccagtctagattcgtcgtattaggatatgtcaaatccctccaaaatcctttatattttgggacagaaagagtaagacagaagccgcagtgtgcgggcaggaaaaaaagtgaaaatatatctctttttattggttttacataaatatacatgtttaaaagggattcatagaagtatgttgttgtcgtagaatggaagtgcgaaatcatgcattactgtacaacttcgcgtgatgaggacgcgataccgcttggggccacgcggcgagtgtgtgagaccgtacgatgctagactagtagaatatgtgcaatgtaggttatccatagcattgtgcagtgctacgtatttgttgcaagttatagaatttaaatttaaactggtatatttatgaagtgatatactccctccattatacaatataaggatctagcaatatatgagaaatactctagtactatacatgaatctagacaaacctcttatctagattcgtagtactaggggactgtttaaattcgcattattaggatgcgtcttatctaatactaaattattatattataggacgaagcgagtatcatatattcattatcctattatgtttctaaatatgttcataactattataatgacatgcaagcagtgatactaattggtgcaactgtgcaagcaacagcaacagtagcgtaatttaaatatgttcataactattataataacatgcaagcaggattactaattggtgcaactgtgcaagcaggaatagcctaagcatggtgatgaaatttgtcatagtttaagcaacaatagtttaagagatcattttccatgatctcctgatctcctccattgtcaaaggatggccacccaccacctcacatggtaggctataccattttctctgcatgccgcccatggtgatgaaatttctcaatttttctgctcagtttagttcacaccaaacttctctccaactcccaactttccatcacatcacatcacatccaaaactttcctacacacataaactcctaacttttttccaaactatcaactttctccaaacttctccctaatttcataaactaaacacaacctatgagataggagtacatgatattgacaacaatgggcagtaagtactcccttcgtcctaaaatataacaccttttaggtggatgagacatattctaatccctattttctataaagttaatgccattctctcttctctcatgaagccacatcacctcaattgcatctcttcacatcacctcaattgtttttagcctttggatgattcatcaagggcaacatatcctatgcacacaggccctcacgtgtacacacgtgcacactaactaaaaaatatcaccaaaaaatctagaaaaaatcatacacatactttcaattgtatcacacctagggttaaaatcttaacgtcaaattcattatattttagccataacaaaaaaaaataaaaaatctgacagttttaaggttgcaattttatcagaattttatcttttttgttattctctatgtagaatgaatttgaagatgcgactttgcacgtagatataatactattgaaagtacatgtatgaattttcctagaattttttgtgatgatttttagttggtgtacacggtgtgtacacgcgagggcctgtgtgcataggatacgctcccttcatcaaaagtgtaaattacatctcttcccccaaaagacacaccatacaacataaccatttataacctatggataattgataaagggacaaagatatataaacacatgaaaaaaatcatatagtaggtaagaaattttttttggaattcatatctactatattattacacagttctcccgcatcaacgcgcagggtatccatctagtattataaatctggactgccatgatacgacccgtccaggcgttccccctaaaattgttatactccctccgttcattttttatcattatattcggcttgtgcaacaataccaagataaacatcaattagcactatcaacctttcatgtccttgcatgcctcattgactgtccaattagttgtgattgcataaaatgcttgaccaaaatttctattaatagagctgcaaggcatacacgcaacgcagtatacgaagcatttttgtcacagtcccacctaatatgacgatcaaatatgaatttttatgttttgaaaatatgatgattaaaattgaacagagggagtattttgtacggagggagtagcttgtacatgcatggatgcaactcacggcgtggtcacagcgcccatgaactcctcgtcggcgacgagcttccccagcgccgccggagccaggcaaacctccagcgacatgctcccggcaccgcccggcccctcgtacaccgtcaccttgccgtcgaacttgttcgcgccgccgctccgcacgctcgccggcctcccccacccgaagtcgttgccgaacacgtcgaaccgcggcgagctccccgtgtggacggcggtgcctcccgccgccttcgcgaagttggcgaactccggcgcccgcggccacggcgcgatcgcgccccgcatggcggcctcgtcgagcgacgccacgaagcggttcagctgccacgccgtccacccgagccctctctccatgacctcgccggccgtcagcctcaccgcgccgggcacgacggcgttccccacgtaccccggcgagatgccgctcacgcgcccccggcaaccgatgaccagtacgtacgccgtctcctggcgcggcgtgaggccatgagctcgcgacaccgagcgccaaacatgagcgagcagggcctggagggaggagatggtggcggcggcgccggcgatctcgccgttcgccttcgccttgagcttccttatgctctccgcggagaaagcgaagaagcactcttgcaatggaggtggtgggtggtcgcgtcgcgggatgatgtgctcgagcttggcgaacggcagagggatcggcaccgggcaggtgtccaggaaccacctcttcaccaccagaggtggcgacggcgagatgtccagtttgcttctgcttcgactgatctccgaccatgtgttcatgaactcccagaaattggtgccgtcgccgacgacatggttgagcgacatggcgatgaacacgccgtcggagagctcggtgacctgcgcggcaagaaccggcagggagtccgccgcagcgaccgcgggaagcagcccggtgagcgggaagaaggaccagaccacccgcggaatgtacagcgaggcggcgatgtcggcgacggcgacgtcgggcgccgtggcgtggacgaactcagcgccttcgtcgttgcagcgcaagaacacggagatgctgctcggaggcgacgctccgtcctccacctcggccacggcgaggcggccggcgaaggggtagaagcggccgagtgcgcgagcgaacgacgacgccaggtgtttgacgaggtgctcgccgccggtgggcggcttgggcaggaggacgcccttctggatgtactccgcggtgagcagagggagatcccacggcgtcaggtgcaccgtcgtctcatgctccggcggcaactccggccggatcacgcgccgtgacacgacccgaacgccgccggtgttgccttccattttttggttgcaaccgtagtgatgagtgtagcttctagctaagcagatgatgatgatttagaacagcagcaaacttcttatctgattgatgagcttatggacatcaagtgagacaagtttattttttaacacttaatctgatagcgaatacaattgtagatcttgcatatttatgttatggcttatattatcataatctatctggattttttttttgcacaaccatttagttaagtcacatatatacacgatactttctgattctgggctgtgggggagaattgaagcaagtcgttttcatcccttgtgcgaatgttttctgttttttttacaaaaaatctttataatacgaacatatcttagtaggaatagcaggcatttttccacttttgtgtacaagtgtattgaaattcttgttgtgataatgaaagtgactcaaagcatagagatatcagatatacatgatatgatattatatcagcatatgcagcatgctgtgacagcaaccggagatgttttaattcgacagcatgttacgagtattaggctattagccaatgattagcaatccatttcaaagacttaatagtggatactggatagtatcatgtatataggttgcagaaagttcagtgccatgcatgcatcaatcaggtttggagttcagaacagcacacatcaaacaatataaactgcctaagaacaatccattttgtgtttcgttcacgttgagttgatgacattaatcacactgtctcatcatgtgatctaccgtacatcagattagcaaggtcaagttgggtcccatgaggcagtgacttacttttctgcatgtgggccaccaggaggctgttgactcgtcaactctagccatccgtcgttcccggcattcatgttctgaaactcatctcaaccatctaaatttgcagctgctgcaatatttgtacaagcatttgctaccagacgtgttatataccattggaaagttcgtagatcctaatttcgataaaggcaatttacaatcgattttgtgttctatgcaccaagataaggctgcttgaagatgggccgcggttcacggttcaggttcaggacacagcttgatgacaggaagacgattgttggtttattctcagcacaagctgcaagctcatttgaatccatctacagtactccctccgtttcagaatgtaagtcattttagtatttctcacatttatattgatgctaatgaatctagacatatatatctatatagattcattagcatcaatataaatgtggaaaatgctagaatgacttacattgtgaaacggatgaagtaattactatctactagctgataatatgaaagtttaagatgattgatcatcagaaagtccctggcatttgaatcctctggttgaactctggcatttctgaccacgacctcggcctccgtgggcatccttcaattttccttcaaattcgtctaaaaaccattcgaaatttcacttcacaaacatattgatttatccttgtttgatacaaaaggtaatccagtgatatctctgatctatcagctatagctgttgatgaattcatcacctttctactgacaaattgacataaatggattacatgatgtcgatgtgaatgtttttttttaaccaattgagctcgcaaatcgcaatgaatagaagcatgcatggatgcaactcatggcgtggtcaccgcgcccatgaactcctcgtcggcgacgagcttcgccagcgccgccggagtcaggcaaacctccagcgacatgctcccggcgccgtccggcccctcgtacaccgtcaccttcccgtcgaacttgttcgcgccgccgctccgcacggtcgccggcctcccccacccgaagtcgttgccgaacacgtcgaaccgcggcgagctccccgtgatgatggcggcgccgccgagcaggctcaggacggagaagaagtccggccgccgcggccacgacgccagcgcgcccctcatggccgcctcgtcgaacgacgccacgtacttgttcagctgccacgccgtccacccgagccccctctccatgatctcgccggccgtcagcctcaccgcgccgggcaccacggcgttccccatgtaccccgacgagatgccgcccacgcgtccccggcacccgacgaccaccacgtacgccgtctcctggcgcggcgcgaggccgcgggctcgcgaaaccgcgcgccacacgagcgcgagcagcacctggagggaggagatggcgacggcggcgccggcgatctcgtcgttcgccttcgccttcagcttccttatgctcgccgcggagaaagcgaagaagcattcctgcaccggcgcttggtgctcgcttcgcgggatgatctgctcgagcttggcgaacggcagagggatcggcaccgtgcagttgtccaagaaccacctcttgaccaccagaggcggcgaagtcgacgtcgacgccgatggcgagatgcccagttcgccgccgctacttcgactgatctccgaccatgtgttcatgaactcccagaaattggtgccgtcgccgacgacgtggttgacagacatggcgatgaacacgccgtcagagagctcggtgacctgcgtggacagaaccggcagggattccgtcgcggcgtgtgcagcaaccactccattgagcgggaagaaggaccagaccacgcgtggaatgtgcagcgaggcggcgatgtcggcgacggcgacgtcgggcgccgcggcgtggacgaactcagcgccttcgtcgttgcagcgcagcgagacagatacgctgctcgcaggcgacgctccgccatccacctcttccacgacgaggcggccggcgaaggggtagaagcggccgagtgcgcgagcgaacgacgacgccaggtgttcgacgagagtctcgccgccggtgggtggcttgggaaggaggatgcccttctggatgttctccacggtgagcagccggagatcccacggcgtaaggtgaaccgtcgtatcatgctccggcggcagctccttgaactccggccggatcatgcggcgtgacacgacgaggacgccgccgccgccgccggtgttggcttccattttggttgccaactccagagcagtgtgggtggctaagtagaggagggaagccagagcagtagcaaaattggtatctgaaactccggtgttttgtgaaggcaaagccgtgctacttctgaatttatctgaaaggaacaactcatcagcattcattcagaagagaaacagtcataatttctgactattagtatgctaggctgcctaaaagaatagtatggtactacatatctcaagtagaaagatatcagctttcaaaagagttggagaaagagcaaattccaaaagctgtcatttactgctgcaaatttcagtagtgaggaatttggtctggagggttgtgccagcttaatcctcaatctgaaatgaacacaagtgacataagttgcaataaaacttagcattgagcaatatttgttctcatagtaaatacaaattaatattatgattgaacagagacatttgctttgagatgaaattggatgcttctatctggattattctggcaatttaagcattgccaacaaactagagaaattagttgctatgaccattcatgaaagagaacaggaaatattgtttcacaacaaataaacagcaggcttatcagttcccttcaactgcctctactatttgatcgaagaggccaaatgatccttgctttctttttctttgagatcattcccgacttgatgcgaagggtagctgtctttccttagccgccggacagatagtaaaagtcaagagctagaggtgataggtcggatccttcctcttattcaagtcaattgtgaatgctgtgtacatacgtataaaccacttttttaattcttaatatcagacaagtaaaaacaattgaactttcattgagtaagtgttatcaagttttcctcaaaaaaaaaaaaccttggaaaaaaagtgtgattaggattctgttttgatgaggagaggtatgaacatcaacatatgcagtgacagtaacacgttagcaaaatgagaaacatgtcaaagggtaacagctaaacagtaataaaaattgtgtaattgtgatatggagaggcaacagttgataatacttcgtagctgaagaagagaagagcctccagttaaattcagtgcctgcgatgcgcatgcgtcagattttgcatttcagatcaatcgattctgccccaattctgtcgcattcatccgttgaacatttagttaagcgacactgtgtcagtgatgacataataatacaagtacatgattggagctcgcagtggatgtaattagcctgcagctgacgccgtggtcaccgcgtccatgaactcctcgtcggagaggagcttctccagcgcggccggagcatagcatcatcaggtaactgagctctctgatggcatgttcatcgccgtggcgttcttaaccggaaaggagtccagtccagccattgagcgggaagaaggagcagaccaaccgtggatgaagagcgaagcaacgatgccaggtggcgcagaatggacaaactccacgccttagttgttggagcacagctagatggagatgctgcttgggcgacgcacgcaacatccttcacctctgccaaagcaagtaaatggattataatgcaccagagcccaatactatttgaaatagtgaactggaatgattagatgctatgatcatttcgcttcatgaaaagagcaggaatattattaggcttaccagttctcttcaaatgcctctactgcttggctagaccctaaacataatgtcctcggttatcttgttctttgaattctttcacatcctcctggttcagaatatcgcagaaataaatcaaaaaaagttgtactaggcaactcaaatacaaatttacaaaccacagataaattgctactacctatgtctcaaaatataaggtatttttggctatgcaaaatagagtccagtatggtaaactagtttacttaatgatgaagcggataaatatcagaattcgaattgttacctcttgaaacttttcggaaagttccatggccttcacataaaaagcagtccaaaaataacctattccattcttgctctattactatccaccaaaagcttcactgcacttcacttcctcgctactagaggaatcagtatcagtcaggtggtcagatgacaaaccatatgtgacatgattcaggaaattatcttgctcgactggacacacgtcatattctgactccagcaaagaatgactaggaatcatatttagctccagggtgctcattagtgatctcactttagctagttctggccagcattttgctgctatatacatgtttgcaatcaatctgtaatgaccagggttgtttgtcctcatagccagcaacttctttgcagcccgatccccgatttccgtattaccatggattcggcaagcctcaataagagttgctaacattgcagcagttggttgaaatggcatcttgtcaattatcacctcagccatcttgagcaaaccttcacggcagtacaaatcaaccatgcaagaaaaatgctccactcttggtgcaataccaaatatagaaaccatcttggcaaatagtagctgcccctgagttactagcccagagtggctacatgctgatagaactgcaacgaaagttacatggtccggctctatactgttcacaatcatctcatcaaagagcttcagtgatacatgtccctctctttgcaatccataacccaaaaccagtgatgtgtaggcatgcttgtctcgaaattgcatcagttcaaacactctctgtgcaactaccatttgtctacatttggagtacatgtcgacaagtgaattttccattagtttagagctatccagctcatgcttaaggatgtagcagtgcagctcccttccatgacagaggtgtccaacccgtgcaccaagggaaagcatagttaagacagtaacaccatttggacagacaccaaaaccgatcatctctctgaaaatcaaagaagcttcctcgatctgttccatgaatgcaaatcctgcaagcagtgagttccaggttgtgatgctccgaactgagcatgctctaaacagaaggcaggcagagctcatcatcccacatcttgagtacatagttatcaacgaattcaccacgcactcaaggctatcaaagcatagacgaacagccaccccgtgcaactccctaccaacactcaaatacccggtcctaccacacgccttgagcccaatcacgatggtcacagaatccacccctgtcccatgatatcctctcacctgagacaccaacctaatcacttcatcgtagttccccgccttcaaattccctgctgcaaccgcattccacgtgacaacgtttgcaccaggaacctgctgtaaaagctcaaatgccttattcgacttccccgtcgacgcatacgcggacaccatcgtattccagctgacaacatctctcacagccattccatcaaacaccctccgggcatcctccagctccccacacttggcatacatccccaccaaagcattccagacatacatgtccagaccatatctacacctccgaatgcgctgctcaatgttccggccaatggtgacctcccggagctcgccgcaggcacgcagaaccgacgggtacgtgaacctgtcggcggcgacgccccaccccaccatcttctcgtacgacaagatcacgtcctcccacagcccacggccggcgtagccccatataagcaggttccaggggaacgcccgcgccttccccgccgcctgctcgacggcggcccgcgcggccgggaggtcggcgagggctaggtagaaggaggcgagcctggggaggacggacgggtgggcggccaggccgagcgtggcggcgcgcgcgtgggccagctcgccggggcgacgggcgcgccgcgcggtgcaggagtagaggatggccgagagggaggaggccgggtgcggcggcgagggcggcggcgattcctgcgcgggcgcggcatttcgccaaacggatgggaggcagcggcggatgcggaggaggtgctgcttgggcggcgaggtgggaggtcggcgcatcaaacggccgccgccgcatcacaccacggcggcggcgggggcggcggagatggcggggcgcttcccggcgtttggtttggcggcgagggcgccaaagagtaggcgattcctggggtttggagttcggatgtgttcttcctttttcaactgaaaaaaaaaaagtttctctctctctctctctgctattaatggtttatcacccgggatccatgaggactaagggtgccctttttaacagaagtactctctccgtctaaaaatggaaaaatgtaggattgaatatgacacagtttacaatgaatctcgataaagatatatacagattcgtagtactagaaatatatcgcattagtactatattggtttttttatgaggtaggggaagtatctacttgcattgccatattttggtaatttcccccaagaaactggtgaacatttgaattcatgtcaaaattttagtaattacaaacacttgttatggtattgctcattccaagtttccaactttggctttacccaaatttccaaaattcagtttgtctatttgtgttggtagatatggagatcggaccccaaacttgcctgtaaacattcaggatagcaggaatgacttacctttgctccaaaaaaaaaaacagaaatcagcaaggatcaagtgaaacattatagttgaacaaacaaaataactgaaacaaaagcaagacatacaaggtaaacaccagagggcaccaatgatctgtacttccattatattattttttctcttgtcatctgccaaaaaacaggtgtaagaatcaatttcaaggggaggatactctctcgagatatacaattggtggctgtggacaaccaaatcttcagcaaatattttcgacgccctatgctaagcttggacaggcggtgaatctctacaggaacaggtttccttttgctggtgaaaaccaaaccactgcaatgggtggaacatctagcagaaagaaacctctccgctttgacggcgcagaaacatacgctactttctattgtttttcatggctgaaatgggggctccacaacacattgaatcgcgatcctgagcgtttttttcgcctacggtctgccattctgggtagtgtacagaagcgattccgactggtctctctcgacgtgattcttgccctttcccatgtcgaggcgcgccctccgtacagcttgttggatctgccgctcgtgctctcgaaggatttcttccatgtttactccaggaggcattaatggtcctgagtagtggatcctgctcttcttagcgccattcacctgcacatacaggtttaatttctcagcatatgacaaaaatacaatcctgcactttggaagcatttttttccattactatcttctgtaagaaatagatcgttgaccttgataaatgagaatgtctcataatattaggaacaaagaaaaaacagtgcactccatatccaggacacaggccatttgtgatatttctcaggaataagaaagggccattctgtgaagagatttaggtaacatgtactctacattccctgataaaaaccatactcacatgttcactggtcataacttccaagaatgcttttaagggtaaatttcccaaagtttatctcagctttcaaggcttgaatactatggatcattctcctgatggatgttaggaggcaagac

SEQ ID NO: 18104 - DNA, 12695 bp, Oryza sativa
cttggaattggtgtgtccattcaggtctgtcagagggttcagcagcagcaagttgactatatcttgaactagatcgatgctctctcaaatattgtctcctggcactctccccaaggttggaggacagcttagtggcattgcctcgctgcccaccagttgcagtagacatctcagcagcagcaatttgagatgtgtaaaacctctgagcattctgatcagtgccacttgatcggcccagagtagaggatgaacgaccagcatgcatcagaggcgcacgctgagggtaaacattgtctccagctcttcctggaggatcaattgggaagccagtgacagcatcctcctttggaataaacttattactgctgctttttggattaagctgaacccgtcgttgctgcaaagatatggaacagcagtcatttgagaaagaagaacaacagagtttatatttcacaatcttgcaatgtcaactatgtgattaattgcaatgtttaaactgcagctactgtactggtaaacttccaaacaagtcaagagtcgattacattgaatcacaaattagttctgcaagactgctaccaagtactaactacacaaattcatgtatttatgtattaaatgaatacattgaaccactgggaactagcatatagtatttgaattcccataaggtttcaaaattctgcaggaattaataatattttggaagctcaatagtgatagtgcgtcagaaaaccctcaactctggatatccttaagaatgacaattatcatctaatactaagagaagtttataatctaaagataagttttcattacctgcaattcgttgttgccatttggtgctggaagttgctttctacgcccagcttcagattcatgtcctttaactgcagctgctctttgcctgtgggcaaaacatgaacttaggtcaaataaagaaatcgccagcaaaagaagatagataccatatattccatctagtcaaaattcatctttagttctccacagggtttaccttctagcctcctcgtctcgaagcttagcatcatattccttgcttggaggatatttaggtagacttgatggatcacaagcataaggctttgtcgtgaagaactacagtccaaggtaaaagggttaatattagtgcgtcacaataaaaaggccagttgtagattatacaggaatagccaaatctctatgaattaccatcaagtaaaaaggaacagctcaaaatgttgttgctcatatcaacttaaaagatgtttcacttctctaaataattccatgccattcacaaacaacatatcatacgagaagtgacaataaacagattcataattaagactcatcaaacgaatattgtgacaatgaaatttacagggagatggacacaaaaggcagatttaacataatgtgtgtttccacatgtttttttgagagaccatggattctccttagcacaggcatgcaaataaacaaatttcagggccagaacttacttcgcttccaagggccgaagcagcagtacccctattctgaggttctacagcaagtaaacaatccaatagcgctaaagccggaggagggaaatccttgtatacatcattcacacatcgacgataaggatgttgtggcttgaatattgtagcacgtgacaacttcaaattagcccagaaatcctctgatggtgaaccacaaagcttaaatattttgtgcaattgttccacctgaaagaatgtggacaacaaaaataaacatcgcaaactcatagattattaaacatgataaacaatatgaccattcaacactaaagtagaaatttaatgtggaatattgttaaattttattggtattcgtccatgtaaaaatagatctggtaatatgcagtgattatttatcacactgaaactagagctaaccattttaatttataattgtacatctggctgtacaaactacaagctgatagatagtaactgatcaaaagatctcaaatgcaaggttcatagtgtcgagtattctgtattcaacaaaggtgcattcaccttcagcagcttcattttttttagtccagcataattcaggtttgtccggaagtgcaatacaagaaatggcagatactgatatactttatgcaaggcaacatcaaaattatctcagtagataatactgtgttaatcttaggttgcaagtttgtccagaatatgaatagctaaacaatacctctgttcgccctggcatgataggcttcccagacagcaattccgcaagaatgcaaccagcactccagagatcaacagcagcaccatagttagtagcacccagcaatagttcaggaggtcggtaccataatgttaccacacgacttgtcaaatgttgcttttggttaggattaaagaatgtggctagaccaaagtctgctattttgagaacaccattgttgtcaatgaggagatttgcgccctttatatcccgatgcaaaacaccacgattatgacagtgttcaagtccagagagtagttgttgcatgtaacacttgacctaaaatggacattttccatagtgagtacaacatcgaaactgacaacacaatgaaaaccaaagaacatgtcaagagggaaacctgaggctctgtgaactttatgccaggtgtagctgcaagtcccgctagatcatgctccatgtattcaaatacaagatacaagctactagacatgcgcgacgtcaccaaaccttcaagcttaataacatttgggtgatcaagtcttcttaagatgtgaatttcccttgccatgaaccgcacgctctcagggtccatgttggcaaaccgaactttcttaagtgccacaatttttccactctcaagatcacgtgctttgtaaacactactgtatgtaccttgccctatctgaaatatttaaatgtgaggatgagaaaaggtgtagttgcattgaatcagtaggtcaatagcaatttgaattctcatcaatcgctgcaatccagttgacaaactacaccactctatcaagaatgtcattactaaaatagttctagagacatgtctagtttagctcataacagtcatatgccatcggtaaactcaagcacttataaagcgagcgatgatactcaaccactaataagcatggaccacaatatacatggcaaatcaaggtcctaacattttatgaaacaatatagtgaatttgttacaaaattaaagatcggcatagagatatgaaccttgtccaacttctcgaaagactctgccttccgaggttgccacccacggactgcctctgctgcgacctctgtgagccaccttggccagccagctgccgcatgccccccctgcactccattgggcacaacatctgtaatcctcggtttcgcctcactccttgtaccaccactcctaggctcttgctccgccgcgccattcggagcacgcctccaattcgcaggcgcggcaactggcctctccacatcaaccacgctaaccgccacagaagccgcctcatctggcaatgcagccacaggcacagccacagcctcaaccaccggcgcggggggcttccggatgagcctagccgtgctcacatcattccctacacgatgtccagcactggaggaggtggctgacacaaccacaccttcttcatcctcctcctcaaagtgctcatgcctcttgctggaattgtaactaacaagacgcctcagagagttgctagatgggcgccgccggggcttcccctcgccgccacgctgctcctcgccatggaattgcttcgaactgacacagcccatagaacgagtgtggcgatccgggcaagagactccactccaaggaaaccccccaaacaaaccaaaaccaaaaaaaaaaaaacttcaagagatcttctcccaatacgcctcccgcatcaggtcacgcatcaagaaccctcattgctcgcccgaattagagttgaaaacacccaacacccgctcagatccgaaccagaacactgcacccgcgactccctccagtccagcaaccgccgaatcgcccaaaaccagaagcagaagcgggcgggccacgaactgccactgttaaaatcgggatctttctctatcacttgcagaaaccagcgaggccgcgccgcaagggcaaatcggggctgggcgaatccggagacggggatcaaaatcgaacctttttgccgccggaaatcgcgaggcagcaggagatctctccctcctccctccctccctcccttccctctctcactgaggtggccttttcttggcttgtttttttgtttggttttctggcaactactctcgctctgcttccttctccttctgtctgcttctctttcctttttctttttcttctttttttttttgcttctttttttttgtctctcaaagtcagcaattacgatggttggtgaaaaaaaaaagaggagagagaaagagagagagagagtaatggtcagagagagggaggagagagaaacgcgttagtataatacaaaaggaaaaatagttaaggcagtagagtactggagaaggtctcttggtgctgggacggcttggaatttgaatttgactgtcactactatctccgttttttaatagatgacgctgttgattttttcttacatgtttgatcattcgtcttatttaaaaattttatgcaaatgtataagatataaatcatacttaaagtactatgagtgataaaacaactcataacaaaataaattataattacgtaaattttttgaataagacaaatggtcaacatgtgagaaaaaatcaacggcgtcatctattaaaaaacggagggagtataaaatttgggatttttgattgggtttggggactcaaaaatgttctctcagtttgcttagctaggttagctttgattttcttgtggttttgtcaaaaccttagcacctagtaagaagattctaacttgaagaggaggtggtcaaaggtctactgcatccattggggattggcttggttatggatataataattaattaattactggtactagtataggaggaaaagattaacaagctagctacagcaagagaaacaaaagttggactccggattggaatatatttctttctaaaaaaattggaatatatctccaccttttcaacatccatccagctatctttgttactgattatctataaaaaaataactttgttattgatttccagcaagagaatttaattatgtatctgttaactgatccagctatccggcaagagaattttatttccattatctattaaaaaataactttgctatatgccattattgctatgagcattttaacccatttctggataatagtaacaacaacatatgacaatgataatatttttatttaaggaataataatagtttttttctgaaagattggacaataaatatggtgacacaacaccagatcatcacacgtttttccaggacaaatgcgacgaacaatacatgtgaccaagcaaccactccagagccatctggccaagatgcaaatgtcatctgacagcaacgtcctcttatcaatatgatcaaggtgtaagtctccagtagatttccactgcaaaaacacagattaattagagggccgtgcaacgaaaagcgagtcaaaaaagatgtgcatggtcaaacaaattctacgagccactaaggctgtaataattgtacttatagtgctgatgattaagatttttctgcggtcatcacacgtcgttgcaacgggtattacagtcttatttctcttggttgaaattgaatatgaacttagctagctagcattgcgaagaaagatttatctttctttggatagaagattatttagaggaactaggggatttgaactagttcctacaaaaattacaatttttttcgctgtattaattacatgaaaatgtattgattgtttgctcttcaacttcaacttattggctgcagctaaaattaaattttaaaccttaattttagagttgattctgattttttttattgttgttaatttttcagcatgacggttgcattcgaatgatggtcactagtgtcttgttttggttacagttaattatggcttgcaagcaaacagataagcctttttttctagtggtatgatcagtgcggtccttgcttgtgcttgcaaacaactctttgtgattgcctgaaaggaaccaacacaaatagtagtagtagtacgagtgcagcatcatgaagaatcaagtggttaattaagcagtggttagttaatttaacgccaaattatgtttaagcgaaaggaagcatgcatctgttaactggtaaacatctgaaggagacgtaaggccagttagactgtagctatctaattatgaagactaattccaagcttaggaatcgctatctatcacgacaagaaatcaatgacaattaaggtagcctgccgctcctgggcctgcaaatccatcatcagtatttgggatatcaatgcataaaaaagaaccaacactagcatactaaaaagaaagaaagagtagtttatatcaatgttttgttgaactacactattttttaagtgtaactttgtaataattggctgtaactcgttttgatcaaattaaaagccggaatattctatttcattatctaaaaaatgaaatcgagagagagagaaagagtgtgtgtattttttttttgtgatataagcagaagagggccatcttttgaagaccttaaaggcccacaacatctaacatggtggcccagctcgggccactcttgtggcctgttgaggggatgcattgttcgggtgattagaacgcctcttcatttttagagttcaattttggttggagcaataatagtagcactaaacttccgaagtgaagtggacaatttgcaaacatgctttcctcgtgtccacatcccaacactctaacatcacaaaggtaaattttgtacaacatatataatattcctctacacatgagctccaaaatatatggtacatgttatttggtgatgaatttgatatgtagtgaacgaatgcttccagcaccgatgatattgttcctaatcatatcttgctccatgtctgtccggggaaaggacaatggcgtcacagtactcgcaaggcttcttgtcatgcaggtacaagtcctcagatgttgtcagctccgaattaagttgatgatccggaggtcggtaatggcggtgtcggcgaggagatcgctcagcctgaatggctatggcggtgtttgccagagagagcgtggtgagacgacgagggagatggccacccaagtgcaggggcagcatggagccgagatttggaagctagctgacgagctaggtcgggaagccattggaggttaaccgtggagaagatgcagtaggtaagcctgaaaatgatcacaacttatctcctacagcgtgctcttctctatgtttgatgtttggcacaaattcgcgccgagggcgtatgacaagagagctgaaaaataaaacatcacgagaaattttttttaaaaaaatcctacgaaagaagagaagcaagcatcactgttcgtgtggatgagcttttcagagactgtagacttagggggttcggagtcaaaatcaccgaccctcctctgatcataaaccgtttatagccacacttaaatcgctgtaaaattatttgagagatactatcatagaatgttgcaccatggtacaaagtttctaggtgggatataaaatgtacgaggagaaattcgaaggcaaaagatgagcattgctttgcatcttcttcttccatcgatgttaaaggttcaaaagcactggaaggcagtgcaggttgatgcaatcgacctgaaacaaccaacaagctgaaacaaaacatttaaatttgatttggttggggtgtgcctagcatgagctttagtgcaacgctttgcaagccactatggtgaaccctctccccacgaaaaataaatttaatatcaaagtagacacatggcccacatatcagatattaaactgataagaacagatactacacttgatcttagccaaaaggccgagaaaggtatgagttgcattgttggatacccctgcttttgtagcctctccctggtactactctccttgatcctgcgatatggtacaaaacaatactccttcctaacaaaacatatagattatagcgtcattgctgtgtttattctcaaatgggctggcggcctgcatgagattagacccacgaaagcccaatacatccttgttcgcgaggacggcccagcccagcccggcccggcccatgagagcccgaagaaaccaacctcatcttctcctctcatccccttcctctctctctcgccaaggcaacttcttggaggtcggagaggaggagaggtcgaggagcgaggcgaggatggggcgcaagaggaaggagctgctgtcgtcggcgccgtggaggacgggggaggcggcggaggacgatgacgaggcggcgaggctgtcccgcgagggcaaggtgagcgtcaccagcaaccccggcgagacgcccaccatgcacgtcccgcgcaacaagcgccaggacctcgacctcgccgtcgacgacttcgacgaggacgagatcgaccccgagctccgctactccttccagcgcaactccagggtatcccatccacctttctcttcttctccccccacgcaatctttttttttcttttttatctctttatctggtgacgtcgcgctattggtggttgtcgaattatacacttgcttgatgtcgattgaaattgtaaattgaaaaatattcgtcaaaacaaacacaacaggattagtttgtttggttcaatcgactggtgaattgatacctgaaactttttgcacaaacacaataatgcccaaattaaaatatgtgaaatatattgtctcaaaacaacaggatttcactttgttggtaccctcgccgccctaagcacaggaattgagctggaggattaaccggattgctggagaaacttataaactgttatcccctgaagggattcacacgattccatgtagcctttaatccctcacgatggtgaaatctgtatatgccctcttcttgatgttttcatcttcatggaaatgcatggatatgaactattgatcttcatccacagttttcaatttcatgatctaatttctcaatactgtgttccagaaaatctttagaatgcgattgatatataatgtcgaatatgctatcacatgtactctcttcgtcccataaaaaaccaacctgacgtgaaacatgctagttgtactagaatgtgtcagatccaatcctagattcgttttttatgggacggagggagtatgtcactactatgttgtagtatatttgtattagatcgaaaggccatgttctgcatactctaccatgcattgtgtgctacttattgcagttatgaattatcattaaaatttatgctctcttgtgcattatatagtccctaatcgcctttttttgttgctacttgatctatcccatcatcagagcctgaaaacaggcatttaggtatctgtttttcctcaagcccccagaatggattttttgccttttttgtccactaaattctgctgtgacgtactcatccatgttttgtgcaaactctatgcgcttcacacagcctgaaagtcaccaatcacatatgttggccccaatggacacaatatgtgtttgtaggtctgcaaccagaaaggcaaaagtgccacttggatagtaacaccatagtaccgcagtgcattgtcactagttccaaccatggtccatgacatatggtccttgatgtttatagccaactgtgtttttttattgcacacaacatatgttaaaccaccttgttaggaaaagagtacttgtctacatgcttatattctttttccgcggtgtactcttaagtatttaggatcactttaaaagtttaaatgatatcactgcatttgtttgggataatgcagcaggataagcaattacaggtttttaatgtcttagtggcagtacctccattacatgttgaatcgttgtgcatgggttgtattcagtacttccaatttataatcctatatagaagcggaaccatgataataaataaatataaaacgtcttccttattggggacaattacttattctgaatacttattgcctcttcagtgacttcatcagttcttggttgccgtaagtaatatacagtgcatatttgttgaattatctgacaggaagactgctgtttttgcagtttctgcggagagtatttagtgtggatacacttgtcaagcctcttcctcctgtgatggcatacagtgtttctcgcaatgtgaactttttcttcaagatcttcacacagttctggggtaagctctgtcaaatgttattagcagtataacattggatgaatgctactggtgctccctgtttatttttatggtcctattctgcttgttgttttgtttattgtaacttgtttgccttggaattcccatgtattcttaagaataagggacagatggaaccaaaagttcttttgttcactgagcttagagcattctataatgtctggactatgtgagataaatctgcttatagttgttaaatatattattgatgtccttgtccaaataccaagggaaaaatatttcataagcaaatattacttattattcttaatttcactgatttgttgtttgcagatcaatatgtactcctcccgtcccaaaagaactcagcctaggataggatggatttgttgtcctaggatatgtcacatcctatccttacgctgagttattttgggacggaaggagtagtatactatagcagcataatatgtgtgagaaatcagggatacctgcatctagcccacttctacaaaacccaccaccttgtgtagatcatcaatttgtttttcgtttcttgttaaatcttttggtgcatctcttgcagatgaagagggaattgccaatgcacagaaatcccttggactggggaatgaggatggctcccggcggcgttgaataccattttgtagcaaaaccaagctatgcattgagagatcttacgctagattctggaggcctttgttgtatgcctcaaatgacacttggtgtggtctgtctaagtttggttctagtgttcgcgtcttgcattttgtgctagtaaagttggttgcgtcatatattcagatgttgtaagcttcgagacttgtactcagaaatctcgttctggcttctgtttaaaaagttgaaaaggggaaataatggcgtgtagttcatttcctattatgatttctgaatcagtttttttttatcaatctgaatttagatgtcatattttacaatcttcagtttctgctgatccttcatgtcagtttgctcactgggcatgttatttttggacgtcaatataaaaaaattgctaatagtgaacaagctcgttgtgtttcatacatatatcgtgtgtgcagcaatgctgatagcgtctcttactaacatcatccctgatggttgcatcaattaacgatttataaaatgctgagcggaagaaagctagagtttctattgattcgggcatttctagagcttagtttctgtagctagagactagtatagctgtataggacagactaaattcaatgaaactgaaaaaatatcctgggaagttcagtcaaaactgaagagctggagactagtgattagtgaagagctagatactatagcagtaactcccaccgtcccattttaagtgtaatcatggttttcagcgcctaactttgaacgtccgtcttatttaaaaaaaatttgaaaaaaaattaaaaacataagtcacgagcaaagtactaattataaaaaaatttcaaataagacggacaatcaaagttaggtacaaaaacttatggttgtacttaaaatgggaggatggagtatatgacagactagtaaattcaatgaaacgaaaaaaaatagatgctgggcgtttctgtttcttagttttttttctctctcgaacagtttctgtttcttagtcaaatgaaagaagatcatttcgctttttcttttttcctttttgttctccaaacaatggtttgaggggcaaatcatattgtccacatttgttggaccagcaagagtctctaactagaaaagctaaactatcagcataatcattcattataagggatcagatcatcgacaattctgcatttcataggcaggcatatatttttttttcctgctttgtactaattaaccgaccctgcaacttaacaagccctgcattggttgcttttggtgttccaagattcagagcagccaaaggcagtggtcctgaatggttatgcactctctgcctttgcatcctacaaaaaggccctctctttcagtctttgcaaggctaatcactcactaggttttgctgtcatgtcttgtaccattgtacgtcgatcatgcataacaaagattggagaaaattcagtgtactatggcagacattagtgagtgtgccactagcaatactggcaaatctttgtttgtttatgtagggagattagactaggttataggtcccttgtggattgtgcatgtgattgatccaccatttacctttactccttgcatagagaactcacaagatgagaa

SEQ ID NO: 18105 - DNA, 2273 bp, Oryza sativa
atagagcatctcctccacacagtgtagtccatcagaattctcatgcgcatgtgaaccgtgctggtcatgaagcctccattaagcaatcttcagaaaatgctaatggttctgcatcagatgtttcaaggttatctcttgcaggttctgaaacaagagagtctagtctggaagaaagaaatgctggttctatcggtcaaacttcagaacagtcaattgaggaagcatttcaagcatctaatttggacagggattcacatgaccatgtgggtagttcttcggtgaatggtagccttccaaatagcggtcaacttgatgcagaatgtgacaatgggccaagcgaaaggacaaattacagtagtgatgcatctggagaagttacagatgggccttcagcatcttctgctcctcagagggagcatctaatcccttctagattggctgatgttcgtagtagaggccaatttgttcggcgaccatctgaaaggggtttccccagaataatatcttcctcatccatggatacacggagtgatctttccgccatcgagaatcaggtccgcaagttagttgatgatttaagaagtgattctgtagatgttcaaagatcagcgacatcagatatccgccttttagctaagcacaacatggagaacaggatcatcattgcaaactgtggagctataaacttgctggttggtcttcttcattcgccagattccaaaacccaagagcatgccgtgacagcccttctgaatttgtcaatcaatgataataataagattgccattgcaaatgctgatgctgttgaccccctcatccatgtccttgagactgggaaccctgaagccaaggagaattcagcggctacattattcagtctctcggttattgaagaaaacaaagtgaggattggaagatccggtgccatcaaacctctcgtcgacctactaggaaatgggacccctcgaggaaagaaagatgcagctactgcattgtttaatttatccatattacatgagaacaaggcgcgtattgtgcaggctgacgctgtgaagtacctagttgaacttatggaccctgctgctggaatggttgacaaagctgtggctgttttggcaaaccttgctaccataccagaagggaggacagcaattggtcaagcgcgtggtattccagcccttgttgaagttgttgaactcggttcagcaagggggaaggaaaatgcggctgcagcattgcttcagctatgtacaaacagcagcagattttgcagtatagttcttcaagagggtgctgtgcctcctctagttgcattgtcacagtcaggcacgccacgggcaagagagaaggttagccatttctcatcatttcctctttcaattagaaatgcagctaagcacatcctgaacatttatgcgaaagccagacattttagtcacaatgttttgaacatgctgcttggtcttacaggcacaggctcttctcagctactttcgcagccaaaggcacgggaattcagcaaggagatgaccttctcagaattttttgtaggtatacattaagcatctcctctgattccttcaggcatcggcttggctcctcatattgttgttgttggctcttgggtggccctatgtattgtttatagtcaaattgagattgtgctcatgtcatacaaatgttgtgagcgatgggttgggtgtttgttgttgagatggtgtaacttttggttctcttttcttttttgaaggatatctttgttcttgtataggttgtccattggtagcaacttacctattcaatgggattttgctttgtatatgctattaaccctgacattatgattgttttgaatggttgtaaaattcgatattgccctgcatgttgtaccagataacaaagcttcatctgctccgatgcttttcgtcatggcgacccttgaaatcgggatatgagaatttcatggcagtcctgagataattataattacagtctaacgcaataaggccgtgtttagttcccccaaatttctaactttccatcacatcgaaaactttcctacacacaaactatcaactttttcttcaaactaccaactttctccaacttttcaactttttcatcatctaaacacaagcttaacatcattttgcaacgtgctcctagtatgtggtatccccataaaaccagattgatcaactacacaggaaagtttgtattcctgttccaaccaaaatatctactactcttctgaacaactactacttatctag

SEQ ID NO: 18106 - DNA, 5893 bp, Oryza sativa
ctagaaattaattaatgagatgagctaattatctcgagaagtcaagatgatccatcacaaaccaagaaagtcctcttgggtgtgctcacaagcttcttcttctgctgcctctgccactgcaagtgggccccaatcaacccccctcctcctaccctacggcctagccctagcttcgtcacctccatgccgccatggccgatcggcaacaccatcgacctgcccttccctaccacctgcccatagctgcaaaccctactgccatcgccatggccagacctcgagctccagctcgtcctctcttcttggaagacgttggtgaccacgacgatggcacccatggggtccacgtccacggccccgagcacctcgccgcagcgctccacgccggcgtccacgacggcgaagtcgacgcggcgcagccgccggacggccgccgacggcgacggcgcgagctggaagtccaccgcggaggtcgccaggccgaggcggcggaggtggcgcctgacgccgtcgaggccttgctggtcgtcgcggacgcagaccaggcggcctcccgtccgcgcggcggcgatggcgagcgcgacagccgtggccggggatgacgacgacgacgacgaagcgccgcccccgccggcggaggaggcgacgtcgaggaggtggcgcgcctggttgccggcggccagcgcggcgatgtactccatgctcctcggctccatcaccatgccactgccacgagcatcatcttgctgctgctccttgcactgaaattattaacaaaaattcaattagtttatttacacataaataaatacttcttttgtttcataatgtaaaaatttctatcgttgctcatattaatatatatgttaataaaaactatgtctaaatttattaacatatatataaatatggataatactaaaagacttatattatgaaacggataaaaaaacttatattataaaacggaggaagtattgatcaagctaaattgtctttggttgcatttgcaaatgctatgtagtacgtaccagttgcagggtgtgcaggtaggcatccatggcgagatcaggagaccaaccagctgagactagcttggacattatcaccgggagaagatgaagctggagctcaagatcgatgcagggtcaagatactagtagtagtagtagtagataatgtgacacaaggccaaggccttttataagcaacggcgtaattaagcagagtaaatcatggcagtttggacacgtttgcatctagcagtctccatcaatcgctcacacatatgtccacgtacgacttcttttgatacagctgaccggagtactgtatatgtgtccgacagcaggccgtatcctccctttcaaaatagattttttttaaaaaaaaaacacaaacatcgtcacgaatattaagcctcacaccttttaataacactattgagctaacaaaacaaaaggactccaacacctcacaaccaaaccatcgttaataaaaaccaaccaacaaaaagacaatgaaagaggatagtagacctctaaaacggtatcagctctattgtactccttctgtcctatattaatattagttgtcttcctaccatttaaattttgtcccataatacttatcactagcagtactacttatcccattaatcacatcttattcaaatttctctccattctccccctcaaccacccatccatcctcatccataaattactttataagggtattatagtctttttgaactttttttcaaaccttagaatataacaaacaatcttaaaagacaagtaatttatgatgaaggaagtaggaacctactgcccgcttaaggcaaaataaatagacactagttaggtcccttttttatcgagatacaaattttattccggttttcgttagtgtactttttaaattgctaaatgatatatttttgagtgaaaacattttatataatcgttactttaaaatgtcaataaatttgttttttaatttgtaataattaaaatttaattatgctaataaacatttaatatcgaacgtggccttagtattacgccgtatgaattctcgttaaattaagtgatgtctaacgggatgccaatggagtagcagcaaaaacgactcaaaggaatcccaactaaccgaggctctcgtggcagcttggcaatcaagtggatatctccatcgactatttgtgatgtggtggtcaatgtcgacacgctactctcgtggcggcgacgccgtccaggcccggctcgccgtcgccggccgtatgcatgtaacgacatgtgaagttgtgatcaatcgatcatgtgatgctgctaagccgtcttcgtcgctctcgatctattagagcagttagaataggagtctattagccagctataaatatattttaataaaataaaagatgaaagagaagagcagcgggctacatatctatagccagctacagcatggactctaagacgcagtgtgtgtatgacaggtgggatcatatattaatagtatagtaagcaactattatataaattggttattagattggctatagatgaattggaggttgtagtgggctatactattgaacttgctcttatcggatcatgcaattaatgaggctgcgaaattattgcgtctggccggcgcctcccttccttcaaagggggaagaacgcgttatgcgtgggtgccactactcacatgaatcctgatcccaacccttctgcgatgaaaagagatggtcaaatttagactgcaaaatgcaaattaatcgcgtcaaataaacccagaatattgttaacttgcgtcttctagttaagacgaggcaaaatcatgtacatatctgtcttcatagatgctgcttttagatgccaagcagttgggttgtttagaaaatgggtgtaaagttttaatgtgtcacatcagaaattatatagggtgttatatggggtgttcggtactaattaaaaaactaattacagatccgtcagtaaaccgcgaaataaatttattaagcctaattaattcatcattagcaaatgtttactgtagcaccacatcgtcaaatcatggagaaattaggcttaaaagattcgtattgcaaattagtcgcaatttgtataactagttataactagttatttttttaggctatattgcttcatgtaggtgtcaaacgttcaatgtgacaggatgtaaaatgttagtgtggaatctaaacagagcctcagcttactgttgttcatgaggtagtatttgatactcaaaaaagctcttctaacttttcctacttttgcgtacagtgaccaatgaccagtataaagcatatcttttcaacaatttttagttaaaacttaccaaattaaacttgcaacacataaactgatttccagtttgatgggacattgggttcctttcagacattgatgcaaaactaattagcccgtttcctgtgaaatttctatgctaaagcattgtacgcttgggtggactcccctgccaattggtcaaaactaatctcttttctttttccatttcctatatagccttatttgtacatgtacaacattacattttctttagtttagatacaaaagttgcacggcaaccgggcagattttatgtacaacattcacccgggtgctccgattctgtggtcaagtatgaactatgaaccacgcatctctttatctaagtgttcctccatgtctagaatctaccctctcagtgagattatcatagcatatcctgcagaaaagaaagagatgtcgcattgtgatttagtatcattcatcaagagatgcaaaattaagcaggttccagccaacctgccaaaagatcagcatgaccatatcaacacgcctgaaaagagaatgaaaagaatacaattgctcatccataccatcaggaagattcacagcttgaatcgttctcagattttcttgaataagttctcacttttcttgagaattccttaactaatgaattatctgaaaacgtcaagggagtctcttcagcaattggatccctcacataaaacagtcgaataggcatcctttcaggatcatcagttggaggttcttcaggtatatcacggtacagatgtttgagaatgaaaagagcagtatcatgatctcgccaataattgctacaagaataaacccacaggccagttaaatggtgaacaggcatgttaaacaattagcaaacaacaggattgattatggaacttacgtatgagatcccagggcagataagtatgggtgttgaaatgttttctcctgaaatcaaatgattcggactgtaagctacaacatatttgtactgacataaataatatacaataagccagaaaaaaaaaggggggggggcgcaagggaattggtcatgttggcaaaagggttcgcagtcctgacacagtaaccactaaaccagcggagacaggggaaccagccaattcaaagcttagccagtggttatatgatttccactgtcagttcttttaggccacagtagttggttaagataggttagctaaagggttactgaacaaattaggcatattttaaatcatgtcctcactcatttggtatagaagtgcatttaatagtatttaacatcttggatttatgtgctcttttatgagccaaaatttaaccaacttcagagtttatgggtttaactctcttgtgaagattaaccttgaagctaatttagggtgttaaattaatcacttatattggttagaatgatttaagctctcaccattcatgtcaaaagcaatgtacagtacttttcacatccaaagcagagtacacaatttcaatgcctatacatacaccagcagggagtgaaattgaacttgctttaataggaaaagtttaataacctgaagtacatggtcaatccgaccatctggtgaacctgtcagcctttccatcatcatgtaaccatatgacttctctttctcattattgctgtcaacgtcctctgaacaaccaaaaacatactcagagcattgttttttgtgacttgcaatgtgtagaagacaaaaaaatctactatatgcataccgtccgtgtcatttctgctcagtgatagcaaagcagctactgctttaacctaaacacaaaaaaggagattaaagtcccaactcattaagaaagagctacgtgagcagctatgtttctagatcattcacaggtaacaaagtgtctatgtaccaaggcccgcctaaattcagccatgtctcatattaccatcaccaaagagcaaaccttaccttcagtgacttgaactggcgagcaacagcttgagaccttgcagcaatatcttcagtgaattcctgcatgacatgtcaacctaaatcagataaatcagataaacaagagtaatttactataacagacacactcgcctaaaaggtgtccaagaatatactgaatcactcacctgcactcctacatgtatcctctttccccctctatggtagggtacaattacagggcgcttgcttatgtaatcttcacatacaagtggttcaatcctgtataaaagccaacttagattcatgagacatgctcctcgctttgcaacagataaggacagtcttctccagtacataaagagaagtgatgaaaacatcattaatatatgtacgaaagctgcaaacctgtatgctacaggatcaaagggatgaaaaatgttgaacatctgacggcagcatggcatctcttcaactatgttctcattttgccaataatcttgccccctgcctttagaagagattacaaacttcagaaataacatagcaaataatcaactgtcaattgccaggaatgataacagatcatgaatccactagtcaaagcactggccag

SEQ ID NO: 18107 - DNA, 4010 bp, Oryza sativa
tttcagccattttactgggcagtttttatgcctcctgaacagagcacagatgatcttgtactaacatttaaatctgcatctcaataatttctaaaagccttgtattagtcgtaaaaggaacagggtatgagcactaagaaatattatgtagactagagaaggactataaaatggtatctgagtttgtgtaaatgtaaaccaaagctgagtttttatgcctcctgaacagagcacagatgatcttgtactaacatttaaatctgcatctcaataatttctaaaagccttgtattagtcgtaaaaggaacagggtatgagcactaagaaatattatgtagactagagaaggactataaaatggtatctgagtttgtgtaaatgtaaaccaaagcagacatcacaaaaggttggttgctagtccagaaaaaactgcatataagcagaactattgtcaaagttaacataccaataccaatgcgaacattccgcagggacaagaaaactcctaagggggatccaacagcatagaatgtgtcaacctgaatagccaaaaatggtgtaagcagcataatgatgtacaagtaaatagattattggatattgatttaggacagactaccttaaaatttagtttagtgtatctgatgtgtggtgtgtaggactcactcgtgcttccttgccctatgcggtttttgcctgatgataggttcactgcatgagtggcacttttacctgatataaacatgcaaataaaccttaaggaagtgcaggtgtattgaatattcgaatataacagaccaaacacaaacaatcaccttgatgagactcagcactgctttcagtcaccaaatcattatgttgttcaagttgtgctaatctagctttaaggcgttccacctacagtaagggcagaagtgcagggatcaatttgatatgcaagtttatctctcgctgttactttgcttcaagataacactatcagttagggtgttgcaatgagttcttgcattctattttatacattactgttgaccatttctcccaaggcaaccaacatttagcttgcttatcaagatagatgaatagaagatggcaggtacattataagttagataaatttgataatgccacacctcttctttcaatgatgatatcaatgtatctttgtcagggacatccgcatggactccctcagcagatcttgaaatgatacaactgtcaatgtcttttgctcttacagatgaattgtccccttcttcactgcatgcaattttatgattgtcgacctgtttttcgacttcaatttgttctccatctactgctgtaggtagtgcatctgtggtaagtttcggtgaattttcaagtgcacatgttgggagggtggtgtcctctgtacatgaagtgccagttctggtgctcccttcatcaactacatcatttacattatcagcacaagaatgcccagaaatggaagatgtatcttgctccttcatgactgattcatgtgcagtaactgtgtcaggcgattttgctatgtgaccttcatcagaagaaacttccatattcatataatctactggaaatggtgcagaagaagattcttggtggcaaagtatgtcataagatagaacacttcctaacgagtgcccatatattgaaacctgcaaaaacaagaaaggaacacataagtttttttgtttaaccattagcagaaatgcaagtgcactcctaaagatatttccgaagggtgatgtgtgcaaacctttccactataaccaggatttctcttgataaactttgtgtacaactggttcaactggtttgagacctgttgcagacttaaatcctcaattttatataacgagtaaaaaatatgcttccagtcattacgatcaaaatttttgaacagtacaggaaatggcacataattatttagcgtatttttcggaaagggtgaatctgaaccatccaagtcattagactttacttttttcttcaaatttaaattaaaccataaaaatgcatagagaaatcccactattacatacaggcccacaaggctcctaacatagtaatatgcacttaagggaaaagaaggaaattggaacaggcagatgggatgactgagtagaactggatgttggcaatgttcacttcagatcatatggataaacagcaatgtcaacagcaggggcatcaaacattcaatttaacattcacatatttatcaattaataaaggatatgtgtcaaaagcagtaaatatttcagtaagctgatttgtttccaattaaggaacgaacgatgattgctaacctaactgagttttccatcaagccaaatgcccatgccatgcaacataatacgatatgttttactatagtgtattaatgtgtacagaatcattggactacatatattgggagggtatatgcagagaagttcaccagaaaatgcttaattggtgggaggtaggtgacaggggtagttattcatttcatttttttctgagaagtggggtttggaatgtggatattatttaggcagagaagtagctggacaacctccctctttgtaatattagatagaaaagtaacaactttccatatgagaaaaggaacacagtgtttgattcatttctgaaatcttactagaaaaattcatcagcaatctattagttccacaactccatgacagtgtactctagttcacctattatgttcccacccaacatgtgggctttaatgcatgtttttatgcagcatttatttgaagccggatgctagaacagcaaatatactcataatgcttgaaaaaggactactaagaaaacctaaaacaccgaaatactatcaacgaaactacagaaatggctaaaagcagtgttacaataaagcaacataccgagtcaattatgtgctgacagtatataggactcatgtaatacagaacatcatgaactgtggcacctaatgctacacgaagacctttaactccatccaaagtgattttctcaaccgattgttcaccactgagctttaggctctttctccactgcaataaaacatcagggttaaaaactcaagttgccggtaattatggagatgcagctagatgccaggtgccatatgatggtattttaatctgaaaaacatgcttttattataactagatacataaaagaaatttctggctaacttaacaactgagttcagatgcaataaagatcatgacatgtgtgcacaagtgtacaaataaattgtggtgcccgtgagcatttgatagtaaaatatatctcacttttctgatcaatgaccaaaattcaaaactacaatttgcatctctcgcttttgttcaatggccaccattcaaaataaagactgtcaagttattgtggttatagcgtatggtaaagtagttcaaaacgagaccaagcatatgtcaactcacttttctgatagtaataaatatatctcactttcctgatcaatggccaaaattcaaaactaccatttgcatctctcgcttttgctcaatggtcaccattcaaaagtaaagactgtcaagttaatgtggttgtaacgtatggtaaagtagttcaaaacaagaccaagcatatgtcaactcagcatgcctgaatatggagttaaaggcttgctttatcatgctaaagcaagaacaagtatttttcttatctgaaatgaggcacaagaatgacatacatttcaaccaaaatgagtctatggcatgagtaactttgagttcttacctgacaaggaataaacagaaccctctgggtacttctttgataaggagttaagtatctttcagctaaattagcagttacacggcggaaatcaacaacatcatcaacaagattagctttctccaacctctggccaatgccatgaaccataaatactagatgaccaactggaacctaccaagagacaaccacaacaaataatcaatttgccaaccttgtagattatggatgagaacttttatgta

SEQ ID NO: 18108 - DNA, 2704 bp, Oryza sativa
aagctgatcccacagttttgtacatggctccgccactctatattgcacttcaaaattagaagcaaaaactattgagtaccaagcaagttcaactcctaactaattcaattatttaccaaatgtttctcacaaaaaaaacagcacgagggtaccatttgattttttttttaaatgcaaaaaaataatgcaataacgtgctagaatagtttgtcacattgttggccttcagctggttgtaaaaaatgatgttacatattgactttgtacagtttacctcaggagtagcaagatagcactatcagattaaattctcaataggatatggctgcaattagttttcaatcatgcctctatagctctattgcagtccacacagaagttcccatttagtgtttgtaaaagaatcaagatccaacctcaatttgtacattctctcagtcattcatgcacaacagatgaaaatagtaggtacaaaaaataaaatactgaaacatggcaaaagcatcaacattcaacagggcagctgacctgtgtaggcttcgctgatccagaagatgaaaacccacgccttaatttgattgtgttgccacctagcttaggaccagtatcaaagaccagccaagcttcccaggtatcatcctctccagtaaaaagagcatgcaagtcctgcacagattattcagccttgtcctaagttgccattctctcttttctgagcaagtcatgctgttacaacagtatatcacataccggggtgcttccttggagatcaacacgtgctgcaaataagcctgaaggttgaaatttacggcgatgccatacctatttttttttacaacaaaacaggatgttcaactgctttatgggcatggaaatcaaagaggggagtatgataggaaccaaaactaactcaagaacatgataaaagcaaaagatggtatatccacaccgcagatcataccatggcatacatagctaaattcaagtgatgattatcttcatctcattgaatgcatttacagtattcgactggagaagaaagtgtggtatctttttctagaacaagtgtatttgtagtgatagcaaattggcattccatgaaatggctttctaatagtacaagaaagatgatagcgaataatattctcatggcatctttttacctgacaattatatgctagctcaagttgttcagaaacatcttcacgcaaggggatccaatcaagccctcctttgcgagcaaaccagtggcccctcaagacacgcctgttctccccattccagtacacagggaagcaatgacgtctcattaaatcgacctgcaacagtgtatgttcttataacaaagacatattcaatatctagcatgctagtagtaaaaaagaacagaaaagttatacagtattacaggtgtgtgacagagctaaaaaaattcacttagtccacaatcttacttctactagatcaacaataacaagtacagtgtccactaaaaaataacaagaagaatgtaaatatgtataaatagctttgcttcggcgaataactaacaaaactcatgcgtcgtgaatccagttgtgaacaaactacaagacaaaaaatacaaacctcataaagtccgcctttcacaggaaccccaacccgttcttcctccaccttatacagacttttagaatccgaagcatcagctgcaactaaggaaccttttggcccttcgctgcactcggcgtactctctccaccagtatgcaagcagagcttcctccctctacaaaccagtaaaccagtattgtgatcctgaagttaagtggtttaaaaagagtgagagaggatataatcccccttatattgtagagggactagtacagctctcttggaactagattgtctagtaatatcgcttttcaagcggattgtttctattactgttactacagtccagtcttaccatataaatgactaaaatgagtaaacactaagcaattgacaatggtgttaaagagagaacctccaagaaggacgcctccaatgcaagagagtctctcatgctgaaccggaagtagtccccttttcccactatctctgtccgtggaactgaagcagagagcgctgcatcaacagcgaattgcacaaaacataagatcagtaagacatttatcacacgcttcataagtttaaagtccaaaccgatgatcaatttaattgagcacagcagttctgaagtatgaagacatgccacggtcaaatatgaatctaatgtaaatgagcattgcttcgaatggcgagttcaatcagcgaattcaatagcgcatgcatgtgaacacttgtctaaaccacactaccctatcaattagtagattcaaatcagcaacagtctcacacatcaaacctacattctagctaccgctgattaaccacgagtgactgaatcggacggttaaattggtggcactgggtgtagcattccgaagcagacgagtctgagaggtgagcggatgcacgcacctttgtcggcgaggggcagcttgcagaagtaccagcggacatcctcgccggccgaggggctcttggtgcgggcgaggtacttgcggcgagcggcgcagtgctcgatggcgtcctccagcctcgcgatgttggagggcgtgttcctctacgagtccggcgacgcgccggcatccacggtcccgggggccgcctggctcgtg

SEQ ID NO: 18109 - DNA, 3460 bp, Oryza sativa
gtaaaacgaaaaagctcattattatatggttaattaattattaataattataaacttgaaaatgattttatttaaattttttaaacaacttatatatagaaacattttgaaaaaaacatatcatttaatagtttgaaaagcgtgtaaataaaaacaagatagttgtagtttgaagttgaagagaagaactaggcctagtatatatgaactgctaaaataaactagtattcctagtactatacaacaccgactatgtcataaagtaaattatcttgcttatagctattatgcaactactaattggcctaaaactatgattttttttcctcaaagtgtcttgtatatcgagttgtaaaactaaatgctggatcttacgtacacaaaagaattgtatgttttgaaatgtttgaataagcttggaagccatttacgtttgttttgaatagagagaaaaagccatctccaacaatgcttacagaggaaaaaacagcatgttatctatttttcgtgttcaatatataaaagtatatggaaaataaaagttaagagggctagagaatattatgcgggcaaataggagtatgcatttatactgataatatataagtattttcatttattttcttatggttgcacgtttatacggcatccaattatgatgtttctttccatgttggtattaagataagtatattttgtgcgagttattttaattgttattgaaatactgtttagacagcaacatagcgtgtacgcctcatttattaggctatcatgtatgccaattaggtcaatgaacaataaacctatacatatttgtgacttcataaggagtttattttttcaattatcattgaaaaaaactctcattcatctgtttttaacactggctcgtgaatataaatgctcaatcgcacaaggcttcatgctaacaatatctccacatgcatacaactttatatgtccattttagttttgcaccaacaatctaacacgcctctcttcttagttcttaggaaatactacttggaaaaaaggcacgggctacaaatacaaaataggtgtattctagccatatgcatcaagcaatcctagcaaactccatattgcatccagtgttacgtgtccgttcgttcgtttgcagttggagacaaaatacgccttcgaattcacttcgcgcaagaaaactgaaatacgcctctctccctcatacacgtattacaaacaccgcaaccgcaaaatacgcctaggtgttccctctataaagcggagaaggcaaagacacgagctctctcttccaaccccacacaaagcggcgcctccgcacccgtgtgtaaagaaaaaaaaatcggaggcgaaaacctctcaaaccctaatcccctcgtcccccccatggcggagtcggacgcggcggcgccgccgccggaggtagtcgcccccgtggaggagcagacggcccccgcggtcggcgcatccacgctggaagaggccgagcccgccgcggccgcggccccggccgccgagggcgagggcgagcacaagaggagctcgaggaggtcgacgccgcccccgacgcgaacggcggcggcgaggacgccaagcggccccgcgtggaaggcgacggcgaaggtggatcttctccctccttccccgcgtctgtttgcgcatagggttttgcatctcagaggggatgatgcttgtgtgttttctaattcattcggtgcttgaataatcctcgaagggtttatgctccgtgtgatctgattgtgttctctctttgaatcaggtgtcgtgcagagcaacgagtcctccgcgaaggtcgatgagccggtagctacagagaacagtgacgctgcccctgctgaggcatctgttgatgctgtgaatggcaaggttcctcctaccgaggattcgcagatgggctctggggagaagcctgcagcagaagcagcagtgactgaagccccgccgcaagaaggtggtggcgcaccaggacaggagacgtctcggataatcaacgtgcccaataacaaggtataattactggcatggggcaaatatggcaacctgtttggtttcatgtagaaatctgcagaacattctgtaactatttatacatggcctctatgaagctgcgtaaaattcaggacgaaaaccacggaaagttattaatgagtgcagacattcggacttgtggtttgctaatgctagccatgaaaattcatgcaggtcggagtcctaataggaaaatctggggaaacaatcagaaacttgcaaatgaactcgggcgcgaagatccaaatcacaaaggatgctgaggcagatgcaaatgccccaactcgttctgttgaactagttggaacccttgagagtattgacaaggccgagcggctgattaagaatgttatagctgaggtattccacgtgctaaattaattagccgtgatttccatactagtttgagctgtattttcatccaagcaacttaaacttgtgacattctttattacttccacttcaggctgatgctggtggttcgcctgctctgatcgctagaggttttgggtctggacagtcaggctctgagcagtttgagatgctagtccctgataataaggttggcatttccttttcaatgttggcaacgaagcaacctttcctttaaaatgcaaggagccataacattttatttatttaaccgtttgctttgacctataggtcggtttaattatcggaaaaggcggcgagaccattaaaaccctccaaactaggtctggtgctcgtattcaggtagagaaggttacttgttacgctgtaatggctgttgcttacatcaactgagatttgagtgtgatcataaatgttcatgtagttgattccccaacatcctccggaaggtgttacattgacagaaagaactgtacgtattactgggaataagaagcagatagaagcggcaaaagatatgattaagcaagctatgagtcaggtaatgtgattctgtgtttcgctttcaactgttccttcatgctgtaaataactagtgatattagatgatgctgtgatcacccaatgattgtgcaattcaatcatgctgtgaagaactgggcgatgctatatgatgatgagatgctaaattcctactttatgcgtttccattctattcatgctgtgattattttttcattgaaactgaatttctgttacctgctctggaatcatggtgtgtattatcgaacctattgtctctagcatgaccttactatcttcgtattatatgattggtataatccaatatgttttcctgttctccctgataatagaggtcttagaaatatagaaggtgttttttggttcttgttgagtaaacctgtgatttctttcaatcagcttaattaaatctgtgccctcttatggtttgtgtagatgttattttattgataccttctagaactggttc

SEQ ID NO: 18110 - DNA, 10333 bp, Oryza sativa
tgagagtattatgtatggttatattaatacttaatttatacagaataatttgtctataatatttcatgagttataatctcctcgtggtcaattatttttttgtgggaatatttgtcatcttccatataattcagtatcttgccttgctgccttttcaatggcaaaatttattccatgtccatgaattttaaggtttttgcattgtcttaaattacaaatgatgcatatgtttagtttcccatgaaaatgttgttcattcatggattaacaatatggaacatggtgtgcatgatcatcaatgttaactatgaatgaagttagaataaatgatttgactctgcaatggatagcttttgaggatttgtgagatatattcacgttgacataaaaagatagtttagtctcggtggcttgatagttcttcatagttcgtctagaagcagaacttaccttcgtgtatgatagtgtggttggacttcagtacttgatcgttaaaaccttggtgctgtcacatgatcaatgaacaattactgtggtactagtttcaatctttagtcggctagtcttttgagttttggtaactgcttactgctagatgagatctgattatgtttcctacataagaagtcagaactgactcatcaaggttcctctcgcttccagtttccatgatttattttgtttgaaggtgccaatttggagttggttgggtatcctaatgcagatacagctaggctttcatcatgggctccacatccttcatccattacatgcacagaagagggatattgaccattatcccttgcccttgcatggtttgtgtagttggtaactggtaaggctgcttattgctgaaatggaaagaaaaaaaaacaatgtggcattgggagactgcaccaaatgtttcattgccatgacaaggatactgcatcaccatgtctaggtttgctgaactaaattgttgccactaatttgcaatagctgaaaaagcagcaagttttctcgcatcacatacgtcagttatttgatgtgttagctttccaactagaatattcaagttggctgacagcctatattgttggagttaaatcatatatgtgagctatgcatgcaattttgctatgtttcttttttttgaattgctgcatgtaatatcaccatggttatgtgatgatgtcataacgtgcaactgtaatcccatttacttcttacttacccattggctctgctaaaggtgatggttctgttgatatatgcattcatcacattgatattttgtgtttgtctattgttcagatcccctggtccttttaaaaattcttgtttagatgtctgaaggaggttgtgaaatgccagtattaattagaatccttttatctaacaatgtttgtgaatgcttaagcataaattatgtttttagtgaatcatggtgccatagcttatatgcaggcttattttgttattgttggtatgctgcaagtatgaagtgaaacactggtcatcctttttaattatcttacaaaaatgcctttattcttctgtgttatatttgtaatttgtaattgtactatttagtattttgtttttgtcatttagtgttcttgttttgtttctaacgttccttcttaaacagacattttcaagacatggggctcaatctggtggatatggtcagcaaaactaccgccctcagggtcatggtgcagcttctcagtggggcccacgttctcaaccccagcctggatatggatatccaccaagagggcctccacctcagaacatgccatactcccaaccttatggtggctacccgcagcagccaccaccaagaggtggcatgggctgggatcagaggcagggccctccaccccatgcttcccaccatggtggcggttacgactactataaacagggttctcaaccatatgaaggccagccaccaaattaccctcctgggcctggaaactacaatagttatgggccatcacagggcccaaattatggacaacctcagtatccgcagtctgcacctccacagaactatgggccgggttatggtgatcctagatacaatgctccagcaccaaaccagcagtactatggacagcctccagcgggtccacagcaaggctaccctccacagcaagatccctacgctaggccttatggtggacctggacaatgggcacccagaggtgcaccagccggagatggcacttaccaggcgccaccacctacatcttatggcccaccatctcagcagcctcctgcttatggtcagacatatgggccaacgactggacctgatgggtattctcagcagagttacccacagcaaggtgcacaagcgccagcaacatatggtcagagtgcaccagcagggccagggtatgctcaacaaggcgcacagcaaggtggctatgcacagtatcctcaatcccaaccagcatatggtgatcaagcagctcaaaacaatgcaaactacggctaccagggtgctccagcagatcccaactatggaaatgcctacccacaggcaggatacggttctactccggctagtggccaggctggatatgctgctgcaccggctgctggccagccagggtacggtcagccaggatacactcagccacctacaaatccaccagcttatgatcagtctgcccagccaccagctcagagtggctatgctgcacctcctgcaaacccacagcctgctgttgcaaagggggtgtcaccgcagcctgctggatatggtggacaatggaccgcttgaggtttgtacctcattattgacagcaatgatctagttgaagactatgttttgcctcatgatgctgccgcttatatgaagtaggcggttgaatccccttgggatgttcattcagtaagcggtagacttttgatatgcctataagggatgtaaccccttgcctctccagttgttataccggatctctgtagtagttagtagtttgttaagatgacataaaacctcctgtttagtttaaaagtgaaccgaattatgtgttattctgcagcatgtcgactgatgtttggatgcttagtcctatccctttgcttcaagttgtttgtgctatgcttgccgctggttggttgcaatgtgaaaagatgttttgcctgctgctaccaacacgcagttagagatcatacttgtttgcgccattggctggcaactggttgacaaactttctcatgttactatgaatcgaaccgtgcagtatatacatatgctagaagtggtattgatgaactattcaaatctttactatgaatcgaactgtgcagtttatgcatgtaatagaagtggtattgattaaatagaggtttttacctgtatgccattaaaaaagatgatgtctgcctctgtgccactaaaaaattcgagcctccctctgtgccatcgttgaactttgtcgcgccctccgcaccattccgtcgctattctgtgtgggtttaaccgtttgataggtctgacatgtgggtccgggtaggaaaaatgtcgctcttaccctttcagagagaggacaggcggtgtggcagacaagcggccaggcgcggcggcaaggcggccatgcggccaagaggggcggggtggcgcggcgagaccggcgaccggcgcggcggcatggccgccgccgcagggagcgatggccaccgccacctccatccacgccgcccaccgcaaccaaatcgagatccctccccgtcctccaagccggcgactccttcctcgtccggcggcggcatccgccacctacaactccctccgtgccgccatcaagcgccactcccgcaagctcgacaccatgaaggccgactcctcctcctcatcctccggcgccggcgccttcggatcatcccagcccgcgggctcctcctcgttgcgaaccaagaagatggacgaggagcggcggcgtccggggagggatccctcctcccgccgatccgggtttcggagtgggccggcggggatgagatgaggaggagcggcggcgacgacatcttccccacatgtacatcttccccagggcattctctggccgctccttgaacacccacatatacatgtactccatgtcgtgctgcactagaaaagcatctagtgtagcattattaccgttcccacggcgatgggggccttcgccttgccgttcttgtcagccaacatgaccggcttgaagtagtgggtgaagaagaaccacgcgccccatatggtatcgttcctcttcacacacttgcaggcagcgctagaattggagcccttggcatgtgatacgacgatcgtggtggtcgccgccgccggggcaggggacacgccggtggcagcaggtgagtccgagtcgtagagctgcgggccgctgaggccgacatctagcatgtcgacgttggggtcgtggagggcgtcggcggccgcacggtagctacctcctcctctccttctccgtgctcgccatcgtcgaccaactcgtcaatttcccactgctcttgttcactatccggccggatgccctcgagcacgccaccatgtacctccacctcgctgtgtacgcgtccgtggcgctcaccgccgacgggtgttgcgtcttcccaccacggcggcgcacaggcgcagctcggggacgtagtggccgcgctcgccgcgtcagtgttcggccaggagctattcccctcctcccccttcctcggcgccttggggacaaacaaacgaacacgttggccccaagaacgaacggcaccggcaagaacgcctaagggcaactaagtaatttggctgcgccgttacccaccgttaggacaaaaacggacggaatggtgtggagggcgcgataaagttcgacaatggcatagagagaggctcgaacttttcaatggcacagaggcagacatcatctttcttaatggcatacaggtaaaaacctcgattaactattcaaatctggaaccaaagcgtatcccagaagtggtattgattaactattcaaatctggaaccaaaccgtatcccagtgataatcttgtgaatacatgctattcaatctcatgtactatgaatcgaactgtgcagtttatacatgtgtttgaagtggtatgatgtaactaattaaatctggaaccaaagcgtattccagttgtaattcaattgcaatgataatcttacatcagttgttatgactcatgatcatgatgactcatgatcatgatgggagcagcaattggcgaagagtatcatagagcgcccgaaggatccccttgtgctgctgctcctcaggcagcctcagcatgctcgctaccttgtcgaacttctcctgccccagtgcggcgtcctccggcgaggccgccaccgccgccaccctgtgctccttgtggagcaccggcggcgacagcgcccactgcatcgcccagacgccgagcgggcgcatgtagtgcagcgcccggtagccgccgtcggccgtccacgactccggcgtctggaacgcgtagccgaagccgtgcttgccccagccggcgtcgtggatgcccttggccgtcttgaacgccgcctccggcatcccctcgtggatcatcgcggcggcgacggcgtacgtcaccccgggccacacctccttggactgcgtcgacgacgcgtccacggcgccgtccggccgcatcccgttgacggcgccgatggcgccgcccttcacccgcatgacgttgtagtcgagcaccgtcgccagcgctcgccgcgccttgtcgccgtccacgatcggctccagcccgcacgcccgcgcgtaccactgaccggcgagctggtcggcctggatcgacgagctggtggcgccgccgctgttgtcgtagttgaagtagccgccgttccagagctcgtctgtgtacacgcgcctggcgcggtggtacctcccccggaagtaggcctcggcggcgccgtcgccgacgatgcccgccatggccgcggcggcctggagcgccgccacccagaggccgccggtgtaggcgctgacgccggacaccgaccacaggtcgtaggtctggtcggggcggccctcgttctcgaccatcccgtcgccgtcgcggtcgaactggtccatgtacgccatggccaggtacaccgccggccacgccgcctccgcgaagccggcgttccccgtcgccaccacgtcgcggtacacctgcagcacgaactttgggttgaggtccttccacctcaccgggtcgtgcagcatgtacgcgttcacctcgaaccacgggtcgttcagccccatgtcatgtggcaccgctcccaacacctgcatttttgacaccccaaactagtcaatgcatgcaactcaatataacgtactcttcacgcctaaccgataaactcatataactcaatatacaacatactctttacgtttaattgatcgacgtatgaagcataataccgacgtataacttcatgtcttattagtcgatacataaaaccttaaaattactgtatttttatatactcccttcgtttcatattataaaactttctaacataaagtcttagaaatggatgaagtatatattttattcatcggtgtatgaaactcaatactactaaatggtagaggaagtatgaaccttttatatttttactaatcagtgcatgaaacttaatacttgtccctccgtctcattttaagtgtaattgtggtttttcgtgtttaacatttcaccatctgtattatttgaaaaaaatatgtgattagtgtttatgttttattatctaaaaacaataaaaatattattcacataattttttctaagactcaaacattgaatacggaaaaccacagctgcacttaaaatgggacggaaggagtactgaatggtagaggatgtatgaaccttgcgcgccacggtggcgccgtcaagggtgcggcggaggcaggggtcgtggaggaggacgccgcggacgaagtcgcgctggaggttgagctcgagctcggggaagagggagaggagggcgaaggaggcgtagaagtggacgtcgtaggtgttccacatgttgtactccatcccctccaggtacagcacctgccccacgttctcctcgccgtcgcgcagcagcgccgtgcccatcgccgccgccgccgccgccgccgtgttcgaccgcgccgccgccaccgccaccgtgctcaaaatgccgtcgaccgcgctgccgccgttggcgactgtactgaacgtgtcgaggttgaacggctcagtcgctgacgaaaggctggtgttcttcggaggctgcccatctgtgacaattttgttttcttggtcagtttcaagtttctgaatcgttttgggtttcagatcagtgatcaagttattttggactttcagaatggatgtttaagaatttgggtgcagaagattatattgacctgtccaaatggtgcctccagcgttgaggtagtagagctcgttgaacagtgtaattggatacctgacaaaaacaacattaccatcaacgaccactaatccaattagtcaattacttgctccgtaaaaaaaaactcaacctagaagtttgtctagattcgttgtactagattatgtctcatcgaaatactaggttgagtttttttggactgagggagtagtgattagtaattgatatgcaaaatctgaaaaattcgatcaccattcaggtaggctcttgtcctgcagaataggcctctgccactcctcgatctgggactcccatttcatgtgttctacatgcagacaagaacaccaaacattcgtcgtcagaatcttcagacaacaaactcctgactcttgcgtaaattcagaaattaaatttgttatcttcaccaagaagagcatcgtgggccaggcgctcagcagccgcgtcgcgatcggtgccatggaacttggtgtacctcctgctccagccatgatcagacgatctcatcatgtcagtgttcgagaatttcagaaacagcaaagaaccaacaagagaatcgccattgctggctgctgatgagcatgagctgtgtcactgtcacagtgtcacttcacctgtggtaggttctccccgccgggaacttcacctcggggcacgaccacgacagcgcgaacgacaccgcgcgcgcgccacccgccgccaccgtcgtcgtcgccgccaccgccgctccgatggacgacccgggcctcgacgctcccgtcgccgccgccgccgcattgccgtccccgacgaacgaaccattctgttcgccgcgaacatgcagtgttcgtcagcctgtcagagactgacagtgaagcgtatgcatggtgtccgtcctccgtaccttgttgatctgatcccacatgtccttcgccgtgacatcgccggagttggatggtcccatcgtgaagcgcgggcagccggtgacgcggacgccgtcggtctcccgcgacgcgatcgcgaacgtcaccggagggcgcccatccgccgtcctgcatccatcgatcgacgacatgtcatcatctcatttgcaaaagagtttccgacacgagagcatgatgaggtgatgaactacgcacctgtgatggaggaggacgccatggacgccgtcgcgagctctgcgcaagaaagatcagcacagttgcaagaagcaacgagtccatgaattaactgattaaaattggtgagagacatgatggcaagatcagtaattacgtcattctggagttcttatgattcccggtcagttcagatttccctccaaccgaattctgcatgatgaacaatgccagtggtgaggtttttactggaaaatgctgtctttgttttatgaagaactaggtgttggtttgcacttactgcccatgtgaagagcagtgttacatctgcaggtgtgcttccagaattgtgtaactgcatgcacaggaacagaagttcagagaaaacaaaatgaacagatcaattggagttattttcatctgcagcagaaacaaaaaggattgtaagaactgtaccgtaaaagtgaaaactgcaacagggaagctgctctccttgtagttgtgaggaatgaacggtgatatctgacggcaagttattttaatttcagggtcaggttcacctgcattgtttgcaattttagagctcagattagtaaggatttgcacaattgatgtttttccaggattcgtgatcaatggtctagtgatactactataagaaatcagtgtgtaccattgtatactgtccatgatcttgggaacaagccatggtaagtgcaattcttctctttcagcttccagtcccaggatccaatgccagctttatcgattcccctgaaaatttcacatttcatgatattcctagcatgcaaagatgcattcaaataggctttgatataaattttgttgtttacttgaggacatcggcattcggtgccgacaacactgtcgagtatctctttccgtcagggcgcgaaatgaatgcctatacaattgaaccatgatcgtgatgattagaggatttctaggattaccatcaatgttcattttatattagaaatacaaaatgaaaagcactaactgaaaattgatttgctaggataggcttctcttcatatatactggggaatatctgaaactgctgaaaatatcccctgtagcttctccctatgctccctgcactgataaaacagtgtgctttgaacaaagttgtcatctattgttcaatgaattcaaatttagctatgaccaaaaggtaatagaatatcttgatatagttcctaatcgtagatagtaaggaaacttagctgaatttttagtaggaaaggcttaatttgcttacccaatcccaccgaggggtacaccgcggtagcagttgtccatccatttcttcagtggatcatacactgaagcctttgcaaaagtgaaaaattgtcagtaagtttagcaattcctgctgatatttcaacagcctgcaaaacaattattgatggattagctggatcttcaacagggtaagagtaatcaccaggccttttgcattgtctttcaggtttagtcccagcattttaatcatcaacggcacctacaataccaaaagcaccatgacttcattgcaaatggaatgcttcactgctaatacctaatttagactacttttcttgaaagcaacgagtgtcgttgccctttttgctaaatatgcaaaagaaacaaataacaatattaaacaaagttagtgctcatgttattaatttaacaacttttcttagaataataacagtgttcttgctcttctctgaaaagaaaggactacttttccttgacaacagtattgaatattgaaattt

SEQ ID NO: 18111 - DNA, 3248 bp, Oryza sativa
aatgcttacaattgccatcatgtcattcaaggtcatgctaaacattgcaaccttctttccttcatcggcccaaaaaaattggtttgccaccttacctcccacgcaaaagatattgctggtggcttttcacaatccatgtgcaggactgcctaaagcaagaacagtactttcagagtgagactggctaactttctcaacaaagaacataatgaaacactgctcagatacaatccatataaatagtggcacaaatcaaggaaccaaagaaccaaggtgaagaaaacagttcttctaaacacaggagcacatcatttgcgtgttccattttccaaaaaaaaaaaaactttttccacaactctttgttaggttcagaaggtaccttggtttcctccaattctgaacttcccatcttgatatgaactccggttggattgcggctgggcagctaatatgggcacaaggacaagatgtaaatttaaagacttgtcgagatgtcaagaacatgactaagcaaatatcaagatttctgaatgtaaatcagcaataaaaaacacagcacaacacaaatactcaggtatctgaatgcaaagcatgcatttcaggaatctgcagaaaactaaccgagaactatcaagtatcaactaaggaggaggaggaggaagagagtaatacctgaatctgaacagcactagacacttagactgctcttctcattcagcagatgctaagattttttttcgaaagccggccggagtatatattaagaaggagagagtttaagcaaactgtacaagaaaacaatcagagccaaagctcacatacagaacaaactgtacaagaaaacaagcagatgctaagattagcttttataaaacattcgcagggaaacaacaagtggaagcaatagacagcacgggaagcacatgttagcatcaggttttctcttctttaatttttaggtgggtggaaaactacgcagctcacacatcagcgttaattgattaattatttcgatggtctccaatccccatggtgatgcctcttttgttctcttctgtgtggatatcgagatgatgtctctaattcatctagagcaagtttaatagtatagccaactaccggctccaaatcaattatagtcaattttatagccaattcatacaatagttacctataaacatatactacacaattaatacttgggcccacctgtcatacacacatgcatcttagagttcgtgctgtagctggctataaatctgtagttcgttgctcatctctatcctattttatatcctcgaaatgtgtttatagctggtttatagtctgctattgtacctgctcctatagccaatctaatagctcattcatacaatagttatatactacactattaatatctggtcccacctatcatacactcactgcatcttagagttcgtgctacagctggctacaaatttgtagtccgctaccattctttctcttcatttatctctttaaaatatgtttgctgctattgtacctgttctaacaaaaatgttctaccttgtatagtttaaatttttttttggaatagagcacatcattatattaagagaaatatcgaaatatcttttatgtacaagccgaaggaaaagagaaaagagaaggggacaagaaacaggagagcccaacggtttgatgtgaacttttttgatcaggacgtttggctcaatctgaactagaaaacctatgatttatatacgatctgaataatttgacatgattttttcgttggaactcccgcattcgaaactagggccagtcaatttattgtcgacgtgatgcagaacgggaaggaccacgaggatctcgaatcccaaatatccacatattcattcagaaggtacaattgaacaaaccacgagtaagtttgctgacgctaataaaaaaaagtttctctttcttttttgaaaaaaagatgctaatcaagaaagtaatttttttagagaaaggtattttggtctaatcaagaaagtaattttttttagagaagagtgttttggttttttttttttacctggcctctacatccaaccgatatatgcagcatttttaaattaggaacttagcctatcgaattgggaacttaggcgtcaaataacccaatctaaaattcgctcatataaagatttgagctcaggaccttgggtgttactcaggtcactgtaactattaggctacatcctttcacatcaagaaagtaaattaaaagcgtaaactatgtgatctcttcatatgtcagacaaaaccaacgaaacttatgtttctattgttctttctatcttgattagcaagtttgatgttttttttttgaagttagggctaaacctgtggctactgctcttaaaaccagcaaattaagctgcttgtatttattacctatgacgatatgcttagagtcaatggtaattttaatttcagccattacaagcagatagacacccatggcccatgggaatttgggaagtccactcaatttggtcaaattgtcgtatagtcattgagaaaaccaaagcagccaggctgcttgcaagtccatggtcatatgtttatggagtagcaagtaaccaagtcactcatgacatcgacatgctatctagaaggcaaaggtcatcttctttcaatccatttgctgaattgcagtgcaggcaatatccgtgcatgtttcctcctcaaattcttattggctattcagtacagtattcagataaacagcagtacatcgtgttcagaactcagaagtactacctccgtcccaaaataagtgcagccgtgtatatccatgcccaacgtttgaccgtccgtcttatttgaaaaatttgtgaaaaaattaaaaatatttagtcacacataaagtactattcatgttttatcatctaatagcaataaaaatattaatcataaaaattttttaaataagacgaacggtcaaacgttgaacattaatagtacaaaactgcacttattttgggacggagggagtagcaatttgtcttcctcactgggtcctctgctctgaattttgtgagaaaagaaacaaaatgctctgtagaagaaagatggagtgcacagtttgaagtgatcgtaagcacaacaagctgtcaggtttgaagatattgcccataatctcgcgatcttttcacatgtggtgggtatctgtcaattataatagttgaaagctagttcgaattttataatattaa

SEQ ID NO: 18112 - DNA, 10557 bp, Oryza sativa
  unsure (1)..(10557): unsure at all n locations
gcctatgattgtttgaaaggaatagcatttttttttgaattagagatgacagagaggatagatcataactactgtaggggtactgtatatagataagcagggacattagaggttgagaacacgttcggggatttggaggtgcatgtgcatgcagcagctgcgagatgatcttcctctaaaaataattagaatttggttcctaaatttgtgacctaaaaagaattagaatttggtttgatgcgcatgctgtgctctaaaaagaagaagatttgtgaggattagaatttggttccttgggcatgaattttcacattcatccagtcctgtccaatccaacaaggcaagaagaacaagattctacagctatcacatgtagctagaagtatatttctagctgtaggcgaagagactgaagagcagtgagtggggtgtagagacggaaatttttttttaacacctactactccgtaaaaaaaagatttataggtaggattgattttttttttgacggagagggtaggtgcaatcgcatctagggtgtgaatgtgatgtaaatagttgataaaaaaatatgaaaaaaagatatattgtgataataacgctttgtacacaaacatgcaactacaaattcaatatacatttgaagaaataaaaataacaaattttgtccgtatatattctgccgtgtcaaattctgttatttttatctaaccatgttggtatacactcctagcatcacagtcaacactatatatttttttaaaaagaattgtaagattatttagatacctagcccaggcgtagcaaatccatatccgggaatagactgaagagcacccttgaatccaaatccatatcagcagcacagtaacacaagcgctgtttaggttcctaatgtcgtccagctatgtctcctgtcgccggcatctgaacctctctctgcccttcattgatgcctttgttctcgccggaatgtggtgctgtctccggcgacaagacaacgtgacgagccatgtaaaccgtacttgggcccccttacggcccaacaaaaaaaaatgggccgcaagcggggcggttatgtatcaaatatctacatgaaaaattgttttaaaaaaatcatattaatctattatttaaaataaaatactgtagttgataattaattatatgctaataagttacttcgttttacgtgcgtgagagattagtttccaactcatttgagccaaacacagccttccctttcagacaaaccgttctcatttcggccttatcgaaagataacatgtacatgcctctttattactttcccatcaccttgaacagttaattttttttaattagaaatgttggacaggataaatcatactactacagtagggagtaatgtaggagtatacgttaagaggttgagaagacgtttgggaatttgtaggtgcatgcgcagcagctgagctgcaagattatcttacttatatataaaaaaggaagaagaagattttgagttgatgttcatgcaatccaagaagcaaggcaagaagaacaaaagattttttttcgaacggctaaacaaggttgctctggcgttatattaatggaaggaatttaagtactactacacagcaaccagaaatgagataacttattagcacataattaattaagcattaattattataaaattaaaaaatatatttatttatttatttaaaaaacttttacatataaactttttataaaaacataccatttgatagtttaaaaaacgtgctaacggagaacgaggaatttaacgtttagagttgagaaaaagaactaggccttagacattgttgataaattgtttgagagcaccttcaaatccttgttttttcttattttgcattctattgtgctaacttaccctatataattttacatatataaattgcagttacaaatgtagtaccaaaagtagattgttgtttttaatgttcagatgctagtattttcagcagcagcaaaacagtagtaggttttttcagaagaacttgttgtgcgcattcgtgaaaatctttcgcaacaagaagcacggtatgatgtgggctgatgctttggtggtaggaaatatcataatcctaacttcccttagtattctcttatgaatttgctcttcgcagctcttaaattgtttcttgctagctattactcactaatttcctcggtttctacatatgataaattgaatgggcagagccattgccattgtcttatgatttatagtgtagtctccttaatcaaatggacatgcccactaatgttcttaaaagtatattagcatatttgtgtaatgttgtcaggtgtattttttagcaggtcctcgtcatcctcgtacagtagtgcaacccatcgctgggactctgcctgatggttccccaaatttcagtacggtctgaatgatacacatcccgcaaacttgtatttatctgataattcaaattgtatttacagttttttctccttgcaccatctctttcaccaagccttgtcttctgttgcatttccacctgctttatatttatctgtgcgagtaatttattattctttgtttttgcagttctttgagattgggatcctacggtgagcacctctttcctcagataagtcgtattgtgaacctcgatgtctctcgaccaacacctgctctccgactccgaccaatctgcgctccacggcttcaccctccgtccgattcaaggggacattatgtttactgctcacacggtgagttttctctttggatttcaaatctcattgccattgcttcactcctagtgcacctaatgtcctgtttatttggacttcaaatcccattacactgcttcactcctagtacacctaatgttcggtttatttgacattgccttgcttgactactatgtttaggagattgttgaattacttgtttgacaacacattttgaaaatctgaaattttatgaacattgttaattaatttgtctgacaagacctcttaaaatccagaaaatatattatagaatttgttaatcaattgtaacacattttgagccgaaaaananncctttaaattgggggaagnaattgnntttatnntatttggtatgagaaaacctcttaaagtcccaaatttatagagattgttaattatttgtgtgagaaaatatcttgaaatcccaaaattatatggagacgattagttgtctgagagcaccttgaaatctttctttagacaaggtttaggtcaaacttttatattttttactataaataatttcaaaatatttaatttaaaaacactataaattgactataaaagcgtattcaattcaccaggtttactacctctaatatcataattcttggcgttttggacaatgttgaggtcaaaattttatatttttgactatacactataaattgattataaaagttttgacccagtattgctataaaaatatttgatagcagttctttttttaatgtaattcttttgaattgtaacataagtttatttctgaccttactcaggaaaacaattagattttattactctatgagatatctttaagagggattttaccgcttctgcgcttaaaaaaaatctttgtgctgcaaaagattttctgtgggattgtaaacctcctaagagcgatatggtggtatgttattacgaattaatttagaaccttttaataatggcttaattgatgagggtttttttttatataaaattttatttttgtaataaattatataagtataaatgagctttagtcttggtatatgggtcgacacaaaataaatctaaggaacaatttcttactaattaatctaaggaacaatttcttactaaataaactaggatgtgtagtcatgaaaacttaccaattattatttgggtgactttaatatattacacaacagaggaaaagaataatgataattttgataatagatgacctttttttaatgctattattgatggtctgagcctttctggtagaaattatgcccgggcaaataatttatcattgccaacttataaaaaaaatagatagagtgctaatgtctagtcctttactcttaaatacaaattcatcttctgtttataatagtcataagaattttaagtttaagttaggttggctattaagtcggtctgactgggccctcggtcggtcttaccttatagtcgtaatggcagtatgacacttcgagtacgagtccaattaagacagttattgtgtaagtttctacagtacttcgtcttgaggttttcttttaagtcctatagatcactaagttcgagtacgaatccattaagacagttattgtgtttctacacttcgtcttgaggttttctttcaagtcctatagatcactaagggcgctatggccctgttaaggcaactaatccttttataagagctgttgattcgattaaaaccctgacatacaccaacaaataatcaaatcattcttttacatcacatttaaccatgttattttgtctaccacgctagtccacaggccagaattaagtattattaattaaaactcattagcgtatgattaattaagtattatttataaaaaaactttaaaaaatgcattaatatgatttttcaagcaacttcatataattttttttaaaaaaacacattatttaacaattcagaaagtgcgcacgagaaagtagaaattgaaacggtagttccaaacactagacatgttagaaaaaaaagatgacatattcaggaaaagcgtacgccatattatgtgtagtcacatcacactcaccatccatgaatatagggcccacgtagatactgggatataactatatgagtggaattgaggttggaacagttaagacttaagatgaaataaggtgagaagaatgaacatctagggttaaaagttattttttgatggatgggaaattatttctattcaaatgaaacctatgggatagtatataaattctatcttaaaattattttccattgtttgcattaagtttcttcggttcataagctgcaacctctattttattataatgtttattttttttggtgtgtcaaggagtgaacgacgttagtttttacatatctatatatattcaagtaatctaaatataagaagtaacatataaataaattatctattgctagacaatagataaaatctgtcctttccttcaacagaaattacaaccaattaattatcacaaaattgtttgcgcaaatccaaataaaatgtaactaacataggatggaaaataagacaaatattaactccaccaacaaacaaattattcagatagtaatcctatcagtaaatattcatccaaagttaacgaaaattgatatgaccattgtatccatgattttgcatgcaagaggaatggattacatcttctcgtcacatctttgttgattgggctaaagccgaaattaatatatttccctaaagagcacctgcatataagatttagttggaattttatcaaaccatagagtccagcataaaatagaggttcatattaatataagtttttttttgtttttgtcaatgccaacaagccaactttcaaaaatataggagaaactacctatgtattgctttcatgccaaaggaaaaaaggcagttctgccaagaaattcagaaaaacagtaataagtaaagaatagatgctgcatagtttcctcatgcatacaattaactatatactcccccgtctcaaaatataagtatttttggacctcgacctagtcttcgaaatgctaccttgaccaacagtatctataagaataaaatattttaaataaaaagagttgcatattataatagtttgattaatgataaatctagtaacatcaattttatatgattgatttttttattttttttgctattaatagttaaaattacaaatggttgacttggcactatgctaaacatgcgtatattttgggacggaggggtatatgtttaacagcatattaatgtgatattattggaataggaacggcctgtcggtaccagagtattccattccaatagctaaaccgggataattgtctaaaatagaattgattggtgtacatagaggaccaacaaatttgaccatttcgagataagccagatgtggtggtggcactatataaagaggcaatgactaatgaccaaacaaattcatgacgacatacgcggttagacctgatccatgagttgacgccattacgagcagcatggccagtctcccatatttagtgttttattactgtattaattataatttaatactgctctatggaccatcatcactgtagtactgaaatttctgacgctaccagccaactgaaaaaaaaatccaaacagctactccctccgttttataatataagactttctagtattgcttatagatacacatatatgtctagattcattaatatctatattaatataaacaatgctaaaaagtcttatattgtagaacggatgaggtacgtaggagtagcaaataagacatgagacgcagtgctatatatatatcaacttgtcaagttgatgcatgcccatttaaagtattcacccatgtagagaagaattagaggcacctagctactcacatctagacacataaatactccaaatatattggaggtcacatgttatgttttttgttacatggaagacatatacatatacaaacttaagaaatgcgcgatagcagacgttcaaataaacggagatcatggtaaattctaacctcactaaaattcatattgaaaagtacgtcctactaaacacgcatgcttgtgtatacgaagctagacattgattatctgataagtcgatctctaagttttcaggagcctaatactctacccaaatgatcaaaccaacaaaagttcactaccaaaatatacattcaaaagattgaaagcgtagtaacttctataacaccaaatttattttattagattcaattgaatatattttacagtaaatttattcagtattaaaaatgttactatatttctctataatctagtcaaacttatgaaattttacttcaaacaaaagaaaacaaaacaccttacactatgagtactgaagcagagagtgactcggagagtaccaaaattttgttagtaataaggtgttttgacatgatatacgagaggtggaatggaaatgagtggacaaaatatagagttaccatattttggtagagcaatgaagtttaatcacgatgaggggagggtgacggcgtccatgaactcctcgtcggcgacgagcctccggagcgcgtccggcgcgatgcaaacctcgagcgacatgctcccggcgccgtccgggccctcgaacaccgtcgccttcccgtcgatcttgttcccggcgccgctcctcaccgccaccggccttccccacccgaagtcgttgccgaacacgtcgaaccgcggcgagctccccgtgatcagcgccacgccgccggcatcgccggattgcagcttcgacatgtacgtgaactccggctcccgcacccaccgctccagcgactccctcatgccggcctcgtcgaacgacgccacggcgcggttcagctgccatgccgtccacccgagccccttctcctcgatctcgccggccgtcgcctccgccttcccgaacatcagcgcgttcccgacgtaccccgccgggatgccgttcacgcgcccccggcatcccaccatcaccgtgtagaacgtcacctgctccggcgggagtcgccgggcgcggcacacacctcgccacaggtgggcgagcacggcctggagcgacgagatggttgacgtggccgcgccggacatctcgtcgttcgccttcgccttgagcttccgggcgctcgttgccgagaaggtgaagaagcattcctgcacttccggccgctcgagccgtcggacgatgtgctgcagcttgccgaccggcatggggatcggcaccgggctggtctcgacgaaccaccgccggaacaccggcgccggcgtggagatctctctgatcatcaggtcgtcgctcatggcgccgccagcgcggcggttgatctccgaccatgcgttcatgaacttccagaaggtggtgccgtcgccgacggagtggttcagcgacatgccgacgaacacgccgtcggcgagctcggtgacctgcgtcgacagcacgggccgcgactcggtggcggcgtcggcgccgagcaccaggttgtacgagtagaacgaccatacctccggcggcgtgtaaagcgacgagacgacgtcggacacggccacgccgggcgccgccgcgtggacgaactcggcgccctcgccggtgcaccgcagcgcgacggtgacggtcccgtcgtcggcgcgctcctcggcgacgagacggccggcgaacgggtagaacagcgcgagggcgcgcgcgaaggaggacgcgagggcgtcggcgaggcggtcgccggagagcggcggcttgggcaggaggacgcccttctggatgtagtcgatgctgaggaagcggaggtcccacggcgtgaggtggatgtcgcacggcggcgcgtgaccggacgacgacgacgacgacgacgacgacggccggacgaggcgtcgggacaggacccggacacggtcaacggcgagagctacgttccggtggtcattgcttcccatgtcacgctgctctcttctcttgtaatccgtacgcctctactggacacacaacaccttgagcatatacatatagtggcgctcttgggcatggctccagatccaatttgtttttcttttgcatgaaaatttaaattttaggctccgtttggcacagctctagctcccaactccaacttacctgtagcaggagatatgctaaacagtccaaatcctctgtttttgggagcggagttgacagagctgctacacgaatttgtactacgggggtggagctgggtttttgttgctccacagctccactccaacccaaaagacccactaccctttaaattttttacatatttataaaaaataccactcaactacctctaactcatctctcacctctctctctctccctcccgtcaccctcactctccaatccaacgggctcgacggcagccggcggtcagcacacggttggcggcgaggtcgacggtgggcggcgggtggtgcacggcgggtggcggggtcaacggcgcacggcgggcggcacgtgatgggcggcgtgcggcagtggtgcgcggccggcgtgcggactatggcaggcggcggccagcgttggggacagcgcgcagccggcgtgtggactgtggcaggcggcgcgtggcaggcggcggccagccgcacacgaggacgatgacaacgcagctgctgcggacgttgcgattgaggatttttttttcttttttttaaattttagatctggagcttaaaacctaacaaacacttttcagcaggtctccaactcccttttcagcaggtctccaactcccacagaagccagctccctctggagtggaagtttagagctctgagttggagtttggagccctaccaaactactataatttaacatataaacatcaaatttatcatagatctgagatctagagctctgccaaataggaccagtgtattttatggttgggctcctattttgagattctagtatttgaggagctaaagatcccagcaatcagaccctactataatatttttgaaatgcagaattaaaattgtatgaaatcgaacatagttataaggacaattccaatctagaaaatattaaagtagtttccatactcaccatatcatatagatactatatatatagaaattatgtacctatagttggttgtttttttcaaaaaaaaaaattcttatctaatcacctctcgtctctctcatttcatccacctattccatcgtttccattcttggttcctacgtagagtcggtttttatatgagaaatgattttttttcatctttttctttctcttcttattaactcttttatcacatcggtttttttcctacatgacatcatatttaatgctatagaaactaactgaggtggatggttggtactgctttaaaagttagatttgatatgctatcaatcaccctaatttgactatatctttaggatactccaatatcatatataattaatagttgaatattagtgttggatctcaatccagaggatctcttccatcccttgactatcttccttctcccaaaccctgtgtattatattgatggttccaccttgccatacgctatatttgtccctacaactctacctacttgcatacatcattctctcccatgcaaccggagatatatgagggtaagaaacaggccatttcgaggcttgatgctactcttaggaatattattgatacatcgcccttcaagcatctcgtagttgagaggtactgccatcaacagtgttgagcatggataggcgggagtcgaactcgctagtcactcttttcatgttagttagga

SEQ ID NO: 18113 - DNA, 13104 bp, Oryza sativa
tagttgctatcacggacattgatgataacaatgtaagctttctgataaacaagagatcaaacaagctgctcgcaatcggattgtagtggaaggagaatgcttccgttcattgtaagatgtagatgcaacaaaaaactagtgtttgttagctgtaaagccttggaatttactgggattaggctgacaacattgccagcgcgatattgttttcctgtcctatttgtttggatgcaaaaggtcatgtaattcatgtaaagcagcttgggaattgcttgatttgaaggtcacattgtaatctgtaaacaagaattgacctgctgtaatatgattattgttgtcctcttattccatgacatattttcagggaacaaatccaagtttcaaggagaacttgcagtggcggtataacttctatttgactgtataattcatctaaaaagctataaaacggcataccgtcaggacggtacaagttatgcacgatatcaaaccgtccaacccagcatcgcgataaactacccatctctcctcccgcatgggtcccatgagacccacggattaactctctgcgcatgcagtactagtatagtagtactacgtactatactactgactgccatatactactgcatgcactagtagtactggaggatacccatctctcctcccgcatgggtcccacgagacccacggattaactctctgcgcatgcagtactagtatagtagtactacgtactatactactgactgccatatactactgcatgcactagtagtactggaggaggagtacatgcactactagtctactattgtcgatgtctgacggtctaatactactcctgccttgatgatgccatatgcatcaaatcgaagttaaaattgccagtgcccatgagcaagagaaaatgacttgattctctattgctatatgtgatcctatgtgacctgatgatgaacggtcctgtttcaaggtaaaatagcgtgagtatatgagtcttatatatctaggtatcatgtctggtacctacatatatcacgaccgatatttgggtatcatttatggtacttataagtatcagacttggtaactacatgtatcatgaccggtacctaggtaccatgtctagtacatatatataagtatgagatctggtacctacatgtatcatgtctggtacctacatgtatcacgactgatacctgggtataatgtacggttcttataagtatcagacttggtaactacatgtatcacgaccggtacctggtatcatgtctagtacatatataagtatcagatctggtacctacatgtatcatgtctggtacctacatgtattacgactgatacctgggtataatgtacggtacttaaaagtatcagacttggtaactacatgtatcacgaccggtacctaggtatcatgtctagtacatataagtatcagacccggtacctatgggtatcaacctaatacatatatgtatcatgcttagtaccacaaatactagagctaataggtatcatacgtgataccttggtatcatactaggtatatgttaaaactgagacccacatataccggctgatatgtgcttggtttgctacccacatgtatcatgatagatgctttacgatactttcgaggtactattatagatagtcatattttgacatgtaaaaaatagtataataatataagatactgaggtaccagcccaaccactgagtatagctacaataacaacatcatgtcgtatagctaagcacgcaattatagaggagtttgtagttatgtgtgaccaaaaggataggcattcataatctatgggtgcatgagtgagaagcacttgtcatgtcatgcatggcagatgcacagagtagtagtaattagctagtgtttgtgaattgcttccccaaaagaagtatacagtaatcacgaccagcactagcacatgcacgcaacctgatgcgcgcccgccatcgcattagggttgaggtgtccgactaatgattatgtcgttccaacggtaagtggcacatgtgcccagtgttccaaaatgctttttaaataaattgagtatcaaggttcaagtttggacttgttcgcaaagattatgagttttagaatctttacctcgaatagctatgcataagctttgatattttcattcttgatgttatgactaacttcaatgccttgcaaaatttggttaacatcatgttttagcctgaggatctttagataccttagttatccatgatttgcttgggttcttatatcttagtatcatttttatcctttgcatttaagtatgcctacctcctttacttgacatggctagctatgttctgtatgcttcaaactcagtatggttaattttgtaagttcaagctaacttcaagctaatctacatgatgttaaagttcactaaatgtatgccatgagacttatcacattcatctgactagtttttgtttaccacattgcttcttcctggttctcgaaacttattgttcatttacttgaggacaagcaaatgtttaagcatgggggtatgatacaatcaaattttgcatcattaatctcatgatcttcctcttgttttgctattgtgatgggctaaaattaatcctaatgcatatttcagacattatttgtggtacaatatgtcccttttatatggtttcatacattatttaacttttctacagaatggcgcgatgaggcgcgtaatctgctattttggtctccaacggcaaacaaatgtcagtttttgtgtggcaagacaaaagaagtcaagtgaagcaaggacctaaacataatttctggggagatgaaggttgaaagtgccaaagagcgaaccaaatcgatggggattaaaatccctagaaatgctactgtacaactgggcctggcattttctttctccccttctcttcttcctcgccatctcctcccttctccttcttccccatcccatctatagctccggcaccagcgagggccaggcctaacctcgtcggcagccaccatctccagctactccacatcccctcccaccagaaagttgctccaattcgcctgaaaacgtcatatacatcctcctgcagctcttccaaatcgaccgggacagtggagacaacctaatctgctactgctactgttcttcctctactacttccttgacaactgatctgtaacctgttgctgctgcatcctcttcttccccttcttctttttccttcttactgcacgatttctatcttcttcctcctacttgtactgtttcagatttgttaagaatttaatatttggagcttgtaatttctgtcagtgctagtcaaatgcatgaatctctggttatgatatatgagagtattaagatcctgcgatagttaatttcttcttcatcctgtttaatttcttccgagttctcctgttgtttatttctattttttttctttgttctcaattgttgtttgacctagctttagctaaacactagtagccatggcctagtccctgtggataacacgacactcgccactactcggtggcatccgtgcgcttgcggggtgcgtagcacaatcaagatcaaatttttatgagaactgctagatcacggtatcccgtgtaacgggatagattataatgagttaatgacgagacgttgcccccaccaaccatgcgcatgtgtccccacgcgtttgtatctcttcctcccacacgtacgcatcgctctcccatacccttcacatgtttgttgcgctcccccacgcatccatgcgctcgtattgagtacctacacaacttttaggtatcagatccgatagttgatacctgaggtaccatatctggttgttacccgtattagatctaatacttgatacctgttgacagaaaacacgaggcctgggagatctgcttaactccagtgcaggtccaaaactcgcctttgggtgtatgagcgtgccagttgatttgatcctgcaatcaacaagaaatagaacaaaaaaaccgcaattaatcctataaatgatagccgatcggctaggtgccgatggcatatcatttatttcaagccgatgtcatgcgtacatcgatcggcaaatatcaataagcaaatcagaactaaatctacttgatcggctgtaaatattaatgatatataatccttatatcgatatatacttaaatcaagtgattgggatagatcggtcgccttgccgagacagtataaatcacttaaatcgaaatataaattaataatgggattatatacatttatagtatagccgatcaagtgaatctagcatgtatcggctaatactccgatatcactctatattaagatgttaaagcaagtagaatatactaaacataagcttaatatacttagatgcgacaagatcttaacataaagggcagatttaacatgtcaatccagcatatagaataaaagtagctaaatcagataagatcggctgaaactccgatactaccctaatcagcaaccagaaagcaggctagagattgcaattctaagcacgacttaatagatcaaactcaactgatgcagcattaagtatgaaaagaaaaacaatatctagacaatcaagccgctggaagtttcatagagtggtagatatatcacatgatctaagttaacatcattgtctaacctaatcggctgccttccattaacagatgttagctgattataggttaaataaagatattatcgaaaattatgtgagatatatgataactcgacaaattgtatagacaagattagagtatcataaagatggaagcactaatcctgagaacataagtcgtcatgacaagttttacctcttgttgaagatcgaaaccgatgcagctcaacccgagagcacgaactcgtcgaaataaaagtaaagcaaaaagggtggcgatgcgcctagattgtattggatgtcgtccattaacatagaccccgggtgtacatatttatacccatgggttgatacaagtccttgtcggacaagaaagaaactttcctaaagataaaaggaaaagataaagtccttataggacactaaacacactttcctaaagataaaaggaaactgacgaactagtcctaactaataaatacaattgccttcccaggactatccttgcgtggcaaccatcttgaagcacatcaacttgaacccgatgacgtacaccgagtcatattatcggaatcggctgtatcggctagccccgtccgactcgaactctgccgacctgaccttagctgatttggactgcagccgattcttactctgtttccgcagcgatctacatcttggattccacttcgatctgatcctcacctccgatgccaatagtgatagaatttaccaaatttggtcgttaacacatgcccctaagtccggaatattggataatgtttcggatttgccatataccgactctgagagaaacccgcacttgctgttttcccgtccgttatcgctctactttaaatactaatcgttgccccaaagaatcttcacgccgtgattttcgttttcaccgcttaaacagatcctgtcctctctctctccggcgacctcctcaacacgcagggcgatttccaggcgattcaactcccggccagatcttcacccacgacgatgtcgacctccaccaatccgaccgccgcatcatcagccgaatatgctgaggtaagtccccatcggctagatccccttttccgttcatcagaccagttttcgctcaccttatcttgttttcttcttctctattcttgtagcatctttccaatcttgttgcggttcccagtctgttgcatgaccaacaatactttctcggtccaatcggcaatctagaccccactgagtttatcatagccgaaaccaacagaatcccttttaggtcggccaatccaaacacaagccattggaaaaacaccttcaaatcctggccttctctggagaaaagttggcctgtatggtataagcggatatcagccagcaaacaagccctagccctcacagtagcaaattcggccaaagatgaacccctgatggctactgcaacttatttctggtccaacactctcaatgcttttcttttcaaccaagggccgatgaccccaacgctgctggatattatcatgcttactggcctagatgtaacctcatcagctaaccccatgaacctgaacaccaagaacacttttgagttcaaaactaagagcattgggggttggtcaggatatatcacagcatatatgggcaaagggccagtaactcctagagagcacgtagcttttttgctgatgtggttggaaaaattccttttctgcggatcaagctgcggtcctacaaccaactggcaattcttagccgaggccctagtaacgaagaaacaatttcccttaggcaaaatccttctcggctatctataccagatattaaacaacgcatcggccaagataattatcggctcagtggttggaacaggtggaccatggtggctcttgcaatcctggctgaacctggtagtcatgaaagttgtcaatcggccatctgtgacagaagctgaatttccaaggttggagccgattgtggaagatgatggagaagaacgcacccatcgcagatgtatgtcatatggagaatatgtatctacaccagccgatgcaggaacaaagttatcggctgaacttctgaaggactggttcttcagcttttatgacggattccaaaaagatgcccgagtttggttcttctatgccgactcaatggatttcgaactgccagccgatttcaggttcgaggatattaatcatgaaaagtttcagcaatccagagaaatctttactactgctatcagcccatgtatccttccagtcggcatccatcaagggagaaatatccaagtctcctatgagttttatcatccgatgtcatcggccagacaacttgaaatgggacaacttgaaatgggagaaatatccaagtccttatagtacactaaacacactttcctaaagataaaaggaaactgacaaactagtcctaactaatagatacaattgccttcccaggactctatccctgcgtggcaaccatcttgaagcacatcaacttgaacccgatgacgtacaccgagtcatattatcggaatcggctgtatcggctagccccgtccgactcgaactctgccgacctgaccttagccgatttgaactgcagccgattcttactatgtttccgcagcgatcttcatcttggattccacttcgatctgatcctcacctccgatgccaatagtgatagaatttaccaaatttggtcgttaacaatacctgaagttccagatctggttggtacccgtatcagaggtaccagatctggttggtacccgtatcttgatacatgaggtatcagatctggttagtacctgtaacggatctagtatcataggtatcagatccgatacttgggatactagattcaaacttgaggtatcagacctggtacccatggtactatggttggtggtacctagtctggtatcggtacttgatatctgaggtaccagatccggttgatacccaaggtatcagtttggtaccataggtatcagatccgatacttaggatattagattcgatatttatggtatcagacctggtacccatggtactaaggttgatggtacctggtctggtatccacgaggtgtcaagaccagtagttgcatattaggcttggtaccaacaaaaaaaaaagtatcaagcctggtacccagaggtatcatttgtaccaaacaagtcatcttcttcctctctccaacacactatatcctcatccatgtgttgattccttagcatgaaatcgaagcaacatcaacaacaagaacaaaaaaaatagagatgagattgtgagtagatgcaggcgacgaactactagaaaagccatatcctcatattctcccttcttcctgtggacatctagcctcatacaggctctgcaattgttgcactcatgtcggcttgctggggacgtcgccgatggccggctcagatggcgttgcggtcgatgcggcgagaaaacggctcccggtggccagcggctagtggtcgtgggcgtagagagggggacagaggatggagggagtagcttgcgcgcggtgggtggtggacgacgctgcataaacgagccaagatgaggtgtggggcgttgattattagtctatcccgttcgaacggtatgccgttctatagattttctattcatctaatcatccatattccgaccaatcacttgatggtacctcagtccgtccaatatctttattccctttttcttagaggattttactctacttttgcataggttaaaggaaccagattgacccatatggcaatcatggattgataatttgtatttttttttcctattcccctcttgtaaagtctcttgtacataaactatatgagcctcttctactgtttttccattaaaaaaatcctaaagaggtcaaggaagaaaagaacacgtgtttaatgattcaaatggtagaaaaccaaagaggttagagttccacaataatttggctattcttacacattggtggatccaaaggctggtccccggaccacccaaatatttgccggtccaaaggcccaaatagcatgcatatatgatagtaagaaaaaaaaaaccccctgaatcccagctgttaaatcgtgaaacagaaaagccgcgtcattgcttccgctccctctccacagcccgcctcacgtgatctcgaattctcgatcaaccgtagcagcgtgcgactgacgagtgcttagctaggttaggactcctgatcagctgtttccttcccgacgacgacgtccggcgatccagcggtgacgacgccacggaggatcgcggcaaattgccaatcgatggcaagccagcaagggtagcgcgtgtgtgggtgccgcgaccggcggcagcggtggcggcgagccgacgacgatggacgaaaatcctgcaagatgcgtcacctacacgggcagacggccggcggcggacaacatatcacggcaagcagctaagcaaagcaagggagctaggtcgagatctagaagcaagcaaaggatagccgatggaaatctgtaagtaagcaaagcaagaatagatgattaacagcttattgattattttgttagccgattaactactctaaagttagtaatcttttttcagcttttagttgacccttctcatattatactattgtattacagattgttgaaagtatggcaatcttctccaaacttgtgtagcatatctatttctttaactcaaatttcttatataattattgattttaaggtgtttgtaagatactttattaatatatcatgatcaacttttgactaattttgttaattatacttggattgtatatattagcattgttactttacggtgtttcaaaataattgaagtcgggtcacccatatccaaaattctagatacgccattgtaatcttatatgagggatctgtcagcatcgcacacggtaggagtagtagagagatattgaaccgacttgggctgttaccctctgcccatgtggtgtaattaagaaaaaaggtacaccgaaggtcccttaacttatcatcgagttacaaaatcgtcctccaaccgcaaaaccggatacaacgcatcccccaacttataaaactggtgcaaaccagatcccttagcggttttgtctgatgtggcggctgagtcatggtgggacccacgtgggccccacatgtcaggatgccacatcagcagaccggcctctccccttcctctcctttcctcctctctctctcactcctctctggactctgtgcagggccggccggcggtggggaggaggtcgccggcgcaaggaggtccgacggccaaccggcgacgcggcgatggaggcacgggagaaagggagggcggcgacagggcgaggcggtgtccgcggatgcggcggcggagaggcggcggcggctacgacacggggcgaggaagtccgacggtcgggcggcgacgctgcggtggcgcgctcgtagtagtcgtgctcggcgcccatgagcccgccccaccgctccaagtccctgacggcgaagccgctgccgtccgccgccgtgagctccacgctgatcgccgcgtccgtgccggccttccagatccacccggtccccatgtagtacagcatgtacacgcacttgttcttgtcgttgtccccgccgtcaaccagctgtccacggcgcggcagcgccgccacgccgcccggcgatctcgatccggcggcctgcacgcgcgtatgcaattaacatgatcagatcaactcacaggtcacagcagagcagagagacgatcagaaaagaaaatgcatgtaccaagaccaccacggaaacgagcgaggcgaagtgcaagaatctgtcagcagccattgtcaaaggcttgaagaactccctctattccagagcagatcacaagcaggtgacaatcatgtaatgcacaaggagagagagtatgggaagtaaagtcaaacaaacgagtactacatgatgagcatttttagatggatttaggacttcacgagttgtctaaaaaactgataaatcaggtacgttcgcctcctccagctccgcgtatgtgaacctcgccggcaacccggggatgaggacctcgtcgccgtcgccgtcgtcttacttcgcgctgctggtcctcgctcacatacgacgcctgctgcgacgacagcatcggcaacttgaaccagctgcggttgccgcctagctgtggccatggcgccgccgctcgcccgccgacgccgtgtcgccgccgccgcatcgccggccggccgtcggacctcctcgccctgcgtcgcagccgaagccgcctcgccctaccgccgccctcccctttcacctgtgtctccgccgccgcgtcgccggccgaccgtcggacttcctcgccccgtgtcgtagctgccgccgcctctccgccgccgcatccgcggacaccgcctcgccctgccgccgccctccctttctcccgtgcctccattgccgcgtcgccggccggccgtcggacgagtcctgagaggagtgagagagagagagagaggaggaaaggagaggaaggggagaggccggtctgctgatgtggcatcctgacatgtggggcctacgtaggtcctacgatgactcagccgccacgtcagacaaaaccggggtcaaaaccgctaagagacctgatttgcactggttttgtaagttggtgcggttggaggacgattttgtaactcgatgataagttgagggaccttcggtgtactttttcctgtaatcaaacacgcttcctcactttatgaaaggggcggatgtatattagtatcattggtctcagatgacacagatgccatccaaccaatccagtgtattgctagcatttatacacacttaccccgacagtgcaagcttgttgaccccaaccgctaaattgcagctgctcagaggctaaacaatatagctccatctttgaaaacttaaacagtttaactggtgtggtaggtgttggagcctgaatctattttccaacatccttcctatttcacattataagatcttttagattttgaatagattcattcatacatccatatgtgctacatatatatgtttaacttcatatgtatgttagaaaatttagacaagagataaaaataccataacgtttataacatgaaacggagggactatatgttttggtaccgtcagccaccactaatgtcacagtttaaaatatttgatccgttgactataattatttcttttagctaatgtttctatccatgtaattaggccaataattctattatcaactattaaaagttaaccatatttttacgtattagtgaaaacaacttgaataacttgttgtctgaccaaaagaataaaggatttgtatttcttattactcttaagagttagtctgaaataaacatgctcattgaaacaacagcaatattctaccggctctagctaaaaataacagttcaaggacaccttagcttacaaaatatttagaaatgaagcccttccaaacactatataagtataagtgagtgctgacattggtgccctaaaatcctagatcagcaagggagtccaagtcaagatggaggtccacatcaagtcgatttcgagtacgtttcagagtccaggaccaatctacactaaaacgggtgtccaggtcgcatatgtgctcggattggagcgttctttatatggatggaaagttaagaagataaccttttcaatggttctggtcccatatccaaattcttttcgagtcattgggaatcgaccgaacaagttgatgttcagaatctattccgatgctgcgtcgccgtattttggtctttgggccgtgtatcgtgttggagctcgttaggattgcgtcgtcaagggttatttgcacgaccctaaactctatatattagtagttgtcaccacctttagggtttgggttttgcttagattaatctgtcaagaacagtttcgccaaccttcggtttgtaaaaccccaacttgtgagcttaatcattcatgcacaatttggttgtattctttcttgttcttgtttgtgtgttcctcaattcacaaacagagattagccttatcggcgaggtcaactggttttcgacacggttgataatcagaggagacatggtgctgtgactgcggggctcaagagcgtgtttgtttagaagccggatcgatttgtgtcgcgactccaccaaattgactgtttatcagaacctctcgaaagatcggaaacccttgtccacatcactttatgaggatgcatgataagcatatagaaaaattctaacagaaagattaaaaaaaatgagaatttccaaaaataccgtgaacactattactaaaactaggaactaggaaggtaacccgtgcaaatgcgcgggcgctttatttaatgttgcttgaaatttttattacgaatggttatatgtggttga

SEQ ID NO: 18114 - DNA, 11807 bp, Oryza sativa
  unsure (1)..(11807): unsure at all n locations
taaaatagatagatagatagatatagttggtgtgtttgaccctagacagggtggtagtgtgcacgcaggacgcatcagctggcggcgatggtggcatggggttgctaagctaatttgaccgctgaaagtgatggaaagcaagcaagcaagtcagagttgccatctccaatcggtctccttatccccatttttctctctgtgctgtactacagtggagtaccacgactgtgtatgtgacagcttagctaactcaatgattaaaatctcgccagatccctcctgcgttatcaatccactgagaagtaagcgaacgagatcgcctgggccggctcgtcggagaaggctcacacgcgacgcgcgccatggcagctgcaaccgcagctgatgttgccgaggatacggccagtgtgtactccggcaagcttaccctctacgtcttcctcacctgcggcgtcgcggcgaccggcggcctcatcatcggctatgacatcggcatctctggtaaacatgcgatttatctcatctatcttttagtatatatgtactggttagagggaattatacgcatggtgacttgtagtgggagaaaaaagcataggagaaaagagcagtgctagcctttgcttatacagacttcatgcaaaaactcttaagataatcatttggaccttctatatctatgctatttctaaaagacattctaccaccaccaccactgatacgtggaccatggtgttcgtataagttgagtgcttggtcaatgtttgtctcattgtctgtacttttgtggagtagctgtgtgctttttactctttatagctagtcttgcattactctgtgagctgcaagtctttatttttctattaatttacttcttgccatcctaattaaaagacctcacaatttaatttaggtttccattaataggcaacacaatttattgacgagtacatattttaacatcatatcaaatgacatcttgttaacatgattggagtcattgatctatactgaaaactaataatgacatttatccttttgtttgttaagaccaacaaattaatactttcaacagggataccttttgctattttgaataaatcgttgcaaagcacggatatttggctagttcctactgaatatatctgttgataacttgatatcgatgatcagcatgtctacacttctttatgtggttaaaccttcgaggtaaactcaggtcggctgatccggagactctagccggttgagtagttcagaattgctcctgatcgaaaactgttcaattgctttcgaaagatgaccatttcttgaagttggtgtttacagtacaaattacctacatttacacatcccttaaactataaatttgaaaaagtatactatgattacattgttaattttaaaaattaagctatgttttctctaatacacaatatataagagattaattaactaatttagaagagaagattggcttgatacaaacatacttacatatatataaagaaaagactgaaatcaattaagtaataaaagtggtgccaaattttagcaaaactagctagtataatgagtgtcgacattcaggtggtgtgacatcgatggacacgttcctggggaagttcttcccgtcggttctccaccaagaacagacggcgcagggcacaagccagtactgcaagttcaacagccagccgctgaccgcgttcacctcgtcgctgtacctcgcggcgctcgtggcctccttcttcgtcgcgtccttcacgcgcgcgctgggcaggaagtggtccatgttcggcggcggcgtctccttcctcgccggtgccaccctcaacggcgccgcgcggaacgtcgccatgctcatcgtcggccgcatcctcctcggcatcggcgtcgccttctgtggtctggtaagtcgttggagaaatcaaattagacacacattggcagcatcaacacaacacattttgacagatcgttcttgaatgtgtagtccactccgatatacttgtctgagatggcgccaccgcggctgcgtggcatgctcaacatcggcctccagctgatgatcaccgtgggcatcttctccgccaatctcgtcaactacggtgcggccaagatcaggggtggctgggggtggcgtgtcagcctcggcctcgctgccgccccggcatgcgtcatcgccgtgggctcgctcttcctcccggactcaccgagctccctcatcaaccgtggccgccacgagcaggcgcggcgggtgctgcggcgcatccgtggcaccgacgaggtggacgacgagtacggcgacctcgtcgcagcagccagcgagatcgaggtgtattccggctgctccgcgagacgacggccgtggcgcgacgtcctgcagcgcaggtaccggccgcagctcgccatggccgtcctcatccccttcttcnnnnnnnnnnnnnnnnnnnnnnnnnnnnnnnnnnnnnnnnncgtgctgttcaagaccatcggcctcggaggagacgcgtcgctcatgtcggcggtcatcaccgggctggtcaatatcgttgccacgttcgtgtccatcgccaccgtcgacagccttggccgacgcaagctcttgttccagggaggctgccagatgcttgtgagccaggtacacacaaatatatatagaagctgatatatatacacctatgacctactccctctctgttcatattattagtcacttttttcctagttaaatttagtcaaactttgattaaatttatagaaaaaattagcaacattttaaacaccagagtagtttcatcgaatctagcattgaatatattctgataatatatttgttttgtgataaaagtgcttctatatttttctaacataaagaagtttggctagaaaaaaagtcaagacatatcgagtgcctgcaaaaaaaaaaaaatgtatgcatgcatgcttatgatcgattcctacaggttatcattggaacgctgatcggtgtggtgtttggtacgagtggcgatggcaacatctcgagggcgttggcggtctgcatcgtggtgttcatctgcgtctacgtcgccggcttcgcttggtcgtggggcccgcttggcgtcctcctgccgagcgagatcttcccgctggaggtccggccggcggggcagagcatcagcgtggccgtgaacatgctctgcacgttcgccgtcgcggaggccttcctcccgatgctctgccacatgaggttcggcctcttctacttctttagcggatgggtgctcgtgatgacgctcttcgtctcggccttcctgcctgagaccaagggcgtgccgatcgagaagatgaccgtcgtgtggagaacgcactggttttggggtagattttactgtaaccaggatgcagatgcacacgttcaagtggcaaacagcaaagtttgaaatgcacaatgccactgctgtctgattttatacagatgtagcaaatgtgagatgcgtattttgggactggttaatttgctgctgatatccagcatgcgcatctcgaagtagcgcggagcaaagttcaaatatccataggaatctcaaagcaatggttttgtttatcgacgtttttaggaaagctcacaccccactggtaataggaaaaaagaccaattaatggtgttatgcgatcatagggggtgagcgcgtatatatatatgaacgcttacgtccgtactgtatttcgaacacaaaaagacaaatggaatggcgtgaaattaaattctgaatcagctaggaactgccggaaagataacaggcataatatgatagcctagttaaaccaaaatgtatggatgggtttgtcgcgcgattcctgtagttgttaaggattgcaagaatgaatttctgaatataaacacaatgtcgtaaatataaaaagccagaattgtatttccctaatacaattaattgtttgaagcaacaatgggaaatagatatagatattatatatagattgatggtcacattaacttcaatgaaaatttataacacaaatatgatgcttagcgctactgatcgatgttccttttgtatctgaaattccataaactcaccaaatgggggaggaccagaggaggaaaaatcatcgaataataagacagaccgagactcaagaatataatctatgagtgataaaggatgccggagctgtagagtctatgagaaccaataatctaaatcttaccagtgggtatgtaccatgcttgttgggcacggccatatatagcttcattatttgtttttgtttttgtttttgttttttttttttgcctgtgggcacgcctcaaccaagctcgaatcccagcaggcgtggcgtttgcattatgcctgtggataacacatgccttttgctcatccctgtatcttgtcccatttgtcccatctaatcatttttttagatataatagaatagaatatcttgacttttgctcaacgagttacagccaattattacaacatataattacataatgtaattatcatgacatgacatgatatgcggtatatatacttgacatggaatgtaaccctaaatcaattcccgttctattttctatccactcactcctctccatgccaccgtggcggcgctcatcatgtaaactagatgattccccgcgctttactgcgaaaattcctaagtaacttttaatatatttttaataatcgagctaaaagtaaaaaagtatattagttattaataacaaataaaactgggttgtcaaactatgttaagaaagaaatacatttagtagaccttgtatgagattatatatgaaatatgatatcccgcactttgattataggggcaattgtatatttgacaagctaactaccaatttgatcctatttttttaagtttgcttttttgaccctactttttaactatggacatcagacatgaccccatttcgtgaaaccaatttgacggtgttaatttgaggtcgaaataccgtttatacccttgctcatttgaccctgttatcttagagtttttgtatatttaacctaattttatacacttggtgtacatgatgcaatttctaaaaaatttcacttggaattgatatgttgtgtgtgaatttgaattagatttgaattttagccaaaaaaatacaattgggaatacaaatcagatcgccacacaaatggatctagaacaatatgacagcattgattcaaatccattttcaatacaatgcctttaccactgattgttaacagaggcttctcagaagaagaagaacaaaaagttgtttcgaaaaattcgagtaccggccacacttcagtatccatagacatagatagtatcaacatgcaaagaaatccttgccaagaacatcatccaacaataacatttcaacaaaaatttcctcaagtctggcaccggcgcatccagacaccgccgccgctccctccacgtcccaccgccgccgccgtcgtcactccctccaccgcaagccggcgccgatgtggatccatgcccctccgctgccgccaccgctccctccacgagtcggcaccgacgcggatccgtgcaccaccgtgtcccgccgccgccactccttcccttgacgagccagaaccggcgcggatccgtgcccctctgccgccgccgccgctccctccctccacgagctggagctggcgcggatccgcgcccctccaccgccgccgccgctccattgacgagccggcaccggtgcggatccgcttcctctgccgccgtcgccgccactccttcccccacgagccggcgccggtgcgaatccgcgcctctccgccgccaccgttggtcccttccgtgtgccgccgttgtcgcccctcctcctcgtcgtcggccgccgccaccgctcctcctcttcatcaagctgccgccatctctcccatgccgccgccgctcctccacctcgtcgggccattgccgacactcctcttcatgtagccaccgccgcgcggctgccgttgcacgaggagggcggcgggaggaggtagggagaggataaggatttccagtctggtgagagagaggagagggagaggataagggaaatgtttatgtgtgcaagggtattttggtcacttgtggctcaaaaaacattttttttctattttataaatgaaaccctaacggtgtcaaaaatgaaaccaaggtcagacggcaactccaattttgaaaagtagggtcaaataagcaaactgtaaaaagtagagtcaaattagtagttatgcttcaaaacatggtcaaaggagcaattgtcatggatatatgttaaggattaaaaaaatgatggatatatatattttaaaaatattgtgaaaaataatgtgaaggaaaatgatttgtagaattcaatgaattctagatgatgttgcatacttgtataagttttgcatgttattattgctaatggatgatgaagtgacatgtttgcattttgagctttagaattagtgagttataactttatagtaagataggatatttacctcttaattgttaaatgcctgtgctgcatgagtatatgaacatccaaccacatcaaacttttgattgaatttttagtgaaaaacaaagaaaacgagtaataactattattagatgattcaggtcacaatggtcttggcttgattcagcacatatataagatagaaagtgtcatgtaaagtatagtcacgcagaggggaaattaaaacacaaagaaaatagcatacaaaaatcttgcgtcgaattaatccaagtttgcagaatcagcagaagatccagtgccgatgaccccaggcggccaccagtgcttgccgacgaatcacaccactaagatgcataacttgttttcccaatggttactgacgtctaaaattgtttgtacacatgttttacccaagctctctagaaaatttctaaatcacccgttggttcagatgataacaaggagaagaaatgaaacttctgaacccaaattatattgtttagcccagattgttctccattagttttaattgttaacttatataatatgaatacccagaaaacattataatcatgcattaagtgatcataagtttttactgatctgcacgtttgtagctggaggcacactttgttttagtcagcacgagtccgagtcccatggaatggaccgattgtgtgggatcgatgaagcacaatgtacgggtggttcatggcgcacatgtaggtggcatcgaaagactactatttttagtcgttcctttttttcttcttaaatagagaagcgctgcaaagtttggtggcacaaatcgttcgttttgctttttctctccgctttcatcttctaggagttcatccaggtgttcaggtgtgttagattggcttggagtggtgacaactggtagcagagcaatgtcatctccacttgccggttgttcctggtatgtcgagggatactggtgctgacattgctctgataccaattgtcggcactctaggccaatcatacacacttgactaccgagacgaatacttggaagactaaggcggaaaggaaaaacaaaacgataataagaaaatgctgcaaagttggatgcatagacaatgcatcaacaacatcacactcaatggggtgcggcaagagatgtagttgccggtgcacttcctcctcatgtttagctgcatcaggcatgcaaagattgtacagccacaaaaaaaaaaccttgatggttggagtatatggtgatgtgggacatcgtcttcgatgagggagctcggagggactaaatctcggaacctaattgaggtatgccaaacagtacctcgtgcatgtagacgaagtgtttcttgtatcactaggtgtaggtagcttagcctattcatgtcatccttgattagtttgtcttatccctgaacttctccctcacctccgtttgggctttctgcatgacttgtggatatttctcattagctcagatattgcccactaacgtgtcgttgagctgtctcgctccctgctgaaaatatttcctgagattaataggcaatttgtaatggtgactttgccaaatggtcattttcaattgtaattctgaaaacgataatgctgaaaatgcagtacagtgctgtgaatttccagagtgatttttttttctgtaagtgtcgtgagttcgtaaattgtccatgttgaaaaatgtttcggccggcctaccgcagcgcgcgaacgctccggctgcaacgctcggccggcctaccgcagcgcgccgctgagccagctcgctggcgacgacgatgggtacaggtcggccaagttgaacccgcccgcgagcctgacggagacctcgagcttgtacgtggaggaactcgtcgcgccgcgcgcaccggctcccgatggcggggcgcacgacggagtcgttcaccatgcgcgagatcttctcgctgatggggaccacggcgccggcgccacccggtgcgcactcgccgaccactgcgtggactaggtaccccgcctgctagtcctaacggacgtggcgaggcgactggacgcggcgcgctaaagagctcgagtaggcagatgtatagatggtcatatggcccgaggcctgatggcccgtccaaggtccggtgattttggcctggggcaggcatggcacggcctgacttgggtcgtgctcgcggtggcccggcccattgtgctagggctggtacctcagcacgctggacatgcatggttcagcccgaagttaagggatgcgaaatagacttattctcagccatatgtaaggcacgtcacagagaatagggagaaaaaaatagacatattatatggcacgacccatagagtagggatataaaataaacttattttagctatatatatgtcacagccaaaaaaagagagaaaatagacttattttaaaaaagacataataggccgcctgtgccttcaggccggcacggcacgacccgacaactggtgggctgtgcctgggcctggtgtgcagcccatgggccagcacggcacagcctgaagtgtcgatcgtgccgtgccggcccgatcgccttggcccgtgccggggccgaggcgtgccgtgtgggccttatggccatctataggcagatccttcggagctagcaccacatgtcaccatggggcatagggaaagaacagtgtatcgattacgagccattatagacgaggggtcatatgtaatggcttctagttttgtatcgttagagataaaagtgattacatctgtaatagctgttggttaagagccgttacagaagaggaggcttcaatgatggctcaagggtgctttggtcatctataacggtcatcaatgccatccgttacataagtcaaaatttgtaacagttttaaccggtccatggcacattatagatgtgagaatccgtgctactgaataatagtgataatgtacaaagacatactaatttacacaggtttagatttattcggagagaggtatacttacaaaataattaattgtcatcataaaatggtgcacacttttatcatatatcaaaattacatatttttggtactatctagttcaaatcaatacatttcacatcactcaccctagggtgacattatctataagtaaccagagaattaagtttagtctaccagataaagaggagccataagagcatggagaacgtgcctagttatgcaagagttcacatacacaaaacagttaacccaaacatggaatacgttgtgtagcatacaccatgagcttcgacttcctctttgcagtgataccaaatgtctcggacaagtcaatctcgtcattcctgtctcgatcgaggaactcccagtcaaaatggtataggaggctggcaagcatgagctctatattggcaagcccaagtgcaatcccagggcatatcctcctcccagcaccgaaaggaatgaactcgaaatctatacccttaaagtcgacacgattgttctcgaacctttctggtttgaatacctcgggatcatcccaatactgattgtccctagctatggcccaagcgttcacaagcactttagttcccactggtatgtcatagcccataaccgagcatggctcacggcactgcctaggaagaaggaatggtaccggtaaatgtagtcggagtgtttcccgaatcaccaagcggaggtagcttagcttgtccatcatttcctctgttagcttgttttctcccctaaatatctcccgcacctctgattgggccttttccatgatgtgtgggttccttactagctctgttaaggcccactcaagtgtcgtagacgaggtttcactcccagccgcaaacatgtcctgtggttttgtaagcaataatgagttcacagagtaatcatttggatttgaagcaatgatgaattcttcatttctctagaagaaataggtaagcatcattgtctaaactgcaaaatgcaaacaaattcaaaatgtagatctgatgatgttactagttgctactccctccattccaaaatataaatatttttaaaatagtgctaagtcaaacattttcgactttgaccattaataacaaaataaaaaaataaaaaatcaataatgtaaaattgatgttgctagatttattattaaacaaactatcataatatgcaactctttttatttagataatcttacttttataaatgttgttggtcaaagtagcatcttaaatactgtgttgaggtccaaaaatgcttatattttgggacggagggagcagtaagtttgatactagcgtttaattgtttcaaaattaactggtataattatgtacctaatatggaatagtactgcacctaaaatacacaaaatcaaatactacttccgttccaaaatataataatttttagctataattaggacgcatagttattcagatttatagctagaaatacttataatcgctggactgttttcgtggatgtgtgcgtacggtgcatgtgcatagtaggacatgtcttctcagtggcggaactgggcctaggtaacttgggcccgggccctactcgtgaaaaaaaaattagtacctataccttgtgaatttttcgatgatggtgtgtaaagaaatatcagatgatggtgtgtttaattaccaagacgacgttagtgatcaaatcggtggtgaggggacactgcacatcgccgttcctctgcaatctgaggagtacgccgaggaggtcttcctcgccgtcgccgtgctcccggatgatgtcgtccatgatggccatcaagctccgattgcaccgctccgtctcccgcatcgcgccgctgagccggcgcgccagccacgacgacgggtacaggtcggccaggttgaacccgccggagagcctcaccgactcgtcgagctcgcgcacgaactcgtcgcgccgcgccgaccgggcgccgacggcggatcgcacgacggagtcgttcaccgcgcgggagatcagctcgccgacgttgacaacggctgcgccgccgcgggcggcgcactcggcggcgacggagcggacgaggcgcgccgcctcgtcctcgcgcccgtggcggagcgactggacgcggcgcgcgctgaggagctcgtgcacgcagatcctccggagctggcgccacaggtcgcagtagggggagaagaggatgtcgcggccgccgcggctgaggacggccagggtcggcgtgaggtagcggctggcgaaggcggcgtcgtacgtcttgagcacctccctggcggcctcggccgacgacacgacgagcgtcggcacggcaccgaagcgg

SEQ ID NO: 18115 - DNA, 9051 bp, Oryza sativa
gagctcgcgcagcgccctgtgtggcaggtcggcgtggcgcgacagcaggacgtggtgcaggctcccgacgagcggcagctgccacggccccggcggcagccgcagcttcttcttctccttctccggcggaggccaccaggagcggcatgagttcttgatgttgacgaggacgaagagcaggaggaaggcgaggacgacgccgatcagcaatggcagtgatacctccatcttgcaatttctcactatggctgtcgctgtcgctgctgctcctccgtctcaagaaggactccttcgccgtgttgtgaaattttcagcagaggtgacgaattacgaagtggactcgctcttggcttctttgaagcgattgctacccaatcttagtttttgggtgtcgtcttcctccaggagaacgggagaagtgtgggggtttcttgttcgcagaatcgcagcgtggaaatttactcgtatttgtgggcgcgtgctctgctctagcgaacgtgacggtgactagtatttgtttgttcatgttttcgctttcactgcttcaaacaattatgagggttccaaggtaacgtgtggtttgtagcatcccgaattccattcccttattgtttagctctagctagcatggtgcactatcgtatatatatattttttctcacgtagcattatgtatttttttatgttttattataattaaaatatattaaaatcctaacataattttaaattctatactaacctgacaaaactaatcaatgcgtaatattcatattgtattatggtagaaaaaaatgctcgtgcattgcaacaggtgaagacgtttttttagtggtacaatagctattaagagctgaacaataaattgaaacattgaaacattaggattgttacatatacattataattgaaaaaaattaatggccattcattcttggttttgggccgaaagcccattccttcctttttagcccgaggctagtccactatctccctccgcttggccatcctctctctttgtccgagcaaccgagcctatagtggagccgcctgtccagcttgcacagcaactgtcgtcttcaacctccgaaagacagtcctgagcctctatgccagagtcgatcatctccatcaaatccagccgaatccttctcaatctcccaaaattggtttagggcttttgatccactcaatctcgtcttccccctttttccccccaaaaacgaagcgaaactcgggataaaaacagctatgaaagctcgttggccagccatcatcggcaactaaaattaaatccggcaaattaaagacgagttgaaatgggaaatcatgaggaaaatgatgatgatgattggggaatcgatttttgcaatcaattggaagaaaaaaaaacaatccacaaaattgtttttgtgggcgagaacgcaccacaaccatcgttcttgtgggatggtgacaccgccacaactcattcttgtagttttgacactcaagtaacttgagatgcaagaggaagaaggaaatgctcaaatttgagacaagatcatgaaagaaactataggaggaggagaaacactcaagagcaaactactgcaacttggttcggggcaatgagagctagcaatggtcatggggtagcttttataggggagagccacccctggttcggccgagccagggggttggccgaccccaagtgggcacctatgctgccctctattcaaggtaagaataatgacacccttgttgaaggaaaacatggcgccctgggaaatatgcttcactctagtgcaggtccaaggcttgtgttgagtgtcaagagcgtaccagctggtttgatcctgcaaccagcaagaaagataataaaccgtaattagatgaatgatagccgatcgaccgatagagccgatgacgtatagtcgggaccagccgatacgggcaaaccaaatcggttgtggctttatgatagacaaataaagcaaaaccctaaatatgccatatcggctgtaatactatctcttttgtttttgtcgattgccttaagacaatattataaaaatagccaatagatcaatatttagaacaaagatagataatgtactagctaataatccaatacaaacttatataataaatcaatctatataaacatgtcaaatagcaatcgatcaccaaatatagagtttactcgagatcaatctaacttgatatatttatatagagcaatctatctatataaatggcaaacatacataaaacagatcatgaaacatgcattatcatgcatattaggtaaaatcggctgaaaccccgatactatccttagttatgattaattctaggttagtttttagggctctagacaatactagggttgatgcaactcaaagtaaataaagaaaccacaagtctaaacaatcaagaaattaaccacttttcacgatggtagataccttagctaatctaatctagtaaagcgatttagccgataccggcataaaccctaaagcgagaatcaactgatatgactaaattgagatactaaaactaaattaattaagataatgtgataacaatggtcacgataaaaggactaatacatataaagcaacataatagccctgatagtgcaagccatcgagacaagttacctcttgtcgagagatcgtagtcgatgccctgacttgaagcaaagaactcatcgaaaagcaaaaagaaaagggtggtgatgcaccaaaagttgtattgattggattgttgtctcctattacaacgatatgggctttatatttataccctcagtgcaaaacttgtccattctggacatgattcaaactttcctaaagataaaatacaaacaagtccacatggcggactcttaccatatctctaattcaatccgacattaatatcctagtgatgtccatcattcgaattcccatagatgatggtaaagattttcctcgtcgagacaagaaaaaggattttcctgaaccatgcttattaattcgggacgaatctcaaagccagttgtaaaaattggctccgatgaaggaggtgctcgtaagattcaccccgcggagcagataattgaaaattgatgatggctccattggtcgagaaggttttacaggaattcttctctcggatagcaggggttaaggtagaagaaaaaaaataaaaaaggatatgaggatgaacaaggctcagagataaatagcaaccgttccccggcaacggcgccagaattgcttgttggtatttcttaaccttacagataaaattcgcaagcgcacggagacccttggctaccgattccaagagtgtagcatcattgcgccgagtatcatgctcctcctgtggttgcatcgtagaacaaaagtggagccaataggaagacatgaagataatctacatagggtcagataattgtttaccattaaaaatattatcattacgacaacgccaaattaaccaacacatacaatactagttccaaatagaatcatctttttaatggacgtagatacccctctaagctaattaccaaaaatatttttggtgttacggggtggaggaatgttaaaagcaaaaaaacacacatctccaaacaaattgagcaacatgacactcaaagaaaagatgttggattgtcttttatgcatagcagaaagaatagtgcttgtccccctccctaaacaaattttcttttagtcaggttatctttcgatagaattattttcttgtgaaaaaaccacataaagaccttgatctttagtggaaccttgaagtcccatagaattctcttttggatccgaacattagagttcatgatcgtggtatacatagagttgactgaaaattggccattcttatgtagcgaccatacaaaacagtccttttcatttgacagagttatattagaaagcctggggatcaaatcgtttcactcgattagattttaaccaacaatggctctcctaaaagaaatatcctgcgacattgtgcccataacctctgccacggtagactgcttctttcgagctacattatataaagtagggtattgaacttcgagagcacgcgattccaaccacgtgtcttcccaaagtcttatatctgtcccattgcattatctaaaagacccaaatctaagaaattggtctttaactttcattaaaccggcccagaactaagaaatacctatcttgctggacataccagagaatgatttaccatttaagtctttattttgcaaaaggtcttgccatacgccttcaccattaagcaactagaaaatccaattgcttaataagtagctaattttgatatcaatgttatggacacatagtccaccttgatgttttggtcgacatatgttttcccacttagttagtctatatttttcttttccggtcatcattactccaaaagaaagtgacataaagaaatataatctttaaaacacacctagtggaatttcaaagaaagataacataaacagagaaaggctcgaaataactgagtttagaaggaccaatctcccaccgtatgatatgtttttgccctttcatgtgctgagttttctctcaaatctatctttaactcctttccaatcaacattccggagttttcgataatgaataggaaaaccaagatatttaaaggggaaagatctagaattacaacaaaatagttgtctatattgatcctccacttccttggcctccccaaagcaaaaaatctcacttttatgaaagtttattttcagctctaagagttgttcgaacacatacgggatgaccttcatgttttttggcctgttcaaggtcatgatctagaaaaaatattgtatcattggcatattgtagaatggacaaaccatcctccactaaatgtggaatgagtcctcgaatttgaccgtcgactttagctctctcaatgagaaccgctaacatatcaaccacaatatttaaaagtataggtgacattggatcccttgtcgcagggctatgtgcgtttcaaatttattacccaaatcatcattgacttttatacggacacttccctcttcaaccattctagaaatccagtgacaccactgctgagaaaatcccttcatgcgtagtgttattttcagaaaatttgaattgtagtgaagtcattttggaccattttagcatgaagctgcctaaccatctttgaaacacgcaacacaagtttcttgctcctgttctggttttgggccacatgatcagggtttccattggctaataacaacaggggaaaaaacaaatccattcagtcaggcatatacatgacaaagcacaagtcacacatcgataaaaaaaatccaatcaagaaaatcgaaaatcccaaggaaaggagaaaaaggaacagaaaacgtgaaggagatacatccatctatgtgtctctcttctcatcccgttctcgagatcaaaggcatggaaaaaagagacagtcaactcgtctagatcaaaggcattgaaaaagaaacaatcaactcgcctagatcaaaggcatggaaaaaagacagacaacttgctatatggagccatcctcatccaagaggggcacacagaatcacggtgatgctatataactggcttcattgcctcttgggttggacctgttgatggaggctgcaaattaaactcccgatgagtggtgcatagtcttgggcatgattactagcgtgagagtaggagaaggcgtgagcgatggccggcgtgggaggacacggcactgatgcactgtcgagggaaagagacagagaggcgcgttggattaattctcgatgtaaggtgagggggtttgtagatgagaccaacttgtatatgcctaaatttgaggacatgggattaagtcagtcgagctgagctaggctctccggttctctaaagttaaagttcaagcgcaactcaattatactaggcattttacactttttttttctgaaacagtagggcgaccaccctttccatttcttgtttttttaaggaaaacaacggcagaaggactgccggaatatattaggagaaataaaatttatgttcaggcaaacataaaaagggcaaacaaaattatttacaagagaaacatcaagggggttcgaaggccgtatggcacagatcgagatcctgttgaattagggaagtcactttgtcggtcgtcgtgcatatattttgaaaaatatgttgattccactccaaccaaatgttcaaccagaaggtgattaggcaccctagagttcttttttgctggggttttggtcgaatggctgagagcaaattccaccaactttttaaatctaaggtgttaggcaaagtattttgacctaaacccttccaaacacaaatcttgttccacacgtcgatgaagattttgcgcggtttagagttttttggtatagaatgagccagccaagaaagcgatgttttggcttagtaggagctgaccagattttcgtaaaatcggtggtggcgaatatgccctgaaattgcatgctttttgaggtgtaaattccgttagatgagaacttccaaaggatatcatctggcaaacttgaaaagaggtgcatgttctgaatgagggctcctagagaaataaatgcatggatctcctcaattgtagtaatctaccgaaaggagaagatccaattattgttagtcagctcgtgatgcactgtatttctttttcgttttactaagctgaaaagccttggagtaaggtgttttgggcattggtttgagagccagttgtcatcccaaaacaacgcttttttttccatctcctagcacgatctctgtagcaacttggaaaagactcttgtcaacattgtcacaaggcaactctgagcccaaccaaggcttgttttcctccttccaactgaaccaagaaaagcgaagacgaatggctctagagaacttgttgaggtctacacttccgaggcctcctaaatttttcggcatgcaaactgtgctccaattaactaggctgtttcctgcgctgatattctcggggtcgtctcttttccaaaggaatgctctacaaaaacgatcaatgtgtttaataaccaacttaggtgtttgggttcctatcatatgatatattggaaggacggtgagaactgatttaacaagagtttcacggttttctgaagtgaaaaactttcctttccaacctggtaagcgtgcaccaaatttgtcaatcaagggaatgaagtccactttcctcagtttgcacgtatgcagcgtcaaacctaaataggggcaggggaaagtttttattgaccccaggagaacttgcgttatatcttgaacatccaccccctcacaagctattgggaatatttcagtctttttaatgttggtgtgcagaccgtatgctctggcaaatgaaattaaaatctggcacaacatgtcgagatcttgttttgttggcttgacaaaaatagcaacatcatcatcataaagagaacagcgaaaacggctcattttgtttgacaccggtatgagaatagacaattcttcagctttacgaatcattctttgcagcggttccatgacaagaataaataggagaggtgaaaggtaatcaccttgtcttaaacctctgcaatgctttatttcctctcctggtgaaccattgaggagaatctttgaagaggaggcaagcaaatttgagacccaattgtgccatcttgtttcgaagccaaaacgttgtaggacttccagcaggaaagaccagcttaccaggttcatttctattaacagaaatggcagactaccaggttcattattacagctgaaattgaaagacaatgcaagaaaactataatgacatctatgtgataccatctcatcacacaaagatatatagccgctgaaattaacgtaagttcaggaattcatcccgctagaactactaagatctagcaacctagcactctcatcaagcagttcaggattatcacagtccagaacacaatagaaatgcgccatcctgcctcaaaaaaccatctcagcaaccatatttctcttgctttcctagaaatctcctctttcactgcaactttctgatgccccatctccagctgtattttcctatttggtgatgtagatttcattgctactcgcttagcagcggttctccccttgtctgcgacttcttcagaagtgaccaggacgaaatccatggcaaatagcgaacgtaattcaactggtaggttctttgtggtggaatcagcccacctgcgttcaaattctagatttaatatgggttctcatatttacggctatttattctttcagtggtggacgacgtactccttgacagcgaggcgcccgtggtgacttcatcatataataaacaggggcaaaagagtagttttaactttaattaaataaaattggcaatttatatatattagctttctcttatgtgacatttctggatgacgtactcctcgaccgcgagatgtccatggtaacttcatcatataataaacaggggcaaaagagtaattttaactttaattaaaaaaattggcaatttatatatagtagctttcccttttgtgacatttctggacgacgtactcctcgaccgcgaggcgctcgtggtgacttcatcatataaaaataggggcaaaagagtaattttaactttaattagataaaattgccaatttatatatattagctttctctcatgtggcatttctgtaatgaaatttggaagagtggtatctcaagagtgccactatgtaagagtggtagttaataacccccctcccacccaagaatagctgcaagacgcataacaccagttattttctctctttgctaaactatttatttcggcgataggcaaaagcttttcacataaatattttcgaagaatagcatacaaccgtgacataccgaggcggtcattggcaggttaggaggagcgcatagcccattgaacataagctactctaaaccaagcgaagctcctaatataagctaagacagagagaaagaagcg

SEQ ID NO: 18116 - DNA, 8430 bp, Oryza sativa
tccctccgttttctaaatatttgacaccgttaactttttaaatacgtttgaccgttcgttttattaaaaaaaattaaaatttaagtaattattaattcttttcctatcattgattcattgttaaatatacttatatgtatacatatagtttaacatatttcataaaagtttctgaataagatgaacggtcaaacatgtgctaaaaagtcaacggtgtcaaatatttaaaaacggagtgagtatttagttggcatgccacttcttatatttagttggcatatgccgctttgccaaagaaactccgcacattggaaggaatggcagcaaccagacctcaaatgtactatggtgaattctttctattttcccaaacttaaaagtgctatttataaacactccagataaaatgagccgtatgacatttcaggaataaatgctcaattctttcatcttctgagcaaaacaaacaacttttctctttacctttccatcctctcttttatcaagttatctctaagttaggatgcaataatttccatcctctccttaagtagtagcggcatgaacactttgattttaacaggaattttgaacttccaaaacttttttaaaaggaaaccgtaagttatgaatttgtaaatatctataaaaggagcttacagaggagcccaccatcacagaacaatgagttgtaggttttgaacttccatgttttcattaagatcaccaaattctgtccctttcactagtcagaacaacgttctgggacctactattcagtaatttccattggattagtttgtcaccagagatgcttcttctgaacttaagcactccaaaatcagtattagaaccttaacaaccatcacatttcttgtgtgatatgttaaataaggaagggagttgatcacctagggattgactacgcacccagatatcttcccagaatagagttcgttgaccatttccaggcttccttgtgcaatttttttttgtgaacccaaataaggaaactagctttgaatcttctttgactaagatttttattgttcaaatatatgttccccaagttaccattctctttattctcaccatagccatttaccttacaaggctttgttcatgatttctaaatcaagtatccccaagtcaccacgaacttttggtctgcatacaacagaccatctcaccatatatatgatatttcctggcttccaagtcttcctgccacaagtcctaaagtactccatttctttttaacctcttgaggcatgaaataaaatggcatcatataaatatgtattgaagcaaaaaaaaaatgtatgctgctgagagcctgagactagagttaacaagggtcaatctccccacaactacgcagcattccttgccaacataggcttagcgtctatgtttctgcagcttaatttccaatacttattacaagtcctttatttcatcaataggaatccccaggaagacctgtccctgagcacgtacgagctatgccaccgtacaaggctcaaaaaattatgtgtgtttcaatttaaaacaatacgttccgatatatatataaaatctctcgattcctttgtttccttcaaatttcactttttatgttccattgaatcagcgagaatgagttgttttcttctcaactccacgaagtgttcgatggcaatcataactacatccaagaagtgtatttcatgacaacgatgtgaacgcacgttctagtcattgaggattcatttttctatttagtaagaaaaaaatgaattgttgcaattattctttttctgcttagctggaacgccactacatatgtacgtgggtgggcttgttttcattggttgaaaacaattcttgcttgtttgatagcagggcatagttaaagaaaggagtaccggacttatgctacctttcgtaacatggttggaaggcagttgagatatagaataaagcagagtgacaatagagacccaccccatgtattataaacaatacgcatatcccttatctattatgcaattagctagtatatttttaaagataaggactcgtttatttcgcacgagactcccaaattgttaaggtaagccgtgtccccggatatttcatagtaaagtaaccaatcttacaagttagtatcttgctatacactagttctttaattttttctttgcagccacaacaagttagtatctggctatacactagttcttttttcttggcaaccccagatagtacaagtcacttttatgaaagttgtttttcagccctaacttctgctaaaaaaattaaaataatatattgaggtttttaactacataaaaagtcattttagagtagaaaaataattaatgtaatctgcatgttagaggattggtatgctttgttttaagaatcctggtccgaactgcactaaattagtgtatttggaccaagctgcaccgattgattcgttttttatctgctgaaaactgagaatttctacccgaagagcagtaatacgagtaactgggaagaaggcaagacagaatctgtctcgcaacttttcccaactaccgtttatacatccaacggtagaggtgtaccattgcttcgctctctcttgaagagagaatggaaacaatctccaccgtacagtctcctgtctcatgccacgaatcttaaggcatgagcagatttgctcaaagtctcacatatgatggtaggtattttctagatcaaagccagaaaaaggattttccttaaccatgctgattagttcagggcaaattttatagccagttgtataaatgggctccgatgaaggaggtggctcatagaattcgcccctaggagcagatagctcaaaaagaggttgctccatagtcgagaagaatttaacaggaatacttctctggttagcaggggtaaaggaagaataaaaaaatgaaaaagagatacgaggatgatctgggttcggaaatgatcagcaactgttccccggcaacagcgctagaaatgcttgttggtattccttacgatcacagatgaaatccacaagcgcacggatataccgatgtagcacttcctctacggagtattccaagggtatcgaatccaagggaacgtgtgtggtcaggtcttcttccggttcatccaaggacactaagcagatgataggccaggatagagaggatttactagcgagaaacagtgtctatggaaagcttaactttaatcctaacgcaatacttcaggcactggcaacccgctgttcccagatatcgctctactacgcacccggacagggaggacttaagtgctcttgaggactatcaccacctctacacctacctcaaacatactgtgggatacacagcaatcactagagattaattaccaagacaccgcgtctacgcaattaataactactctagtgccgatcaagcactaaagcaatcactataaataaatggactatagtgaacaatgatcccgtatgctatttaggaactaaccaagagataattctcacgagataaatctaaattactcaggaagaatattatattgaattcagagtaataaacagaataaaataaatgaaagaagattaccgacaacttcagaattcttccgacttcttctactctactctcttcctattctaatatacaatatagtacaatagagcctcttataattcagctcaagcttggaagtgtgtgttgaagtgaggtctttatatagaggtagatatgatggttagcgaagcggaaatgtccgaactgccccgcaaccgccatcagggagtgatctggagcgtccaagccaaaacctaggatcaacggtgatcaccagggttcggccgaacctgggctgggcccccctggcctgacctttggcctggctcctcttctggtacttctctatccattccttagtattttgggctgattctatggtattttgatgaagttcacaacccatccttgtatggatatatatttctcctcactttagtctagatttcctcccaacctcagggtttatcaccagcatacaaatatacaccaacacttgtggaatatgtgagattaagcacctatcactatgtttggatattttattatctgaactttatgcagatgttggcggtatagaattggcatttaacaaccgccaacactcatagggtctaacaaatttcttactatccttaacccggctttcctgagccagagctttttgcaagagttgactaacatcaagaaattgttggctttctaatctttctttaataggagcaattaaaccattaaaagcaagatcagccaaatctctatcaattatattcaagctataacatcggtttctaatatccctaaatctcttaatataatcaatgatagattcattgtacttttgcctaaccgatgtcaaatcacttagcctaagttcagtttcaccagtatagaaataatcatgaaatctttgctctaattgaggccaagtatgaatagaatttgtcggtagagaagtaaaccatgtaaaagcagtaccagacaaagataaagaaaacaagcgcaatttaaaagtatcaaaactactagcctcaccacattgctctaagaacggacccacatgctcccatgtgatcctactatcctcaccactaaatttggtaaatccgagaactctataaccacgatgatatgggatattgtcatagtaatcaggatacggcttttgataaaccttagcacgatttcctagcttcaatcccgaacttatccctaataataccactaatcaattcctccatattctcaggcctatgttgatttggtggtgggtttggtggcctaagaggtggttgttgcggcgcaataaaattatattggccatacctagtatcgggatgatatcccctagtagtatcattgtaaacattagggacatgtgggagagcttggggattaacagtagatacaaggggatcatgtgctcgaacatggtataaaagcccgttatttgtcattggatctaccgccctgtattgggataattgcaccggtctgaccggtccagggcccggtctgaccggcatccaaaggcgcagtcagaccggtttggggtccggtctgaccgccgggagaaaacccggtctgaccggccatctggctggtctgaccggcggaaaacttgcggtctgaccggccatctggcccggtcgaaccagctgagtgcgcagcccatccctcaccggttgtttgcatattcgctccatcggttttgctatatatttgatctataggaggtttgctagcactggtagaggctttatctttagattagaaatcggctaaaaaagaaccgagcttattcctcaagaaatcatcaaaacgagattcaaaagatgcatctatcttactatttaaagcagcaatggatgaatctattgtacttgctacatgttgttggatagggattgatacctcttcggtacttaccacatcaaaaataggtttaggcaacggtccaggcttgagaaccacaccttgacgggtcctagtgcatgttctcatcagtgcctcatgcgtgatcgccttaatctactcctccatggccttgcgtgcttccccatcaagattctccaatgagattggcatgatattggatggttccacctccgacttggttgatggcggctttgtcatggcggcatcgaagttgagatggtgttgagcagatttccccagtggagtcgccaaaaatcgtgttggcgactttttgtgacaagttgacaagcacgatcacagcacctaaagctttgcggtgatcctagagtcgccaaccacctcaatctagcaaaagctaaatcaagatgggttttgataagctaaaccggctagcggagccgatctaaatagaacgatagataactatccgtctcgtgggcaaaacggaaggttttcaggacaaacctacaaagaggtgttgcactctcacagtggcggcggacgatttacggcgcaaatcgacaaagatagacaaactaaactagaactagaagcaaaagtaaaagaacgatacgattgattgatagttgattgattttacaatgaaccggccttaccccttatatagggattggtcttgccctctacaggccctcctccacgtccaactcgggatataatccaaaggaaacctgaaacatgacttcctgagcaaggaaacctcgagacccgacgaaacagactcgggtttggactctgccagtcagaccggccacacaccaccggtctgaccggccctgcatcggcggtctgaccagcctatacacggcggtcagaccggcccaatcagagaaaaaccggcagatttccaaactttggtaatttttcctattttatccctaggtgccaaatttgggtgtaaacaatatctataagttggaataaccttgaaagccattaaggaaaggtcaaattccacttggcactccacgatataagacgctccattagaaacctcgtgtagctatgattgcaatttgtactgcaattcagcaaatgcatatgtaaatgatgctggactgtactgttttatgatattgcctctgtgtgattaatgtatgtatctactggcccattaaggattgctgatcatacatatccaccatttgaacagatatcattgcataatcttctttatgtgagtctttcacccaacctgaaaaacacaacatgtaatatttgtgatttgttgtaatttgtgaagttatatcgtgtcagctttgtgcacactctctaagtttgtttttttttgttgtctttgtatttgtatttgtctttgttagatttttatattttcatttgctccaagacagttattgacatgatacatcagtgggcattgttagatcaagaggtatctatttcttctctacagattatatgtaaagtgtcatggacatcatgcaaacttggtaatgagtactaactgaatagacaagcatattcacactgttgtgctgctactgccgctttcatggctcaactttctgctttttgtttttgctgctacttcatattgtgcaaagtgcaaaggcaggaattgtttcaattcttatgttcagatatacctgatcattgtgcaaactactattttgttctatgtttttgcggtgagcatttgtaagcatcttgtattttgtcttatttgtctttgactttgtctttgtccctgcattttttaagtcaataggttggtcttggcactgggttggttttgtctttgtctttgtcaacttttataaaatttagctacatatttctattgtttttctctgcaggagttcagagcaagaggagcctagggggccatggccgatgatgcctatctggagacccaagcaattccaaatgtgccaaagtgagcaattcctatgtgctacttcacattgtgcaaactacaaaggcaagactgttgttcaaactatttttgttcaaatgtttctgttcagactgtatctttcagttttccgatatgcctgaccatttctagtagaatctagagttctacacactttcggttctgctgtaattagcgttcaacaaattgactcaagattgtctttgtctttgtctttgtccctattaagctactaaaaatctgaaactaacatgacctatagaaataacaatctaactcatgtgacactctgctctccagacaactaatggaattatatagtttgcaattttcagttgttttcattgagaaactgaacatctcagaggctctaagaactagtttgtgtcttgatctatgttctgatctagtgatgggtcttgaataatgagaggattggaacaacaaatacacattagcccccaatgcatctacagaagtgtttttatcccagtaacaaacagccgatggtcagactactgtatggagtctttttgagtatgtatttgatgtatgcatactatatgtaagtttcatcaacttaattagttgttaaaagctggcatggattcaagttcttctttgctttattatggttgtgcacttttttgatttcccaggggaggtctcttcaaagtggcaaccgcagcaaatttcttgaaccaacaagcaaggaatcagggaggtggatctttgtgttttgctcatcacgtgaaatcaaaaaaaatttgttgaagcagcacacgcaagaaaccaaagagaagcaccaaaaagttgaattcaaagaaaactaaatgggatttttcgtcatagtgatttgtgttcatcttcggctcatctccctgaatctcctcatcgtccatctatttgattctctcctcttcttttctctttgatctggattttgatctggtttgttctcctttctcctttattcttggttactaagcccttttctat

SEQ ID NO: 18117 - DNA, 10392 bp, Oryza sativa
tgctgcacgtgatttcttcgtatttgggctttttaatcccatcatgggctgcgggctgtgggctgtgggccatgtgaactagtgggcttttttgtttgtatttttttgcacaaattgtgacgggctttttgtttcttcaaagaaaagaggatgtgggctgtggcctaacaaaaaaacagaaatggactgtggcctaaaaaaaaattagtaaacagagtcacgctactttttttctgcgcgcatcaattgtctgtgcgcggatcgcacggccagcggaaaaaaaaggctgacaaaccaaaaaatttcagccccatgttacatacacaatccctattatactagaaaaaaaatacacgtacgttacaacggataaaatatttttagatcgttatatatgttactctttcattttataccaaaagcttattccttccttcattttcagtcctagcttagcccgctaccttcctttgtcgaccgccgtactcaacctccggaagaccgtaattgaaagtgaaaaccatgaggaaaattaggaagaaacacatgccggagaaaaggtgatgaaaaaaaagtaaagtacaaacagcggagggagataaaccgaaaaaaaaacgaagaaaaaatcagacagaaaaaaaaagccaaaaataaaaaggaaaaaagggtgaaaaaaacagagggaaacaatcggaaaaaagggaaaagagaaagcggacagaaagaaagaaaaagaaaaaggaaaaaacgaacgggaaaaaagaaaaaggaaaaagcaacggaaaataaaaaagacggaggaatttttagcggaagccttacgcattttttaattgagtagatagatatagatataggtacacgtatagttttttatgagtaaatttcataaaactccatctattacggttaaatcacagggattgtgacacatgacacataactctacatattatggttctaagggcccctttgaaacaatggataggaaaaacacaggaataggaaaaatgtaggaattgaagttgtatgtttttccagtcctataggaattgaaaacacaggaaataaagagaagagccctttgattatagggtaaattggaaccatgccattataattttgtaaagtttgagatatgccatcggtatctcagtgacatgtaggacacacatgagtcaatgacatgtgggtcaggatgacatatcttaaattttgcaaaattataatggcatggttccaattttctcttgattataccacaggatacactcaacaaaggaaagcttcacaagaggtctaacctcttgcttattttcctatggaattgatcataggaatgcaatcctatggaagttttcctatctcttcctatgaatcaaatagctctataggaaaaaatccttaggaaaatgaatcctccaaaattcctttgctaatcctccatttcaaaggggccctaaatttggaccataattagtggggttatgtactctaatggtggtctatcagtttaaataaaaatcagtgattgagtttttttttcttttcaattgaaatttcaaggattttatctaataatttattagagtaccatgtgaacgtttataagagtaccttgtgaaggcttaggggcgtttgtacaatctttactgggcttttagtatataatagatagataattgatttccatttgatttgcttgtcaacatggatgcttcttctgaacttaagcactccaaagttacttagaaccgtagcaagaactttgtcatgtattccctccttttcaaaaatataacatctacaatgcattctgctactataattctaaacaccctaatacagtatgacttgataaactttagttatataaaggaaaaagtacgaattacccccaaactatcgcggttgactaaattatccccttgaacccgaaaaccagacaatgctcaccctgaactttcaaaactagacgaattatccccctcgactcaatccagaacggttttgtcctatgtggcatacatatggcaatccagtcagcattctctttaaaaacaaaacaaatggtgggacctgttgtaaaccaacgcgcctattagcggatcaccggatccgttccttgtccctcccacagcagtagagacgtgagatgatgtagaacacccgcgcccatcccgttgccctcaagaacattgcagaagtagacaatgaacacaaatatagggtggagctctctcttcattatagatctcatctgtagtacaagccagccattagccattagatgtcacaccctgcccctgtatatataggggtcttaggaggagatagatcttatctctactccggtttggattggcccacaagaaacttatctccaagagatttatttcacaacactcccccttgggctaatccgcgactaactcatgcctcgtcaaaactcctaccaaaacccagtgggaaaaaggctaggagaaagagtgcatagttatcgctcatgcattgcacattgttgcctcgttaaaaactttatgtgaggaacaacagctccactcactcaagggaaaaagagtacaacactaaggactacacagtccatattgtgggtcatgttcttgggtgctctccccctgaacctagcaaacatcaaagtcttctcatcccaattctccggaaaagcttccgagaactaacagttgggagagactaggtgatcaatcctctagattatcactaaacttgaattgctactcacctcacctcacctcaggagtctgtgaggtagcccacttgtatttggtgtcggtcaataaagacagatcttattatgataggaccttaggaacaggtctaagtgatcgtcatcgagtcaatgccctgggcatactctaagacatttcaatgtcttgcaaatgacaatcaacacatagcacatactccccctgatgacaacctttgtcacagaccatgttcccatagcattaaacatctctcagatgtatgcgtaggcaagaatccttcagatcctcaaaccattagtcttaaaagacttgtctcatttcaccgctaaaacgagaatagggaacacagagagtaatgcattccatcactatcatataccataataccatactgctgtgcaacgcaatctgtttcatccttcagaaggattatggggataaataagtcgcaacggcacgcacctcctcgacgtgactccatcaagaactagatcttgatcattgcaactttctcagacgatgtcaacaacaatgggggatccacaagatcaaccacaagccttccaaagacatgttgtaacgatcagagtaactagctagtctgaaaatttaagcactgtgggggataacacacggccaacaacaccaagtataccttaataggtattagaggacaccaccgttcctaccatcgggtagaacagatatcacgagtgtacatactccagtgataatcgcgagatgcacatgtgcctacagacctcgtctgtgatctcatcaggttcctcattgcaatcttaccgggtcataaatgggccatcattcctccaagggattatacaatatggtgtgttcaaacttactaattattttgtatctcagaggaaaattcatcaatgaggtctccccctcagagaaaattccgtcaatgagattttctcccaacgggagatggtactcttaccggaatacctattggtacgagatttgcatgctgcaacttcactaccgagtctattcaagacctcacggatttcctaaatccgttaactgcatatttaatttcatgctattttgccaatacctttatttagcggaacattcagctcatgtgggagaggtcacgtcaaggacctacttgaaccatcgcacatcaccacctcattatctcaataatgacccataagaatccgaacaacgttcgcgattttcaattggcgattcaattccgcctcaattgcatttccatttgacccgatttgagcaccgcatgctcatgccatggacttgttccggatccgggttctctctaagagaatcattagcaagaggcaacatagtgtcgacacatttattcccacttacacatttaagcagatcttcgttatttcccaaaacgatcgatcaatggttgttccgtattcctagcaccatatatgcgcgcattgctaggaatgtcgtctccacgacgaacatcattatgaggtatatcaccttccaaaggtgaattctccaccaggagaatcagaggagtatgctcacatccagtgagaactcttatgctctgactaaggcctacgaatcgtgttagcaggcgtccccgcacaacatgatcaaatgccataagtcttatgtggatacgatattattcccgggtctatccacatttaccacaattgggagcattactctttttaacaaatatctagttgttcctcatatgattttgttggcaaaaactccgtgcaccaagcaaccaggagtatgaactaaacatgcaagttcagctcatttagtgcgttcactcaaagaaatctccaggcattccaaaatgggcgattctctccccttaatgccgagatatcttacaatagcatactaccaatccccatatcgtggcacaagattaaggcatttcacctcaaacacatgtgttctcccacgattgtatgctacggtggtgatatatttgggaaatattacgcactttaataggagagatttttccattatatgcagtgagcctggacatataccaatacagtggcatgaatactgtattcttccttctcccgaagggttatccttaacctcccagttaggatatacaggtttgcaaaaaccaccattgctatcaaatgtatatgcaaccaacatgcaaatactttagccaaatgcactctccatggattaatgctcacctagtgccattcaaactcacaatcgattccgggtcgacgtgcattagacatcgcatgtcatatgcttaagaaggcaacctatgatggcataacgcattccgatgcgctcaacaaggagtatgatagaaaaatgcgcggccactagcctgcgctgccaagcagatttttgtggtgcagagttgttttaaagtccatctcgtttaatgcccaagtttgaccccaattactcataccaaactctagaattgggtcatagttaagcagcatgtattaggtacgatccacgagcgaattatcaaaccacatttgctaatgtcccctggacatagccatcgagagataatccatacctccgacaatggtaatattcacaataaaaccattatattcagacatatccacaaaaatagtggaatgtgtcggtgcaaccgtcattggcataacgagctcaatgcatgcaacatgacgaacctttgcacggcttgcacacgtccacacgcgaaaaacgccagtgtgtgacaagcatggtcattaacccatggatgaccaaccaacacaaccagggaatagtcatcgactacgagagtgcgataaaacgcaatagtgcatagccaacatttgtctgaaatacagttacgtcgaactgtgtgagtggttgtaactcctcagattatacactaattgttcttctaaactaaagcattttatcaattccagcatgaagataagctttagaatagaacaggaaagaccaagaacgttatttatctgagaaatatcaatctaatgcaaagttccaaactaagcaaaagataaactgcttggcaacagtatagtcgaccaatgtcctcctaggacatgctctaaactagccatataactcccattgtcaaaacaactttattagacaaacactaccaacaattggtcaacaaccataggtggccatttagctagatccacacgaggaccgagactgagtcaacacccaagtcaagctgttggcgctatagtgaagtgggaatcatgcctattcacagcatctacccttgggcttattcctctagatttgcctcctcttttctggtgtccttgcaagacatcaggttccaaataatattgagaagatatgtgcacaccaagggcaaccatacgaacaatgtcattccaccacatggaaaacactttacatctttcaccgggccaggtgaaaaatatctcaaattattgaacctcgcaactccacgttgccaaaaaattgaggtataatcatttatctccaaatcagaaaagcgtgctctcaaccattgggaaagcaaaaaaaatgtcaaccgtagtccgaccatactctgattgagatgttaagccactagggaaaaaggcacaatgaatcccaaacacattgtctaattccatacatttcaatgacttagaatcccattcttgagtgtgatcatagggatagagtgatctacattaatgcccaaagccatataatagtcattgaaggcctttacgtgaaatcacccgcactatctatccgaatcgtttcatgcggttctcagagaacgcaacatgcaaacggacgatatgtgcaatgaattcggcaaaagtatggatctcatacaacaagtatacatgactccatcttgtagacacatcgatatcaccatttatgtatagaggagtgtaccagtaaagagtggtcttatccatagccatggatatttaatttcccagaatttccatgcattaggtgattttctgttatttacttggtcttatttggcattatattcccaatatttatgccacacagaaaaccatcacacataaatgcaggaaaataaacccatcataatgcttccaaggggggattctacactatgtgaacacaatttatggaagcatcataacctagaaaaccatctctagattatttagttggaattgcatcaattttaaaagcaaagcaatgcttaaaaaacaccattacatagttatttacgagtccggagacccacacgcaaaaccaaactatacagggcctaagcaacgagacatagccacacaaagaaaattaatataattcttgttaattataaggttcaaactgtaaaattgcattaaacagtgaactatagcataaaaacccaacactccgggggcttaaacacaagttgtcaataaaccgaaattaatcgggccgaattaccgttcaggccacgatcttatttgggctagcaagcacagtgtagcccaaaatgcctaatgggccgaatttccaaaactctaggcccatgaggatttccaggtttattatttttattaatttgtttgggctgtctcgttactgttgggctttattcggtcgggcggaggcagaccagcccagccggttcgcctaagtgaccgagagaggtaaggggggaattagagtttctcctttcccattcattgtccgcaacggcgtccaccgcccggtgcaccggcccctcgggcacggcggcagcgttggaggccgtcgactgttgactttgaagggatttagggcggtgcacggcgaggaggtcatcgacgacccatccactaccctgattggcaggacggcggtgacgacatcactcccgtgtggcaatttggtgcggtggcggctcggtggcacacgacggagctccgcgtcgacccgcgcatcctcatgacggcggcgaggcgaactcaacgacggcaactgagaccctaacaatggcaaccaaattgcatctggccatatcgtctcggcggaggttaatccggtagtggacagccgacgacccatcatcctcccaccacggctcgacggcagcgtcgatgggaggtcaacggcggtggcgcctcgcttcggcattaactccagcggcaacggcgatatgggtttagggctttctccaagacggcggtttcctgcgatggcatcgacgcaaggccgacggcgtacccaacagcgacggcgaatgatggccaatatgtctctaagtccgactacacagactgagaatatgtcaccgcgttcccggcatggcatcatcagagaaagagagaaatagagagatgcgagggaggtgggcgagtcggccaattcggcccagccgaattaggcacttctccaatccagggtttcccatcaattttaatgatttctctcacacggttttcttcagttttcatcaaataaaatagatgcatatatatatagatcaaaagcaggaaattaatctactgctagatcaagagcaggatcaaggctactgcaaataaagcatctataatatgataaaaacgagaaaatataatctatctataaaaacatatagatttcatacctgaatagatacatggatgtatctatgaattagtaaattagtttaggaactaatcatactaattaccgtgattagtgtgcttgatgaggatggttgcacactttaatctccagggatctgtgcacgtggccatctggtcaggtgcatgcaacatatctctacaacttaaaagtttcgtagcggtggcggtgactccaaccttaacagacacgtgaaatatagaacgtgggatcgcctaatcgaacggctcagattgcctttctcttcctacgcatccagcgcacgcgtctccctcgaatctcgatcgctctctcctctcccctaccctcaaccccccgatccacgccgccgcaaccccctcaaccgcccgcatccccgatccgttctctccccctttcctccttccccaccgtcgctgccgtcctccccggcactcccatccctttctcctccatgccgcacccctccccatcgtcgcagccgccccgtcgcccctgctcgcctgcatccaccacaccgcctccctccccagtcgagacggtgtcgcctcctcgccccctccgcagctagattgacactgcgccattcaatccaccgcctcaagcaccatgcatcgtcgtcgttgcaggcgtcggcacgggcgcgggcactgccgatcccgagtcgagacgacgtcgtccgctgctgcttctccaccactgacggttgccctgcgtatatcctccctattatcgcggtccccatctgctcctgaatcctgatccacaaaaacagcggagcgccgtcggcctctctgcctccctgcgaccaccagtggcatctgccccgccgtcggctctccctcacccgcgactcgccgacatggtgctccacaaaccattcaggccgtcactggtctccggagcgcccgaggccgacgtgtctcgcactccctataatcttgctttgctgcagcagtaacaacatcataacatatcgtggttcatacaatggatcaggctggtaattcgattccaattcttgctcctgaacttttttattggtgattccctctaatgttcagcagattgggtttggtggtggcagtgcggcaccactgatttgtgttagacattggtccttatccaaccctctaatctcttgattatgctcacttacgatgacttcagctcaggtggttgcaagaaacactcctagactgctatttagttttacgttacagggatttggctacagatagttgcaagctgcaatgttctgatatttgttatgttttagagcaagatctgccttatatataatgatataattaggcttcgaatttcttgcttatgttctttaaaaattccaagtaaccttttcagttctttatgtcaggttaattgacagatcgagttgcacttacacatatcttgttttaggaaatgctccaatggcccttgaatccagcaaagtaagtatttttttatgcttgatctgtgactgatctcaaacagataaattgaaatgagtaacttgtacacagataaaaaagtgacatgggacttgattagagttacggtatttttatcttacgaggcgccagcattatttgagttttatgagtcaaatattcttccattttttcctgtcatttggttgtgtcatgtcattatttgagttttattgggtaaattgtgtcctgactggccctgagctggatgcagtgcttaattggtgcaaaaactgggcttaatgcagtcaatttccagtcatgtgtttgaaaccattgttttctgattactttaattaaataatccatgatcacaatataaaccatatgtgcaaatatccagtcatgtgtcatgtgcatgatcagatgactgctattggctataatgcagtgattctgaaattgctatttgccaaggcttcctatttttgctgaactgctgcagcagaatagtgccaccaaatgaaagtgaacacgtaagcatattgtttgggagaagatcacagttcggaatttcagattataaccaagataaagaatcactcaactttatgatcgacttgctattcatgtttattactccctca

SEQ ID NO: 18118 - DNA, 4783 bp, Oryza sativa
ccatcccttccacctcccagcgcgctgccgttcatgtcgtctgcctgcccgtccatgggcgccgccacccaccgcccctccccttccatctccatctcctccccttccccatcgacctctccctcccccatccctccacctccccgcacgtgaccgcgcacccgtccacgagcgccacaatgtgcccactgcctgttcccgtgccgactgcccgcccgtccccgcgtaccaccgtcggccaaccacccgtctccgtgccgccgtgcactccttgcaactaagagaaagagaaagagagaggaagaggggaagatgaggtatgacaggtgggtcccaacatttttttaaaaaaaaagaagtgctggttggattgccacacgcacaccacgtagggcaaaactattctagattgagccgagtgtggtaattcgtccagtattaaaagttcaaggttaaaatttggtcgaccgcgatagttctgcgagtaattcataatttttccttactagaaaaaaatacccgtgtgttgcaacaggtgaagactaatttaaacttattatttttatatggtttaattaagattaaattcacagtgggaattcgcttgtatatatatatatatatatatatatatatatatatatatatatatatatatatatatatatatatatatatatatatatatatatatatatatagaaaaccatgagctgcagttaagagcccgatcatctcaagttagcatgcgagtttttttaagagatttcttatacgactcctatatttccaaaagcgaacgaacttaaaaactgactcatataagaatatataaggatgacgatccaaagtaccggtaaaaacatctttaatttttataataaggatagatttaaatttagactaaaatattttcttatggaatgatgattcgcaggatcaggacaaaacgaggcatctcttctgttgtgctttcttggaaataaattccaatgattggccttgtgatgccatataattggattcgtcctttgtcatggtaaccgatatatagtactcccttcgtttccattctagcttattcattttgtgacgagtgggtaagcgttaattttggtagcaatggatgacaagacgagaagattgaaaaactatgcagaaattttgagagattgtcgattgataaaggaacacggcattggcatacatgaaggaacacggctcgttacaagatactttgttttgtttttttttttctaaaagatgtactacctttgtcttagacttagagtatagcaatctaaaattagacataactcaatccggtactacaaaactaaacaagtcacctgtccagatttataattctaggttaattctctattttagcttattatattctaggatgaagaaattagtatagttataaatccaagaaacatcctagcctccgccttcttaaaatatgtacatagctacattattacgagataggaacatttattcgacagaagaactaaatttcatggtaccattattacacggcttctatagattaattaatcaatacgtggatatatagggaactcgaggtattgcgtgcaaccaaagcttggacttccttcttaccgtgataccaaatacctctgtcatgtctagctcctcagatttgatgccgtcgggaagctcccaatcaaagtggtaaagaaggctagcaagagcaagctccatattagctaaacctagcgctataccaggacacatcctccgcccagctccaaacgggatgaactcaaagtccgcccctctaaaatcaactgtactattctcaaatctctctggcctaaatatctcgccatcgccccaatattcgccttccctgcctatcttccacacgttgacaaagaccttggtgccctttggcacatcatagcccatgacctggcacgtctcgcggcactccctggggatcaggagtggcgctggcgggtgtagccgtagggtctccttgatcaccagctgcaggtagctcagcttggcgacatcatcctcggttagcttgtcttgtcccttgaacgtctccctcacctctgattgcgccttccgcaagatccgcgggttcttcatcagctccgacatggtccagtctagcgtcgtcgacgacgtctcgctcccggccgagaagatgtcctgcagccatgagatcgaccagacacgcatcatatatcatgcatgatgcatgccgctgtcacgctaaaagattttctgtttgtacttgggatttattgcaattaagcaggtgttaattactggagtacggtgtgagatggcttacgaaaatgacggtgctgatgatctcggtggtgagtgcgaacttgaggccgccgctcctctgcagccggagaaggacgctgagcaggtcctcctcgtctcgctccggcggcggcgcgccgtcgcgatcgcggatgatgctctcggcgatgcggtagatgttcctctggcaacgcgccatgtcccgcgtggccgcgctgagccggcgcaccagccgtgaggacgggtacaggtcggccaagttgatcccgccggtgagccgcaccgccttgtcgagctcgtgcaggaactcgtcccggtggtcgcaccgcgcgccgaacgcggcgcgcaccacggagtcgttggtcatgcggcagatcctctcactgaggttgaagcaggcggcgccgccctcggcggaggcggcggagacggagcggaggagtcgccccacctcgtcctccctgacggggcggaaggagagcacgcggcggtggttgaagagctcgagcgcgcacaccttgcggagctcgcgccaccgctcggtgtagggcccgaagatgatgtccttgccgccgcagctgaggatgtcgatggtggcgctgaggtggcggccggcgaaggcggcgtcgtgcgccctcatgacctccgccgcggcctcggcggaggagacgaccagcgtgggcacggcgccgaggcggaggagcatgagggggccgtaggtcagggacagctcgcgcatggcccggtgcggcaggtcgccgtaccgtgacaggaggaggtggtgcaggctgccgatgagcggcagctgcgacggcccgggcggcagccgcagcgcactctccctgccggacggcgaggcatagcgggcgatgagctcgacgaggaagaagaaggatatcaaggccagaagcagcagtgtcgtcagctccattggtgctagtttgcaagtgagcgtgcagctgtactgacaaaagccagatcatattcatatgggtccctttatattggagcggtaggtggtcagtgatcattggatacaggatacttttacagtgacggagcttgagctaaatatgtgtgtggctagtgctaattgacacaggaatcactgatgttaaccaatatagcaaaatatctctcttgagctaaatatgtgtggggctagtactaaatttgcatatatcaaatactaatattttttaggttaattggattcataccattacaaatatgtcattttagataaatgccattactatggttgcgttcttctccctccttttccaactcacctctcttttttttccgcgcgcacatttttcaaacggctaaacgatgtatttttttaaaaaaaaattatatacgaaatttactttaaaaaaatatattaatctactccctctgttttttaatagataacgccgttgactttttctcatatgtttgaccattcgtcttattcaaaaaatttacgtaattataatttgtttttttatgagttgttttatcacttatagtactttaagtgtgatttatatattatacatttgcataaaatttttgaataagacgaatggtcaaacatgtaagaaaaagtcaacggcgtcatctattaaaaaacggaggtaatatttttttagaaaagagctaatacttaattacgtgcttatagagaaaggctattggcacatccatgtctcctaaaatcctgttgagagtacatccacatgggccgatattcgtgggcaccctatagtggatagaacgatgcacctataatttcaccatcatatgaccggtgcatctaattctattatttgaccatcatattagcggttcttctctaaattctaacactttcatcccgtagtgattcaagatactgtttgcttgcacgtattatatgacattaaccaaaaacagagtggtacaaaaagagtagatggatgcatagacgatagatgtatggctccgtgaaggccgtaaccaagtggcgtgaaaagaaaagttggatacacgtatctcctatcaccatacatatattttttaaggggaaactattttgatcccttaagaggatgtccccttgctatttacatcactactacaaaaacccttatagggactggccttataggtgccggttcatttataaccggcacctatgaaacttttcccacatccgcacattgaaaaatatacaaccgacacctttaaggattataggtgccggttcattagaaaaaccggcaccaatactatatgtaccggtttttaaaaagaaccgacacctataatatataataggtgccggttaattaaaaaaccggcacccataccaaaccgagccgaactgggcgagccgagccggcctcatctccggacttatctgcgcgtaggtccctgcttctcttccttatccgcgcatcttctcctccggccttatccacgcgcgagagagaagtctcga

SEQ ID NO: 18119 - DNA, 17153 bp, Oryza sativa
ccccttccagcacccgccgagtccccctctccatccgccctctctctctccggccggccgcttccctccccctccgtccccatctcctagccggcaagcagggacgcatggaccggcgcgcgacgaggaggagcacatccggtcccctctgcctctccctctccatcggcttcatcgaaggcggccagatctggagagggggaggtcggggtggtaggttggtggcagcgatgtccggcggcggcggtggccaagggaggtggcaagcggcctccccataggtgaccgggtgcagatccggtctccctcctcctctccctctccggtcggggcagcgacgtgcggcggcgacgtgcggcggcggccgtggccaagggaaatggcggtggcaacggaccccggctgtgattggcagcagcgcattgacgacgacggagtgagttcgtgcatttgcttctgttgttgatctgtgatttgtgattgattggattgttgttcactcgggacttgtgattgttgttgttgatcagtgatggattttgttgttgttgttgttgttgaccggattgaattgcatatgtgattgttgttgttaaccggggaattgcatctgtgatttgtgatggaatgcatctgcttgaatggtgtggctcaaaagcatcggctcagctcggcttggagccggcttcttcatttttttttttgaatctgggagagcacaaaggtgccagttctacaaccggcaccaatgacatagggtcattggtgccgaccaaaaggtgtcggccgggaaactggcacctattgccggttcccaaccggcacctataagggtttttgtactagtgcatgtcactcaaatggttatgaaaaaaatttgaggaggtgtattaacatgtgatatatcactccacaaacatgcaagttcaaattcaacttctatatctcgcaatggaaaaagaaattaaattaactatttgagtgacatgtaaacaacgggggacatctcgttgagaaattaaaatccacgccctttctgaagataatgacacacacagctcctcagttcttaggttatcaacagatcaatcgaactgacattttgcaggcaattattaaatagagtactacctccgtcccaaaatatagtattttttttggctatgaatctggacaattgctacattttaggacgaatgtagtacttaactcagtagtcaatcttcacacttggtacgtaggtattaggtactagtcagcagctagcacgaagtcttaaaataaatgaacaagaacatcacgagctagagaactacgattagaattgaacaacaagaaaagaacatataaccaacggtaggtcatcagtagatgccgtgcataagtcatgcgaaattatccctgctgagatatattgtagaattaattttattttcctagcgatcaaattatgcacgtagggccatggcgcgcgccccccacatgattatggacgaggtaacatccacgtgatctattatataatttataaaaacagcacgcgtggcctcgtgggaacaaagttaatttgattgctcttgttgcaggcacgaccaacaaaaatgaaattaaaaaaaaaaaactatgcgtgtctgctagactgctacatccaaaatatatgatgtaacaaacattatgaaaaaaaaaagagtgagtatagttgtcttcatgtatgtccgttgtgtatgctcacatgcgcattatcaatcaagaacaacccatgcattgatccactgggccaccaaaatgaagtatatgcatatactatctccctttttactacaaattgatctttcatcttattagaaaatatacatatttattattttattttattgtgacttgttttattattaaagatattttaagcataacttatactttatatattttcactaaatttttaaataagatgaatagacaaacgtcatgtctaaaagtcaatagcgttatatatttaaaaatggagaaagtattccctgtagtttttaaaaaatgatttttagaaacttgtataattttgttctcaaaattatctcattttgtaatgctctattcaaaacttgtttgcaataattgcattgttaggttgctatcaatgcttgttcatgatggcggcactgaacagttagttgtatgacctaatagcatcatcaagaaaatgagaataatccattcccaaaattttttattagattttctaaaatgaaaataggaattgaaaaaactcatccctctaagagaaaccctaaatttaattctcaaaaactaaaagtgagcccttctgttaaactaccaacagaaatctcccgttttccatcatccccgcaagaaaaaagatcgcgcgacccatcccatgcactcctcactaccctgacgctgtgtcgatctccctctcaagtgctacctggccccgaggccgatctccctcccacgtactccctgcccaatgccgatctccctcccacgcactccctagccaacaccaatctcccccggggatttttctcaactacaggtacttgtataggtcacaaggcaaatgttcagacattacaagtagatgatcaaatgaactcacaacattgactctttagcagtttgcctcatcatggtccaagtggcaagcaaagatggatgaagaaatataacattatatgtttcagttttaggactatattttttttactaagatttgtgctatttaatcaagttattgtgtagtaatacgttttagatggatgactctgtaacaatatacttgctacgtgcaatgacatgtgattcataataaagatttttcaataatgatttgtgacagcaacaagaaattatttcttaaactgtgtttgatgatgatactatcactgcggttactataatgaaaagtagtgttacagcttatcagaactcatgtgttaccagtgcaaaattatgtgttcctaggctatgcggcaacacatgttcttgtgttacaggagctaaaaatggtgttactagctaaaaagatggtaacaccttttcttagcagttgcaacatgaattatgtgctacaagggtcatactgtagtaacatggccaataggaatacatatcagtttgtgttactggagtcctcagtaacacgtttttgggcatgcagtagcgcaaagatgtgttaccagaaccctgttctgtagtggtgcaccatcccctgtcagctccccttcccctctatcccccgccactgttcttgctccacctctccctcccctcgctttgccacctctctctgcatgcactcaccatgctaaaaaaacaaggagacgagttgtcgaagcaatctcgtccagatgctactggatgatgagtcttcatcggatgatgaagaagaagaattttttttaggtggttcaaatagtgtactgtcagtacattgaagaatcgaagcgagacaggtctgtctttggacatgaggtgattgatagggaaagattggctggtcattggagattgtacaatgactactttttagaagaacctacataccttcatgttcattttagacgcaagtgtgtaatagtgaatagtatttttcttcaatcttgatttgaacagtgatgcatgtattaattcttattgctacttattgtgcaggtttagaataagaggacatctctatttacgcataatgaatgatgttgaagtgcatgatgattaatttgtgcagaaaagaaatggggctggtatccttgggctatcctatttgcaaaaggcaacaataatgtcgcgcatgttatgttatggaatagcaggagatgcagtggatgagtaggttcgtattggaggtaatatcattattgagaatcttaaaagatttgtcatagccgttgatgaagtttttggagaggagtacatgaggacaccaaatgagaatgatatagctaggttatttgcagttggagaaaaaagagtatttctagaaatgtgggttctttagattgcatgcactggagtggaaaaattgcctgactacgtggcacaattagtataaagggaaagagaaagttcctactttagaagtcgttgcctcacatggccgatggatttggcatgcgttttttttggtttacgtggaactcataatgatattaacgtgctccaaaggtcatcgttatttgcaaagctagctaaaaggcaggctcctaaactttattgtggtattaacgaacatgactatactatagggtattatcttgcatatggtatttatctttcataggcaacactcgtgaagagtattcagctgccacaaggcaataagagaaaatattttgctaaagcacaacagtccgttaggaaggacgttgaacaagcatttggggtgctgcaagctcgctttgctattgtccgtggactagctagtttttgggatgcagttgaagcatgtagatgtaggccctgtttgttaattctggtactccctccatcccaaaatataaccacttctagccctcagaatttgtcccaaatataacaacttctccaccaacattctcttcccaatcaatcatcaccctctaccattcacttttttccagcaacctccacttctcaaccaatcacaacctctccccatttaattcttcctactttcttaataatagtgtccaactctaaaacttcttatattttgggatggaggtagtaataatgacaagcgctaattgtggactaaagtgatataattgagttagaaccacatgatatacataccaagggtgattaccgcagattaaaattgatggtgcaaagcaatgggataaaggtggtaaatctagccttttattttaatcgatcgaggcattgggtgattgaatttttgctaggtttattattagctttgccgtactatcaaaaagggtaataactttactaaagaagtgatcaaaatgtcgcattatgtcatatgcataaggtcacttggtttgattatttgttccctccatcttttcaatctctagtcggtctgaccgtgggcagaccgacgggtcatggccggtccgactgggtgtttgtgagtcggttggatggtcacggtttggcgatccagaacagccaaagccaatgccggtctgaccgaagccacaggcggtctgatcggccggcccatggtggtctgaccagtgggtcttcggcggacaatggcttgtttctagcggttgccctagaggccggtttgaccggccaccccctagcggtctgaccggcagacatctgagagttggggttttgccctcaacgactagttttggtgagtggggggtatataaatactcccctaccaacagcgaggggacgctctaggaactctattcacttgcatagaccccttgcattcactctcacatcaattgagctcttgtttattcattgtggttgttagagagtagttttagcaaagacaagtacattgcatcattgattgagttagtgtgacacttgatcatctccgagccaggttgctacttattactcttggaggtagtcgcctcctagatagcttggaggagttgccctgtgacctctccgagaaggttgtggagaggtttagtgttggttctgagtggtttggagttcaccatcttgggagcgaagggagaactattctagtgatcgaggcttgggtagtctacttcgagaccagctcccaccttgcccaccccttgacgaaggggttcggtggttgttgtggttgttatagaccaattttgaccgtcaatatttctggaaataaaagagaactagcaatgcttgcatgcatatttaatcaagaataatatatttccacttgtacttggcaaagtatttgtatgcaagagatcttcatataaatggaggagaaatgatggaaaataacctttcagctcgacgtgtggcacacttatggatgaatgggcccacaaacccattagaacacctgtaaatgggcccaatcaccatgccactaagtttaggatccatcaagtgaagcaccagagaaagcacgggccagatgggccagcccagggttcggccgaaccgccaccggcgcttctgatcctggtcttccacgtggacatcccagatggcttcccaatgatggttgcggggcgtttaggacatttccaactttgacaaccgtcattggcagcctataaaaggacctctcccctctccatgtcaacacacacaaagaaggatcaagcaagaagctctctgtagtttatttactttgttttagtgcttgtggagtagaaatagaatagtttcttagttcttgaagtctttcggtgaattcggatatggctctagtagcttctctctcttgtaagactttattcaataataaaatattcttctctatatagttttggtcctttactttacttatataattatttgagtaccaactttagttcatacttgactcgtcataattatgtagctagcttattgaagatatgcaatggtattagttggtgttcatttatatgattgctctatgtcatctgcaaagatgtggagtactatttagtaatataaatgcggtgcttagattattagataccattaaatggtgctatatgccacatatctgtagaggtaggccgctgatggtgacagttcagtacgtgtattcctccacgtgcttatatagggctaagagaattttctagtgtgggtactcctccatatccattaccggttggatggccatgatggattatcgtaaagaactcgacaatcaagggttgtttctctatataccaagagagcatagttagagggtattggctgcataattgtaccatagcaaatgtagactaaaatgactatatactagaagtacagaaaatgatgcttttcttattctttctccacttagcttagattattattttagtgagaatattctggttagtttcttctatgtgtcaacctatcttacccttgaattgattaacccctgcattagactttgatctatacatgtgatgtaaatattagcatggtactctcttataatatattccctttggtttgaataaatacgataccttggaatacttccgggtgaaatgctaatatttcaagcgtcattgctgagaattatttctttctccacttaacttagattattattttagtgagaatattctggttagtttcttctgtgtgtcaacctatcttacccttgaattgattaacccctgcattagactttgatctatacatgtgatgtaaatattagcatggtactctcttatcatatattccctttggtttgaataaatatgataccttggaatacttccgggtgaaatgctacagcggtatatctatgcgcttgcggtttatatttgtaaccgtaagaatactgagtaatatttcaagcgtcattgttgagaattatatttctagtaaggcaaattttgctacaggacatcgcgacttcgtggttttagctgtaggataccgcgcgaagtcacttttaaggaaacacactcacaaaagttggatatttgctggtggacaccacacccattaaaataataattttctgttggagaagagagagaaatcatgtgaaatgtcagaaatacccctggccccacatgtcagctctccatctctcttctatctgtcctctcttcctcactgcttggatgtagagccggtgcggcgtatgctcccacggcatcaagaccggcattgccgcggtgttcacagcggagtgcaaggcgacgacgagtaggagagggacaacagcgatttcttgggcggtggaggtcggtggatccaacgacaagagagagagcgagaggattcgatcatttgagagaagagtgaaagatggcggcgatggaggaagaagacgatggaaatgagagagagagagagatgacaaatgtggtctgccggggagcccacgcctcctctgcggctgccgagcaggccgcttgctcgccctccggcctcggcacgccacccgccgcttccacatcactgccggcttgggagagatagagagaggaagatataaggggcaatttggtcaagccgtgtaaaaaagtggaccctctctcgcctagttagcacgaaaacattaatttaatggatggagtatcccctagcaaataaccacatttatagagtgggttcccccaaaagtgacttcgcgcggtgtcctacagctaaaaccatgaagtcgcgatgtcctgtaccaaaatcaaccgtgtctttgtggtttgagcggtgaagtttggtttgcctcaacggggattacgaaagcagtgaagtttaggagcagaagagggagattgttggaccatatttttggactagaataacaaaaaatatggattgggagtggattagaggcactgctggtgatgttctacaagcatatccagtagatgtgccatatgcccatagctaaatttaggcaacgaggacaaaaactagctccagtagatgcacaaaggttttgcaaaataaaaaacagaaccgaaaattcgattagtactttgaaccaaccaaatttattctggaataacgaagtaacctagaagacttaattttattataaagcccaaaagaaggcagtataagcccacgaaatccctaacctatccccctcctcactcagttcacaaactcatcacgcactcatgctcccctcctccccctgatcggcaaggcaatggctgctgtcgaagggtaaactcctcgagcgggggactgtgagggcccctttttggttcggaccaggggtgcgggtgaaggcttgagagatgaagggaaggtgatgcagaggcatagttattaagaccagaccagtaatcaaaccggtgaggctcttggttaaatggttcactggttcaaccgggtgaataggtggtctaacccggttcaatacttatcaaatatattaatcattctattaaaacacaagaggcaaggtagcctggtggttgagagagcactttcccttcctatcccacgcataattttccctcatttttcccccacctgcacgcgcacttccccttcctatcccacgcatagttattgaaccggcaaggccctcggttcactggtttgattggtcgcaccgttggttcaaagcggtttaatagtttaaatatataactgattcagttcattcaaaacgacaagcatggcctggtggttggtgcgctgtgctttcaatcaacccatcgtgggttctcgagtcccacccaacacctttattaccctatattttctccaactatcccccgcatgcacgtgccctctgagatagcagcggttcagtgccgatttattaaccggttttaggcggttttcacaaaaaaccgggcggtccagccggtttttaccggttcaatcgcacaagcggtcttttaactggaccagaccgatcctacgcagctgtcggagaatgaactcctccaccagggaaccgtgaggcccccctttgtaagttcggccgggggcagcaggtgagattcgagggcttggtgagcgaagctgtgtgatcttgagggggttcaatcccccaaagacgatgagacaaaaggggtttatataggttcgggccactaagtgtaacaccctactcctgtgcttgattgattgagtgtagaacataagtgcttggggttgcgagacccaagcgccagttcgctcggaagtccccccctttctcactaggcctggacctccttttatacctcaaggggttaccacataggcccaacaacctaacttcgtcgagaagtattacaatctttgcattaaatacatgtcttgttccttgacgtggaagccgcatacacgtcgcctcggtcgtggggcctaccaaaccatgccgcctgacacgggggatgcccatgtcattcaccatttaatgggtgaagatttctgggctcctattacaccgggaaacgggagcctagctttgaccggagtgggaggaccgactccggctaggataagaggatgagaacctctcaccatcattatttgatgagacatgtcaggttgcacgctgcctgacacacgagcaacgcacaggcgcactagccagtcccatcggtcattcgaccggtgacagaccggttgagtacactgcacgccgcattaaatgcggcgtggcgcgaccgctcgggtcgccataaatgtgggtaggtgggcacctgtaggcggacacctaacccaacgtacatggtgacctagagagggggtcgggggagcccaacccctagtcacgggagggagcggtcgccgcccgacctcgggcccgatccccccgcgggggagggccacgtggctcctggggcagccttctccctctagtcttggccagggagtggccgccaccctacctcgggctcgatccccctcgggggagggccacgtagcattggggggcagcctcctctgtccaatctctgggatggagtggtcgccgccctacctcgggcccgactcccctcggggagggccacgtggcattggggggcagcctcttccgactagtctttgggaaggagtggccaccaccccacctcgggcctgactccccttgggggaggccacgtggcatcggggggcagcctcctccgactagtctttgggaaggagtggccgccaccccacctcgggcctgacttcccttgggggagggccacgtggcattgggggaagcctcctccctctaaaaatgatacccctgggcccatatcaccgatagtagcacccggcgttagccctgaccaaaacctttcccaggtggtcagggttgacgccaatctgctagtcagttgacatgtgggcccgatcttctgtcctatcattctgggagttgggcggtgggagtttagtcacgttcaaacgtcgccttaacttcccactttcctcccggtttccgaggcgttgtgggctcgggagtttagcccgtaccttaggccgtgaacttatttcctgtatatagttagcaaacgttgttagattctctcgggcctgtgaccttacgccgtgtaccttgcttgcccctgccttttgttaacctctgttcgtgttctacttcatctattcaaacgattattttggcgtgagcgtgaggactgaactttccatagccagcaatcttcacccgcgatcaagccaagctaggcactgtagccagccggcggggctagagccaaccactacggaagagccagcacagggggccccgggcgtcgacggcgcccagagcttgacgcagggctaggagagagctaggaatcgtagcccccgcactttaagcaaagaatagtttgaatggttgaaacgaatacaaactttttgttaccaagggaggcaagccagcgcgcgacacgtgggtaccgcgggaccgcgaggaagagatgggtgagagataaatataagcaataataattctatgcaaacgattaccttcgcgtgagtgcgaggactaaattttccatagccaacaatcttcacccatgatcaagccaagctgggcgctgtagccagccggcggggccaaagccaaccgctacggaagagccagcacagggggccccagacgtcgacggtgcccagagctcgacgcagggctaggatagagctaggaatcgtagcctccgcactttaagcgaagaatcgtttgaatgaatgaagcaaacacaaaccttgcttgcatgtcgcgacctttcaaacctttagctcgaagagggcctcccaccatgggttcctaaccattttgggaagcctgcgaccacttagcaaatgaggtgaggttcccacgagcctgtgtcctcacgctacacattctgtttgctctttcctttcggtggcttccttccaatatctctcccttctacatcgacgactactttcgcacgagtgtgagagccaaaaaaactctagagccagcgatccccatccatagttgagccaagccgggcaccgtagctagccatcgggaccaaagctagctgctacggaagagccagcacagggggtcccgggcttcgacggcacccggcgctcaatttaaggccggaatagggctagaaaacttagcccccacacttagcgaggaaacgttcatgtagatgggagagaggttgggctcttaccaccgagggagcaaacaaatgcgtaacacgcgagcgtcgcaaggccatgagaaaagaacggggggaaaataaatataagacttcaagctgtactaagctgatgaattgaaaaattgaaaaatacttgaagcttgaaaggacgattagttgagccgggccgggcaccgtagcctgccggtgggaccaaagctagccgctacggaagagccggcatagggggtcccgggcttcgatggcacccggagctcaactacaagagtcctcccaggagtagaccgaggcaggtggcaggttcataagcgatccccgtgcttggccctggagggccatggggaagaaattcgccttgacccggtcgtcaccccacgccacctctaagatcgtcgtgtggatttggagggactcggaggggttgacgcttccgtggtacctttcggtgaggccggtgaagatgtggggggactagccccctgcctggggtggcgcggctctcctgaggaggctgcgccttcccccacattggcggtgcgacgctcgtcacgccggcgctcaaaagaacctcaaaaatcacgaacgcgccccctacctggcgcggcagatggcggggaatgaactcctccaccagggaaccgtgaggcccccctttgtgagttcggccaggggtagcgggtgagattcgagggcttggtgagcgaagctgtgtgatcttgagggggttcaatcccccaaagacgatgagacaaaaggggtttatacaggttcgggccgctaagaagcgtaacaccctactcctgtgcttgattgattgagcgtagaacacaaatgcttggggttgcgagacccaagcgccagttcgctcggaagtccccccccccctttctcactaggcctagacttccttttatacctcaaggggttactacataggcccaacaacctaacttcgtcgagaagtattacaatctttgcattaaatgcatttcttgttccttgacgtggaagccgcatacacgtcgcctcggtcgtggggcctaccaaaccatgccgcctgacatggggggcgcccatgtcatttactatttaatgggtgaagacttctgagctcctattacaccgggaaataggagcctagctttgaccggagcgggaggaccgactccggctggggtaagaggatgagaacctctcaccatcattatttgatgggacatgttaggctgcacgccgcctgacacacgagcaacgcacaggcgcactagccagtcccatcggtcattcgaccggtgacagaccggttgagtacactacacgccgcattaaatgcggcgtggcgtgacctttcgggtcatcataaatgcaggtaggtgggcacctgtaggcggacacctaacccaccgtacgtggtgacctagagagggggtcgggggagcccaacccctagtcacgggagggggcggtcgccgcccgacctcgggcccaatcccccctcggcggagggccaagtggcgcctggggcagccttctccctctattctcggccagggagtggccgccgccctacctcgggctcgacccccctcgggggagggccacgtggcattggggggcaggctcctccgtccaatctctgggagggagtggccgcctccctacctcgggcccgactcccctcggggagggccacgtggcattggggggcagcctcctctgactagtctttgggaaggagtggccgcccccccacctcgggcctgactccccttgggggagggccacgtggcatcggggggcagcctcctccgactagtctttaggaaggagtggccgccaccccacctcgggcctgactccccttaggggagggccacgtggcatcgggggcagcctcctccctctaaacatgatacccccgggcccatatcaccgacagcagcagccacgcaacccgctatttcttcagaactggacggtctaaccggttcacagcagggtcgattgcatgctggtcttttacctagaccggcaagggctctggttagttttttccggtccaaccgccagtccagtcttttttccagtccgaccgccaatccggtccggttttaataactatgtgcagagggggtcgggcccctcggaagcaatggggacgcaatcggtttatacaggttttggccgctgtggaagcgtaataccctactcttgtgtgtggttggttctggtgggaggatacaagtgtttttttctcttcggatccctctccccctgttgacggtcattagcgattagtttcgacctcagtgttaccaaaatagagaactagttatgcttgcaatatccatgttagaataataatattcctctagcatttggatcactaaccttttgcaaagaataaccataaaatggagaggaatctacatcaaaccagacaataaatcaatctgacgatgtcgaggatcagacttatgtatgaatgggccaagaactcagaaatgacacgaccaattggaccaaaattcacaagtctatagagaggagaagtccaggaggccgccaaccaaaaatgtgctggattggaccagcccatggttcggccgaactaaggggttcggccgaacccccatctgctccgttggatgcagggtttggcgtggacgtccaggattgctctccaatgacggttagagagcatttccgaccattccaactgccataaccgtcattgggaggctatgaaaggacttggcacaatcatatgcctttgtgagaaattatacactttgagtgatcgagagaatcaattgaggagcaaagcaaagttataatttcatgaaaagtaagggcgacttgagtcaagattgttccatttctcaattccccaagatcgcatggtagacactacaaagacccacaagtatagatatgactttgaataatttgtttgcataattataaggaagtcataaaccttttgtagagtccatagccttcactcgggacgagcaaatgttaagtgtggggatgttgttgatgatccttaaatcgtaatatttgaccgtcaatacatgcatataattaaataaaatatggtatctaacttagtggtagggattattactaatcaattccactagtgttggtaaaatatgtgtatgtaggtattttaaggagaaaacacacccggcatgtgaggaaacacacctccggccaatcagacacaagcacatagattggagggcccacaagtcaggtggaaccaccatggaatgagtcataactgtcataaccgccatcagggcccaccagtcagtgtccctgtcaaaggagaggccaggaggtggggcccaccatgggttcggccgaaccaccacagcctcctctcatcctgaccttcgacgtgtacgctccggttgaagtctcaatgatggttggagggcatttaggacatttcccatagctgtaaccgtcatatgaaggctataaataaagctcctctccctcacttcactcacacacaactttgagctaaattacaagaggctctattgtatcttttgtacattagaattaggtagatagtgaggagaagctctggaggagtgcctggaagtttggcgctcatccgacttctacctcgacgagtgtagctctctaggaggaattctggaggagtaccgaagctgtcggtacactctgctccgggttcggagaacttcttctattaagtaagcattcgagatcctttctcttgttatttaattacttagtctgagtaatacaaatttctatctttgcgggttcattgtttagtattcatactaagtgctctagtactatgactctggataaagaaggaagttcctgtataagtattagactagtaattaataacatagacgtggtgtcttggttagatattacctttgtttgttgtgtatcccacggatttgtcagaggtaggctgcaggtgatgacagccctgaatcccttcctagtaatcctcaacattcgaatacatcatggagctatagccggaaccacgctggcagaccagcaggggtcggtgcccgaaacaacagatagaaaactacctttgcttagcttagataattaaaatacatagaaaatcctctctagcctgcctagcctacctatagctgttgtccttggatcatcttagccttagatagattgtacacattttctgagttcgatatccttttggggtcacccgaaggtgaagtgttacagcggtattccgtgcgcttgcggatttatctgtggtcgtaagaaataccaacattgccgccacctgtcgccgccgatgctcctcctcaccggtgtccacgccgcctgccgccgccgcttgcccgctgtgccacccaccccccgccgccagcttcccgttgactaggattgttgaccctacatttttttcccacttacatgtgggtcctaaaaatttaatttttaatttttgcttactagtatgccatgtcagcaaaactaggcaaaaaaatactaccataagacctcctttgaacggtttgtgtgagtttagaggtagacatttctggttttgtggttaaaggaccttaaaaaaaactcgctgttaagttgagagacctctggtgaacttattccaaataataaagctcatataagcaaaaaaaaaaaaaaaaaaaacaagcccaaccaagaagcggcccgctaaactgcatgtttctccaatctattggactccgacgatgttctgtaggagttgagtaggaccatgcgtcgactcaagtggcagtaggtggggccgcgggtggctgctcgctcgtgcgcaccggccgcccccacctccaaccatggcgtcatcctcttcctcctcctcctcctcctccccctcttcccccttctctcccttcgcgcaaccaccacccaccaccc

SEQ ID NO: 18120 - DNA, 3131 bp, Oryza sativa
cccgcggcaacagttccagtccctccgcgcccccaccaagccccccttccacttcccccacctcctcctcccctcccgctcctcctcccgccgctgctgctgcgtccccgtccccgcccccggggcgaggtcccgcggcctgcccgctcccgtatccgcctccgcgctgcccctgcgggtgacgcctccgcccggggtggaggtggagggtggcgtggggagggcggtggcggcggcggcggcggtgaggagggtcgcggtggcgctggcgtgcggcgcgcttgcggcggcatggtgccaccgggcgctcgcggtggcgggggcggcgggagccgcaggggcatctggggcggtggaggcggcggctgggtttggcgggatggcactgcgtggtggctggccgagggtgctgcagattctgcagctgcttagagagcaggggattattctcgctgtgttgcttggcctctcggcgtttttctccatggctgagacttccatcaccacgctatggccttggaaggtgcgtctaccaactatcaagtgccatgatacaaatttgttacacaatgtctaattgttgcgtaacatcacttcactggttgaaaatttgttacacaatgtctaattgttgcgtaacatcacttcactggttgatggttgtaacataagtctagctagatcagtgattgtgcgcaactgggcatgatgatgaaaatgatagtatttggggtttaattttaaaatttccatggtgaattgagccatttaggtaggaaggacacgagtttacatgaggaaggtggaagccgtataaaaacatctctgatgttggttttgagtgttgacgggtgggtactaggccattaggcattactcaacaaagggagattatgtgcatcagatgaacagtttgtgcaggggcttagttgcttcctgtgctggtgttgttgcatgatcctgagctggtactgaccctgtaaatatttaccagctcccaaagtttcttttgatgtatttatggtttgaaagaaatacatacagtacacaccatactaacatatgcactacttcaaactggatgcatgcactgatacccctgtaattgtcaggggaatgtgcactgtcacagtgtcactgactgcccatgctaattcttattattttctttgtcccaacaaacaattagtgttcatccagtggtaggtcaagttatttgcacattttaagtttagtgcggctttatcttcattcttcaggatcatgatttaagctctaggttcaggtttagtaggtaataacattaatttaacattgagttttaagcttctgtaataatttagttgttacaatttggtctttgtgtcatcgtctcccaaatcagcatgctttggatggacaaaatttaattgaatccattagcaaggcatatgaccatactattgagtccatagtttcatgtgtgcatctctgctgggattatagtttgacataacatcttttgttgttccatggcaaatgcataagtccccaccttgtttatcatccattaaaccctgttggttgatggtagtccttttcatgtctaaacaattgatgcttagatttggttttctgttccactaggttcgtgagttggctgaaaaggaacctgaaaatggtgttttcagaatgctccgaagtgatgttactcgcttcctgacaaccatactcattggcacaacgtaatttattaaacctatgtgttctgccatgtttattatattttttttctataatccatattatgtcattgagttcaatccatacccacaatatgccactcactgtgagacaaacttttggccttttgggtcttggaaccacacatttggagatgccagtggtgtattgtggacattgagtgtaattcagtggcataaattggatccctccttattattttcttcctcacactggaatacttctgtatgaaagtgtggtcaacattggcgcaacagcaattgttactgaggcggcaactgcaatgtttggtgaagcaggtgtcagtgcagcaacaggcgtcatgactgtatgtcgtctcttttgcactgatctactcataataaaaaatgttctcttatgtttatatgacgtctaactgtggagccccaccttttttcaggtcgccatcttacttcttacagaaatcacacccaaaagtgttgcagttcataatgctacagaggttgctaggtttgttgtaaggtgagacagatgtaagcaggacttagtttcaaatatttgttgaaatagcctgcttgttaatacgatgtttaatgctgtatatctattgtaatgtatcagaccagttgcatggctttcattggtcctgtatccagttgggcgaattgtcacttttctgtccatggggatgctacagattctaggcctgaagggaagaaggtaggcatacataatactggcatttaatgtatattttctgcttgtgtagcattgttaattgttgttcttgattaactgagtaaccaaaactttaaaaatatgagtagcgtgtccttcataaacaactccaacaggttacaaaaagcttcttccttcatattttgctattggtgttaaaggtaactaggcagggatgtgaacggcatgggtggttccacaaaatatgcaccaatataaaaagccaagtcgatcaaactcatgtacaacaaggattcaaatatggattaaccgaataggtggttatcagttatcgtaagtattggatatttatatactatatacacaactatcactatgatggatttggattcaactgtatattttgaacctaatatctgtatgtgtattgttgtgcaatttaaacatgttcagaactcgaggtgtgaagatttttaaataatcatcagattttttttaaaaaaaattggtagggtagagttgataatttgtgtttggattggcgccaataagaaacaaatttatgggtaatgctgaaacatttggtagggcaaacttttgaggggatgtttggtacggttgcaaaccaaaatggacgtacattttttaaggacacggaattctgtgtgttttacacaattttttttttcagtgaaccatatgttact

SEQ ID NO: 18121 - DNA, 4360 bp, Oryza sativa
caataaatgttctcattatctattattatttcttctattgaaatgctccgaaagaacgcttcaaaaagtaaagttagatgaacacaaagatataggtgcaatatgttttctgtatttctgtattgtactattcagaatttctgatccatccctgcttgtactgaactcttagctagttattcttgatcagctaaattcaatgagtgacatttgtaacaggatatgatcgagaatgtactagagataaaagatacacacgtcagggaggtaatgacgcctctggtggatgtagttgcaattgatgctaccgcaacactgattgatttcaaaaacttatgggaaactcatcagtactctaggtatctcagctgtgaacttttagtatgcatcttcaattcttgttgttgacatgtgcagctcttacttccagagttccagtgtttgaggaacgcatagataatattgttggaattgcttacgccatggatatgcttgagtatgttgaagaggtctgtctcttgtttaccatttgaatttttaaagtagaaaaggatgagtaggtgactcttatttgttcggattaaggattttctgaagaaagatgcattttgatttgaaggttgagaagttgaaggagattactgtgaaggaaattgcacatatgcccacatactttgttccaggtaaactttcacgaatgatactcattacaaaaatgtccattgataaatctaaaggcagatacagaacattacaagtatttgagtactgtcctttttcagcatccatctaacctatttattttctatttcaatggattttttcaaatccagatttgtgtagggcattgcattctttatgtcttaatgtttcctctggtccacatgtcattatgtaaaaatgtgatattttgtcttgacagattcaatgtctgtttggaacttgctaagagagtttcgcatcaggcaggttcatatggcagtggtcctcaacgaatatggtgggactattggtgtaagattttattaaccaatcctttgttccttgtactttctcaaaatagaattgactttctacttatagttcttattattgattccatttatcattggttatttgaaggggatcttttaattcatatttggtcaaataactggaaattcaatatttttagctcaacttagacacctttgctctttcatggtttgttgttcgataggaaaatcattttgttctctccaatctgcacagttcagtttcacctggtttctctgaaatataaaaataaagattgttttctcttttgttttgaacaaaacaccccagaggagtcctctgctgttatatgaagatcttttttttgttttgcttcacgaatttgttatattataactaatgattagatgttccaaactagagtagtatccaaaccaagaaagcaagaataaaatggactgtagtattcacaatctagctgacaaggcaagaataaacaaaatgagggtgtaacagggatgaaccaacctgattgcagaaagagggcaggttctggtttacgtgacagtaactgcctgactgtagttggttttatgaaccttgcttgccagcattttgatgggacagtgagtggtctgtatattcggaaccgcagatgtgtggcaatatttggagggaggattgacaattttccacactcatctttggcaattgaggattttccactacatatatccttgtcccacatgtcatatcagtggcaaattctcaattgccaactatcaggagtggcagagccttgtatcccaatattattgacattatttttaggttgtgttatatatccatagtttattgtcaatttttatatgcaaatacctcttgcaagttgtagggtcaaacgtgtttactctttacaacgatctgaaatcaaaatcattaaacatctttacagcacaaatacattcagcaactattactctatattgtacttgttgggaattaaacatgccttctggatgaaactcagttttattgtaaggtttcctatttcattaaataattattcacactcttgcaccagctttgtcctatgttctgtgaataatcagaaacagcttctgttcattacttatcccatgcatctcttactttcggaagtctctctgactagtgactactgctaaaaaattgcagattgtaacattagaagatgttgtggaagaaatagttggagaaatcttcgatgagaatgattcaaaggttggctatttcagtggtccttttgatttaaattttacaattcagagtctaatgccatttaccacacgctgtatggaagtgatatttgatttctgcttttcttttctctgatcacactaatccctccatctgtgtagcaaatcaaatgctaatcatcttgtataaggatttcatgagagaaagaaaacttaagcacacgtgctattatgactttgtgaacattcttataatcactgcagtagtacaactttcaagctcttagtatttatgtgtttgcattgtcttaagagttagtgtgttccataattagccttattaattagatcctggtcagttacatcccggtttgatggaaatcatccagcaactatctagtgccaattcttataattaatactacctccatcccaaaatgtttctatttctagcacagtacattgtcccaaaatgaatctatttctccacctacctcctcaaccaatcacaaccattctccttcacctactttctcttttcaaccaatcacaacctttcttcaatcattcccacctactttcctaatgcttgtgccaatctaaacaatgcttacattttgggatggaggaagtactatgtaatggtgggaatcaactggcatcatgaagaatcattctgaattaacataactcaagagtatcataaaaacttggcattgaagttgtcaaactggcagggatgaagtgctctgcctctgctactgtttgagctataactgcctgattcttgccagttctcttagttttaagtcataacaacatattgcatttagtagaccatgatccattttgctactcttttgcttaagtagacagttgtacccatttccttatgctactatgtttttacctttgcaggaggaaatccagaagaaaacaggttatatagtgatgctggatgacggaacatttgacgttgatgcaaatacatcaatagaccacctatctgaagaacttggtgttaaaataccagaggtgttatttcttgtttggtctttgctttttctacagttgctgtttacttctacagtcactataagtgttattttggacattgccatggcaatcaaattggaatcttggtcaccaacatatcttgaaaatctagcaaaaaatattatattttattttccaaggcaaaatcatttatatgatcgttataaataatattcaaataatttaactaaatgttcccatggtgacacatttctcactggagttaactatatgtgctccaagggtaaataaatgcattttccacatatcatatgcaacttgatatattcgaatcagttcatcccatatttccatatgtaaggcctatctcctgtggctgttccttcttattcttgaatatgaaatcctgttaatcattataatatcaatttcaagagttatcttgaacacatcaagtttgtctcgagctaattcctgaggattgagtgcttcttcatttacttaacagagctgattgagtgctttgagatttcttctgaattgtcaataacacatcttgctaggtgttagctttagaatgatatatgccacttggcttatattaagcatagttttcttaagtggaatgtgctactgcaatcaccatatgctggatatgaggttcacttggaatttggaaatgcatttgtttgcagggtcatcagtatgagacggtgtctggttttgtctgtgaatcctttggttatataccagaagaaggtgggaaaatgctagttatactcgaaaaggataacagagaagaaaatgatgaatataaagaagaaggatctgataaccaagatgataaagaaagaactcaggcttatgaacttgaggtaagtggtacaatcctctgtttacaatttgtttgcagcagggtcagacactaggtctctagtagagatgtatattagctagtgtttctaagatcattctagattttttttttttgccaacaccatcctggattatgtttgccaagtcctccgactagaaacaatgatgaataatcgctatatacacccctagggtctttacttcctacatgatttaaaatgattgttggtata

SEQ ID NO: 18122 - DNA, 15940 bp, Oryza sativa
  unsure (1)..(15940): unsure at all n locations
cctgcagcccaacctgaacaatgcatatgcttcaatccagtcggcgcaaccattgccccaaacgcagctgtttcaacggaggaccaacatagtgcttccctttgcgagggcacttccatttaccgcggatctctgtcgttgttggagcagctgctacttctgaaacattagtcatgtctgctaaggggcttctgctagtgcgttcttggactacgactttctgttccacaatgtcacggttctcttgcaacgtcgtggacttcgctcttctcgttgggggcttaggaattttgtttgtgttgaatgtttgttctagtttctcctttctcttgatggcaacaaaaccatcagctgcaactgtttcttcctgctctttgtcatccattgcagggttgccatggcaagtttcttctcctggagaattttcttcagtgttaggtatgatgatatcattacaaccgatggatggtaggctgctcttaatgccatttccgtcaaaccgccttttggtgcgatccttgcatgttctagtacaatcaactgacagtttgctctgctcattaccatctttcggggtgattttgtcagcatgacatgaactcataccatcaccaattagcagtttgctctgctctttctcctgatcaacctgggaaccttcttgagtatcacctacatcgatgccattacaatccaccggcagctcactgcattcgatcgcgccttcctgacctccttgagtatcatcatcatcaggcaagcccatggcattgcgatctggcagaggctcggcttcatttctctgaacagacaacaccgcctgagtttcagtttcagaagtctcaccgatgttgtcaagaaagccatctccgaacaagctccgcaagctttgcttcctcttcgtgccacgctccactttgctcttactaatgggaatgaactctctaatagcagaaacctcatgctcgtgttgctgtccacattggtttcccctcaaagcagaatcaccatcaccatcaccatcaccatcatgggtggtcggttccaacaacgaatccacaggcaccccgacctggatattctagaacaaaatatgaatttaaggaagtcaatttggataggaatctctgagaaaaaaaattggattgtaataatttgtgagaatgggtagcaagataaatagaagcaaatcgagcatgatctgaccaaaaagaaaaaattgcagcaacattttacctccagcgggtcttgggtctcgctgccgctattgccgccattgccaccaaccagctccggcacctccggcgactcgtactcatagctcgagaaccagttcttgatatccggcggctctgacgaacaacaccgaaaatgagatcggaagatccaaaattgccgtatcaagaaatgctacaatctgtcagggaacacaagggaacctacgggaagggaacgagaacgggtgcgagctccatcctcgcgcctgcaggaccaaaaaaaaaatcgccatcgtgagggtaagagcatcccgaaaggccaatcggttgagccggcgagcggcggtcgacgggatagcattgaagaagcaaggattgggaggataggaggagatcgaaggggaatgccttgaggcggcgtacctcgattgcggccgcggattcgtcgggggtctcggccatggcggcgaccgaggccggagggtgggagtcgcgaggaggaagaagaagatgccgctctgccgcggtgccgcgtctggggctctgaaatttcgaagtgcccgcgaagcgaaaagctcatgttgccgcgcgaaatgaaaaaggggaaaaagaaatcgccaaagacttttcggcttcccgtcaatgcattgaccaggccgtgaggcccctcgtggctagaaatggcgggcacaaatgagccggcccatataaagtttttcttttcctctttctgtattcgtaacaacccgtaataaaatattgactcgtcaggcaactgtcacgctttacgtttcttgatcttgacggaagctagtcaaccgtctctgacaaaagtcaaccaacattttgatctctactcggttagacagctcggtggatcgacgtccccaaacgccaccccgtgcgcgttccggcagaacgacgccgccggctgctcctcctccgccgccgccgccggtggctggtacctcagccggacgtccctcatggcgatcccggcgcacggccggctcgggctgcagtcgaacctcaccgccgtcgccgtcgccgacgtcccctcgatgtccgtgtacgacacgccgctgatctcgatccccgacccctgaacacacagcagagagagaagccattacgacgtcggcatccatggcgatggcgcgacgaggtcacaggtttcagggctgcgtgcctcggttgggcagctggcgttgccggggcagtagttctggtcgacgatgatcgggttgctgacgttccgcatgacgacgccggagaaggagacgccggcgaccgcgccggcgttcgccttcgcccacgtcttgatccgcagcccgttcgtcgtcccggcgagcgccgcgcccttcacggtgatgttccgcaccgccacctgctccggcgtgtcccccaggctcccgatgctgccacacaacacagcaatggagctctctctgagcatcttcgagcagacgacatggatttcggctgtgtcgctcacctgatgccgtggccggggccgcaagtgacggcctcgatcaggacgtcggaggagccctcgaccatggagacgcagtcgtcgccggtgccgatgacggcgttgcggacggtcacgccggtggactgcttgatgtggatgccgtcggtgttggggctgcgccccggcgccgacaccaccgtgtccacgatcgccacgccggcgctcgcctgcacggtgatgtggatcccggcgctgtcccgcgacgtcagcccgcgcaccgccacgttcctcgaccggtatatcgtcagcgacctcgtggcgggcgggcagtcggggcggcgtgcgcgccggcacgcccagagcgcgcggccgcggccgtccagcgtcccgccggcgacggacacgccgtccacgtcctggaacacgatccacagctgcacgccggcgtacggcacgggcgcgaccaccgtggcgcccgtcatgttcacggccaccgcgccgctccggcacggcccggcgaacctcgccctggacaccaggtacaccccgcccgccggcacgaccaccgtcgccgccgccgccgccgcgtcgcccgcgcacgccgccgcccacgcggcctcgaacgcccgcgcgctgtccgtcaccccgccgtcgtcgcccaccgcgccatagtcgatgacattgtacgtcgccgccgccgccgccgccgccgcaacgaacgccgacaccagcaagtgcgcggcgacggcggcatgagcatgagcgcggcgcggcattgggtggtgggggaagataagcttgcgatgcgattgctggtgcgatgcaacaagagttggttgtgttaaagcgacacgttgatgtggccttcaaaactgtcttggacgtgtgtgccatgagtggtttgaggggcaattacttgtaagattaggcaatgttatgtactgctgctaatgtgtggaccagttgctacgccacttattcgtgtgcacgggtgcacagcaaggttaggcaggacttcaggagcttgcagtgcagtgcagccttgcaggacattaccttcttttctcagttccctctaggccttggtgctacgaatcttagggcatgtataaggccacttacagtgcggtgaggtgtcgtgtggcaatctccatccacgttggcccaatgtacgcgtggaggagagaaggaggtggggcccacgttttccccaggttcgcgtggctagttttggctccgagaacctcagcaaattttgtcagagaaaagcacatgccacagagcgagagagagagagagtgaagaagctcgccggagagggagaggagtaggggcgctgaatccgtaccagatctgtgccgagttcgccatcccatccggcggcgacgagaagagctcgcccgcggaggtggtgaagcgacggcgccccgccggccgacgccgagctacctggccgccaaatcctccgccgccgagctcccccgccgcctaatcctcctgctacgagtggtctcgatgtgacatgcaagataagaccacttaaagaccacaactcccacaatggaagccacccttgagtgttttttgtgttttagtccttagtttcttacatgtcggcccttgtaaaactttattattaaatccttgattttttttataattggactctatgacaacaaaaagaaacacaaatatacccctgatctcctgtcggtcccacttgtcagcccctatctccttttcctcccctcccctactccttttccccatcaaagccaccagacgccaccaactcctcccctcccactccgctcaccgccggtggcagcactgcctctaccctccctcggctacactgatcggggcgtcaagctccgtggcagagggctacgagctcgagctctctcctctctccgccagcgaactggagctctctagtctctcccctctcctcgtgacggaccgaggggggcacggcagcgatgagacaacgagctcacctgatctgaccgttatctcggtgggcaatgagctcatgcggtggagtcctcggcggtggcgcagacgacctcattgaattcggacgcaatcttgctagatccggccatgaccttggcaagcgacgagcttgtgcggtggagttcgtggcggtggcgcagacgaactcgccggatctggacgcaggctcgtcaaatccggatgttggtgacttgccggactccttgaaggcgttggcggcacacgacgacaaccttggcagtggcggcggcgcatatataagtcatccctcatatataagtcatccttggggcagggcgggcagtgcagccgtcatggccccaggcgttaagcaccccccccccccccaaccaaactatatgtagctaagtgtgcatatatagtttgggtttgtaagtacatgttgctttatgttgtacttcctcaggaaaaaaaaacctcatattcattgtacttatgtccccttctagatttttttttggatggagtattagttatctcttggaaagagagttaggttcttatatatatattatgctatatgtatgtactacttccatcacaaataaaccaacatgggtagggatgcgatactagacagtacaacaaatctagatatgattcattgtactatctactgtcacattcatactcagcttggtttattttgagatggaggtagtatggttaaaatcccttgaacacacaaaaaaaagataatagttcgatgatttttatttgttctacgagatggccatgttagttagtgccttagtaatctatagcataatttccatgattgattcatttctcttgtagcactgcactaattttctacagattgcgtgatttttaaattttagggccataacagatattatacacttgaaaagtttggtgttgataattcctttttatagttaatttgtttttctattcaattatcacctaacaaatagtttatgtttagtgatgtgttaaagttaaacattccattctatttaaaataaaaggccacccgttagggttcaaatcctattgcccatatacattaagcacacgtaagtggactttcaataagaatttattcaggctacggatgtgaaattggtcttcgtgtatgttaggggtagacttgtgtgtagtaatgtgcacatgtgtgtctcccgtatagtatgaaaagtttagtcatatttatatatacaaatgctagttatcgtagggtctcaatttttatctcgctctacactaaaatttcaggtccggccctgctcacttagggcaatcttcagacaaactccaagaaaaagtagtgaaaataaaaggtgaattgaacaaacaaataaaataaaaatattaaggtgatagattgtacaaattatcttttagtttacaagaataaaattagaggtgataattgcctattctacacaacttgctcttactccctccgtccctaaatatttaacgttattgacttttttaaacatgtttgtccgttcgtcttatccaaaaaatttaagtaattattaattcttttcctatcatttgattcattgttaaatatacttttatgtatacatatagttttacatatttcacaacagtttttgaataagataaatggtgaaatatatttaaaaaagtcaacggcgttaaatatttagtgacggagggagtattaccctgtaaactgatggtgtatggtcagcggcgttgtccgtttggaatttgatcgtttctgctaactaaaagcgaacctagtttcaagtgatatatctcggactttcagacggaaattaatttgacattcatgtggaaagcgcgacagcttttgagtaaagttgggtaaacttaaactgaaattaaaggcagaacaacttccacctaaagatatcccatccactctcaaccaaaagtctcgagcttccggttcactttcaattaatcattggcattattaaccatgattttggagcggtttaaagtcagatattatcggctgaccgctcaggacaattttgcagaggcacatgcatgaaacattcgaaacatttgttcttttttttccggacactcaagctttggcatgagcttagcacgacaatccattagaagatgcagagtcaggcctgggcgacaaggctactcgtttatctcaaaatttatagaaagtctgaaaatatcatatcaccgtttcgctcacagtacttaggtgaaacggctgttagcgtaaaagtttttataagtaatacttttgtgttcctcaatgacttaaaagtaaatgctgaaaaattaactacaaacagaaaaactcaaaatcaaatctagttaaacttaagttttaaaattcaatttttttatgcttaataaagaaaccatatttgataccggaatatttgttttgataacatgcaactggtttccccgttgggtaatccttcacatttggcaaaaaaagaaatttcaagaactagaaagcctacgtggctacgtaatactctgtttttatattaataatttggaatattttgagcatactttagctttctttgcaaaaatccaagagagtggcttaatccgcccgttagtccgttactagggccggccgtcgtagcttccggatacaccaaccaatatggcttgctttttccgtcgcaaatcaccaagattttcacatgtagatgcaaccattgtacgcttgctgccgtacgtcggcggcgtcgtgccgtgccgtgcggtcgccggtcagaggcagctcggtgggatgaccacgccggacgccgacccgccggcgttcttgcagaaggacctcgccggcttgccgccgccgccgtcgtacgtcaggttgatgttcctgagcctgatccccgtgcatgggttgctcccgctgcagtcgaacctcaccgccaccgccgtcgccgacgtccccgtgattccctcgtactccacgtcgctgatcttcacccccgagctctgttgatcatcagccatggcgcccgatcagctcacacgcaccgagctccaagctcaagcatggcgtgttgctagcaacaagctaggtttggatttttatttttatttttttgaacttttttaattttaaaaatataaactctttcaaaacttaattatttacaagatatgaatcatttgaccatgccaaccagacaaacgtccagtttacctgatgtgatagtgttatttggccacgccggattgattagagtgacaatgttatttggtcacaccatcctaattgatggtaagataaaactgtacagttgtttgtgttattttactatgtcaaacgggctagggtagccaaaaggttcatattttaaaaaaagttttggaagatttatttttaaaatttcaaaaagaaaaaagaaaaaaaaatatcctatgtttgtggttacctggccggggcagttgacgttgccggggcagtagttctggtcgacgacgatggggttctggacgtcgcgcatggcgacgttggcgaaccgtacgccggagacgcggccggcgaagggcttcccccacgtcttgatccggaggccgttctgcgtgccggcgagcgacgcggactccaccgtcacgttccggacctcaccctcgccggcgcgcccgccgaggctgccgatgctgatcccgtgcccggggccgcaccggatgttgcggatggccacgccggaggtgccgggccccacggagacgcagtcgtcgccggtgcgcaccgtcgcgctgaggacggcgacgtcgcgggacagcgcgacgtggatgccgtcggtgttggggctgtccgccggcgccgcgatccgcacgccctggagcgtcacgccggcgcagtcgaagatggagacgtgcacgttcttgctgtccaccagcgtcacccgcttcaccgacacgttgttcgactggctgatgtccagcgtctaaaagccaaattcgatcaaatttacgaacaaattcaaacgtgaaacacagtatgggtttgaatatttgaaagaaattaattactgtggtgcctggtgggcagcggcggccggcggcggccttgcacgcccagaaggcgtggccgttgccatcgagcgtgccgccgcggatggcgaggccgtgggcgtagtggaacgtgatccacgacgcgttgccgacggccggcggcgcgacgacggtgccgtcgatggcgagcaccacgccgccggcgctgcggcagggcccgcggaagtacgcccgcccgaccaggaacgtccccgcggggacgcgcatcaccggccgctcgccgtcgtcgccgcacgccgccgcccacgcggccaggaacgcccccgccgcgtccgccctcccgcccgcccgcgcgccgtagtccaccacgctgtactccgccgccattactgacgccgccgccgcgagcgcgaggacgacgccgaccaccacaaccaccgtgatgacgctcatctcctctgctcgatctcaagctgatcgagagagagggagatccagagacgggatcggctgcgagattgctcgtatttaatggcgatctttcttgcatttgcgttgatttgcgggcggcgcggccatgttggggtgcctcgatcggagtgcgtgtgatcggctaggtaggagtgtggggtgaaggattgcgcggcggcttcgcgcgcttcaatggcgggaaggatcggatgcacggaatggaatgagattagcggccgtacagaatgccgtggtgtgtacggattgcttgccgtacagatgaatgtgtaggagagacggtttgaccgcgggcgacggaaaattgttcgtgattatgcatatttgtggtttcatccatgatactaatgtgtctttcaaaatactctctccttccccctaaatgtttgacgccgttaacttttttaaatatatttgaccgttcgttttattcaaaaacttttatgaaatgtgtaaaactatatgtatacataaaattatatttaacaataaatcaaatgataggaaaagaattaataattacttaaattttttgaataagacgaacggtcaaacatttttaaaaaaatcaacggcgtcaaatattttgggatggagtaagtatagtagaagtgttatattaataagagagtacttattttttgaatgggctgacatttcttagctggacgttctgctatggttcttttgtaattgtactgagcagataaattacttaaaagaaactagcactatatatcatgaagaaatgaaaacatacggtatagttgtttaatatagtataggaggaattagattactttgtaatatatattggattcgttgtattgagtcctgtatatatgaccagtatatatagagattatatggatagagataagaaaggataggatacaatcaatcctatcgtattacaaatttaactatcatatactttagtaatataatatattctaatagtatataattgaatgtgtcaaacaaatagggcttatgatcttgattatgaatcgaacaactatgtaaatgtaggaatgatgtgatctgacttttgtgtgttgtccatgtacaagctatacctaatgagtgcattgaaatatccgattgctaaaaataacgaaaagttaacctactgccgcttattcgtgctgtttgtactctactgactggtcattcgtctggttaatttgctacctactttcttccttcgtcctaaagtgttgttatttaagattgtgatccaaataaatctttgatttgtacttcatccaaaaaagaactcaacataatataggataatataggatgtgatctgtccatattcattttactagaagaagtcacatctccatctacaagcataggtatctttgataatagtgttttcattatcttgatgagctcctctttatttaggcttacgagccatcttattaaaaaaaaaagagaataaagcccaaacaaataaacaacttaatccgatgaataggatggcaggaaaggtatcatcctaaatgaacttatcatgattcatgccaaattaatacttagtcacataaaaccccggccttaaactactaatccacagaaaataccaaaaattgatgggcggatgcgtgcatgtttcttttttttttctctcccaccgcattatcctcttctgtgtaagcagaaattttatatggccaattctgattcagaattgaaagtttcttagggcattctcaatggttaaggtcactagagcaataagatgggacccacattcttatgttcttttgtatataacatatgctacaatatatatagctttttcttgatattaagctgggacccactcatgaaaaaactctattcaacataaagagcatcatgcgtggtgcaaaaggtatgaaatatttttttatttcttatggtctaaccttaaggttggttatagccatatttttactttctcctctcccaatgcataaaggtagaaaaaatactactttattctttaaggtggctttgcatgcaacgttgtggatgcccttatggaaaagttttcgagaataacgatttatgatagacttgacaatcccaagccaaaccatacacatttatgtgtgcaccggggatgcaagtgtgcttctttttctcgcttatcctatctatatttttttttctaaaatttatattaccatgtaaaaaataaaccaccaagcatgtttttatatggagagtagaactgcccatttatgcatttgtacgtgtttttatatggataatagaactgcccactttcatggctaaagtacataaacattcgccaatctatctattatataattaaaggaatagaaaaagaagcctccacggtcgctcttatggcctagaaattctcatattaatcggagaaaaagaaaaaacagagtccatatagaaatataatttaaaaatagttgaaattcgaaattaaataataaggaatattaaaagaggagactagagtccatatagaaatacaatttagaaatagttgaaatcggaattaaaaaataagaaatattagaagaggagactagagtccatatagaaatacaattaggaaataactgaaattcggaattaaaaataaggaatattagaagaagagactagagtccatattaaaatacaattaggaaataactgaaattcgaaattaaaaataaggaatattagaagaggagactagagtccatatagaaatataattagaaaataactgaaattcggaattaaaaataagaaatattagaagaggaggctagagtccatatagaaaaacaattaggaaataactgaaattcgaaattaaaaataagaaatattagaagtagagtatagagtccatatagaaatacaattaggaaataactgaaattcgaaattaaaaataaagaatattagaaatagagtatagagtccatatataaatacaattaggaaataactgaaattcgaaattaaaaataagggatattagaagtagagtatagagtctatatagaaatataatttacagaaaatttagaattttttaaaaaaatatattaaaagacgagtgtagagtccatataggaatatatataatttacaaataactaaaatttgatattaaaaataattaataactaacacgtatataaaatataatatgaatattacacattagtagttttataaagttattgcaaaatttaaaattatgttgtcattttaatatatttgaataatataatgagaaaacatatatgctattatatgagaaaaaaatataatgataatagcagcgtaatctgtgcgggccaccatgctagttatataaaaccaaccaaatttagcgtaataacaaccattcatcacagcttacctcacccagaacaaaaaaaaaacaaacaaacaaacagctgagctcctctttttgactgaactatcacaatccaccatcagttgactaacccaaaccatcatcatccaacggccctccgccctcctctccacatcgtcatcacatcaaatccgtcgcaccagaccaaagcaccccaccccactccagtccacgctccaaaccctcacgcccccacctcaccgccgccggacggcgacccctccccggccgggatcggcggccaggcgagctcgggcgcccacggctagccccgatcttcggggatccacgcgcggctcggctgcagccggcgagcgcgaggtcgactgcgggggaggccgcggcctaggtgtacgggatcgggcggcggccgctgcgacggcgagctctctcggctgcgtgaccgccggcgtggtgcgggggactgtggtattctctttacctccaccggcctctcgcgacctagctgtttcttggtcaaagtcaaacctcctcctgattagctctgtatttagctgttcatagtgatgtcgatttccgcttttcccctgatttgctctgctgctagtatcggatcgaattcctgctgacggggatgctcctgttttgctcgttaggntgatccaggttgcatgttcctagtgctagttggttgttgaccccattggtgagagncttttttcatgttaagctgtggtttctggtcgatgaccaaaaaaaaaagaactcttgctgttgttatctttcggttccagcatttattttgtatagatccatggtgcatttaatccacttgcctctcatgccttgtatatatcttaaataagtttggctagcaagaatgatgtacttgatgcctcgatgagccacagtatcaatgtgtgtgttacgtgtgatttagctatagtctgatgtgctacaaatctaaacgttagttcttatgcattggtaaactctgtatgagtattcttgtgaatgttcacactattttctcttatgtttccatgtaggcatccaagagcttcattctcaagtttggatgttgaaggggttcaggaagtagagcacaccaggatgtctgtcaagtgttccattactattatcatccaacttctcttctgctatatgctttgtcagccatgctatggcacattaagtgacatccaatgcctaaagagactgaaggaatcagttgacccaaacaataaattggaatggacatttactaacactactgagggatctatatgcggattcaatggcgtggagtgctggcatcctaatgaaaacaagattctttctcttcatcttggcagcatgggtcttaagggccatttccctgatgggcttgagaattgtagtagcatgacttcactggatctctcgagcaacagcctttccggtccaatcccagctgacatctcaaaacagctgccattcattacaaaccttgatctatcttataatagtttctcaggggagattccagaatccctagctaattgtacttatctaaatattgtcaatttgcaaaataacaaattaactggagcaatcccagggcagcttggtattctatctcgcctaagccagtttaatgttgccaacaatcaactgtcagggccgataccttcatctttcggcaaattcgcgtcatccaattttgcaaatcaagacctctgtgggagacctctgagcaatgattgcactgccacttcaagcagccgtacaggggtcattattggttctgctgttggtggtgcagttataatgtttataatagttggtgttatcctgttcattttcttgcggaaaatgcctgccaagaagaaggaaaaggatttggaagagaataagtgggcaaagaatatcaagagtgcaaaaggagcgaaggtatacttctcattttggaattgtggtgtatttttgagcgtgcacatctatctatttgaattcaccttgttactcttcccaatttatgaaacttggttattttctggtggtggcagttattgtcttttccaatcacgcttttgttcttgggatttaagaattaataggtgcctgtacttgttcagatgttcaaaaattgtgggtattggttaactcgctaagcatactaacatattttcatgccacgaaataaccacttaacaaagattttattgttatacaatctctctttcgtaattgatggtatattaatgtccaaagcatgtttctattttcccaatctgttatcaagtggcaccctcttcccagttcccacccatctctaaagaaacttaattgtatattttatcagtacagcgcttagggatttatttttagcatcagacctgataatatttgattagtcagcacattcacctacagaaacagtattgtttgatggattttcaacctttttttttattcaggtatccatgtttgagaaatcagttgcaaagatgaagttaaatgatctgatgaaggcaacaggtgattttactaaggataatattattggatctggtcgatcaggaactatgtacaaagctacactcccagatggttcattccttgctatcaagaggctacaggatactcaacattccgagagtcaatttgcatctgagatgtcaacattgggaagtgtaaggcagcgcaacttacttcctcttttaggctattgtattgctaagaaagagaggctcttggtatacaagtatatgcccaagggttcactctatgatcagctacaccaacagactagtgagaaaaaggcattggagtggccattgaggctcaaaattgccattgggtctgctaaaggtttggcatggcttcaccacagttgcaatccccgcatccttcaccggaacattagttcgaagtgcatattactcgatgatgactatgaccctaaaatttctgattttgggttggcaaggcttatgaaccccatcgacacccacctgagcacatttgtcaacggtgaatttggagacttggggtatgtagctcctgagtatgcacgtaccctcgtggccactccaaaaggggatgtttatagctttggagttgtgttgcttgaacttgtcactggtgaagagcccacacaggtgaaaaatgccccggaaaacttcaaaggaagtttggtggattggataacatacctgtcaaacaatgctatccttcaggatgcagttgataagtccttgattggaaaggatcatgatgctgagctgcttcaattcatgaaggttgcatgctcgtgtgtgctttccgctccaaaggaaagaccgacaatgtttgaggtttaccagctaatgagagcta

SEQ ID NO: 18123 - DNA, 32541 bp, Oryza sativa
  unsure (1)..(32541): unsure at all n locations
gaatggaatcctgctcagtatattttttccagcaattgcactgctgagcaacactaggtaaagctgtaagctccaagatatgcatgccatttggtttgtaagatctgtatcaattagccatgttaaaactttttctgtacattcttgccttgctgtgtactatctctaggattggcatgtcctgctgttgtaagatggatcaactgtatcagcatccgaatttagttgtagtagctcttagatttagcaatgttgaacagtactactgggttgttgatcctccacatttttttcggtgcgttcctttgtcatttttgttagttaatgtggagtgagcccctacaataatctgatgagatgtgggattactggtttctttggtttcttggtgagtttcagctaccgagttggtagttatcacccttgtgaaaagacttttagtcttcatgtctttgtttgcatgaaaattaccacgctaatatcagcattacaatagctagggatctcgaaaggaagcaatctgttatgcatgcacagcagatcaagaatcaatttaagagtgagaactaagatctaagctcttcaatgctgacaagtgacaattgcaaaatccgcatcaagtaacaaatccaacagtttcagtttcatacccctgaactgtattatacggattacggagtgttgatattactgaagaaaatgttgccaaaaatagcacattattagtgtaggataatttgatgtcacctcttaaactgaaactacatgccagtacgcagtacgcagacattagctcaatcatcgcaatacgtatcagtattagagaattggttaaattcattgcaatatatgctgcagcctaggagaaacaaaaacttgtgaaaattttgaggaagagataaaacagacaatagaagaaatatacactacaaatattataatggcattgtcaatgaagttggagtattagttgccaagagaaaaaaacacacacataatcagccatggagtaccattttcctatcggtcggcagatgagacactgcctgcaaaatcaggaaaatagtactctccgttccatattcaggcatggaagaaatcaccgtgttgaaaaacactttccttaatttcactggcttgagatcaatcgtgtggatatcgactcttttattttcgttaaaatgaaaactacctcagaagcatgccgatttggatgacacgacctgaagagcctcatctgttaccctagtaagtcaaagccaaaaccaaaatttaaattttcaaacttaattttgaagttaattttaaaatacttttaacgcagcttgtttttcagcattggctttaaatcgctaagaacacacaaaatttttatctataaattaatttttattccctaataagggaaaacaaatatgagcaaccaataaggaccaaagaaatggatgacacgacatgatgtttggcaaggctccctaagaactcgagatttggcaaccaaatcacaagcacaaaactggcacaagctcgagtgctggacgtgcatttgccaaaaagaaaaaggaagaacatatgtaggtccaactggatgtctgcagataaattattccatcggtttactgctacagacgccgcgagaaatacaaagcttgaacacactgttttcaattcacaagcaccgcattacacgactataattggagaaaaaaaaaggtggtacatgtctcacgctattgcaggtgttatgctggaacaggaatacaagcttctctcttgtttcataagttaacaaatccatcacactgcatgatggctggcggcacaggggaacggaaaaaaaaaagaaaaactagtaagggcgatatcgccggccatgactcccttcaccacctcggctgccaccatccctccggtcaccgcgtcgcattggtggtggagggggaattccaccaggctgttgcctatggacattggaaacaaatcgtgaggaatggagatggtatgctaaaaaattgtctagggcagcagaaaaattgtcttacagaacatatccaagacgcccgtcagggagcaccattgggaccatcctcattccagctggtgctggtcctctaccatagatcataggctgccaaaaaaaaggagaaaagtccataaagacagactacaatgtcaatatggtagcctacaaatgtttagtttggtttacctggttgaatccaggaccaccaccaccataagcaccatatggatctcccatgtagccaccataaggaggaagtggaaaatttggagctcctgctggcttgaacgagtgatcaggtttcttgtcacccaaaggtttggccatggatacttccagcacttgccctgtgtttcagtcagagcaagattaactctagttctgatgaacaaaatttagaagtagccattcacatagtccttggcaatgccagtggttccttgatatccaaaactaacaagttactaatatacagtgtaacagtgctgactgcaaaggtcctgtaaaatcatcagagcaaatgatctaaacatatctgctttccacaggaagcaactacctaaacaaagaataccaagttccataaataatgataaatgataaacaaggagaaaacattaccattaaattcatatttttcgcttcctttaactgccttcagtgcacttgatctttcagcaaagtgaacaaaaccaaaatctctcttatgcccatccttagcaggtggcaaaacgacttttgtgacctctccatgcttttcaaaaatctccttaatcttctctttagaagcattttctggtaagttcttcacatatatagtcttcacctgtaaaggaaatgtcattcagacaaaaatttcctaggactcaacaaaaaaggtgatatgacatatcaaagctaataatctctgtgaatataaaaaattgacaagctaaaagtgcatcacataaggagaaaccatcgaccacataaacaaccttgcacaggcattgaacgagtagaccaacttcaagtcaacctaactactatgtcagattgttttaatgtacagacaacaagcaattactggttatacatcccctactgtaccatgtagaaataaaagtaagaatgcgactgggacctagaaatacatcagcaaaaagatggttattctggttcagccatggtaaccagtaattatggttcacaaaatcttttaatgtcacagattaatgtttccttattcatttgccagttccttctctagcaaacattatatggcataaaggaagcaaattcagtgcctcttttccaagtaaattaccctaatagattcgcaatattgacagtttttttcctaaggggttctacttcagtgttcatagctgtactccgtacattgaagcataaattatgctgagtttttcatttacagtgtgccaactgagtggcccgtgcactgcaatgggatcaaaacatttcaaagctaatactaaaatttaaggtagtactgcatgtttcatgtgtaagaaaatgtcatcaatatagtacctgcaagaaaaaaaaaacacaagaagcatagatgcatggacagacaaggttgcatatgaactcttggtgtatgaatgaaatttagggttcaggtatatatgtctttaagaaaagtgattgaatcatttttcttggaaactacagcgttaagttctagacaaaacaattggcaagccaaagaccactgctaaagaagcaatgcactgattattataatttcacacttctgactgctggtgctcaccacaccaaacatgaagagtccaacttcaagaaaaagtaggcctctttccattcagaccacctccccatttgctaaagaaagacccgacaacttcaacacaacaaattaagaagatactgaatgatctaaaatctgttagtcttgactcttggagtattttctcaagcaccttgtatgcatacataactgaatgctattatccaaggcaattccttgtttgaatcccctggcagcaacacaggaaccaaaagaggaaaaaaagtcagcaaatgtcaccatttcaatggacggctggacacgagtcnnnnnnnnnnnnnnnnnnnntgctttctcccacttgccgtgcagccgttcccctgcagcttccttgagctgccatgcacatggcccatgtcacattgccgccttttgttgtgctcgcgctagtgggctagcgtgtaggagggtggtagcggatgtaaaagagggtgagatggtagatctgtgggtaggtgatgccagttagcaacttgaggtcaagcggccaaggggaagatagcagtggggcgtggtgcatgcaacagttgggggcatggggaacatatggtcagtatcggcacggcttgggaggcgccaagcacgcaagcattccatccatagagcatcgatatcggtagggtgtcgacctgtactgaaggcgcaatgcgtgaggcaggataaatgtgtgcgagaggaagataatggattaatggcatacgtcaggtgtgggatatgatcacgagtggagatggggaaacagtttctgcgggacgtgggggcagatggtttggagatgatgtgctggtgcttgattttgttcatgatgacagaataaggccacagcacgacattgcacgccgtgcacaatgggaaggacatgtgatggttggggcggaagggcagagcaaactctgctttttatagtagtagagataagggtactaatggatggtagattcaccaataggttttcttttcatatagtaaagatacctgggcagctgcagaagaagaatctgatgaacccttaggttcagcccagctgacggtcaattggctaccatcaaccttaaagtttggtgctgacaatttctgcctggcatagtctgcacaagcgtggttataatactcaacaaagaggaacccacggttacggcttgggtcatgtaaatcctgcaggaccaagagaacatctctattagcaaacttgggacctttgtcgtacaaaatacaactgtgaaatcaaaagacacaccttgaacatctcaatgttgacaacacctggccccttcccttggattatctttctcagctcctcctcacccaaccccttgggtacattaccaacgaatagcctgtgctttgcctgcgacagtgagcaccgcagtgtcctcccctgcaccaaagaccaaaccatccaatgtaagcacatcatacgtgatagaacaaagcctcctctatggcgaccaacagagctacaaggtaataccttgtgttctttgtcatgcagttcctcgatagcacgctgagccgcttccttcgcggtgaagttgacgaatgcgaatcctttgttctccttggtctctttatccttcatcaacctcacctgtcatcgatccatccatggcgtcatatcaaagttgcattgtgttacaggccgggcaaacaatactgaaaaagaagatgctgatagcattcagatacctcatagatttcgccgaacgagtcgcagagctcacggaggtcctcctcggtggtgtcgcgggggagaccgccgatgaacacctcggagccctgaggcggcagagcgagcagctcatcccacttccgcttctcgtcatcgtcctcaggcccatcgccgccgccgccggcggccttgtccatctcatgcgctcctccttcgcccgccgcggtccccgcgtctccgtggccatcgccctcgacctcgggatcctcctcgtcgtcgtccggctcgtcggagtcctcgcggcggcggcggcggcggtacccgtcctcgtcgtcgtccatgacgtcgttgtcgtcgtccccctccaggtccacctgctcctccggctcctccgactgctgccggtcggacatccccaaaaccctaaccctagaaacgaaccagccaccaccacatcaccaaaaaaaaatcagaaatcccatcccaaaagaatcccgcaaaacccaaaaaaaactccagatctagaggagaagcttaggttaaggaaaaaagatagagaagaaagaggaggaagagctagagggaggaggtgcgctcaccggcggcgaggatgcggcggaagaagcagctggacggcggcggcgctgagcacgcgaggaggtgacgcacgagagagagagagagagagagagagagagaggccttctgctgatcacggcccaaatagcccaatcggctatcagtcaaaactttcacatgttctctaaaatatttttattagctacttcttcacttgttcccttatttatatctcatcaaatcatagccatctcctatttaattacactcttcatcgttattctccatgaaattataaagtgaaaggtaaccaaacaattccaaagtctaaagataaaacaattccaaagtctattgataaatttttgtacaggacatcgtgactttgtggttttagctttaggataccgcatgaaatcactttggtaaacacactccgtacatatggttatttgtcacgaacactccatccattaaaataatatttttgtgctaactagacacttttttacatggtttagaccaaattgcctctcctttctctttcgattcctctcttcctccttatccctttctttctctccctccttcatctcttctccgcggtgcgtgcgccctgctcggcggtcgcgcccggagtgcgtgtggtctgctcaacgatggcagtggcgctcggagcgtggatggcgacagcggcggcacccggtgcgcgtgcagcctgctcgacgatggcggcggcgctggaccttcccggcatggccaagaatgcggcgattgtggtcgccgtctagaatctccccggcgtagcgaggagcacagtggattacaccgtagaagcctcacagtagtggctggtagtggtggcctcctgcagggccggtggtgaaggcgtggctctcctccatgctgcttggcgaggagcttgagctgctctgggccaagctggtcgtggccaagaaggaggcggcggggaagaagcgggtggcggtggaggagctccgccggcgcgttgactatgggcgtgacgagttgcagcggctgcggtcagatgtcgccgcaccgaggaaggagaagcacgcgttggagcagcggtgtgctggcgtggtccgcggctgctgctgccgccgagcaagccgcgtgcgctccgggcgccgccgccgctgccaagcttgtctcccgctgtgaccagccgtctgccgcaacgcctcagcagccgacaccgctgtgctcttggccgcttccaggaacatttcgacaaccacagggctcaccggccagcaacacgtcgacaacctcaccggagaagagagaaaggagggagagagagaaaggaggagcaatttggtcatgtaaaaaagtgagcctcctcttatgcccgatccaggtggctctctcaacggtggcgtggttatcctggttggcaatggcagtgaggcggcggtccacggtggtggcactgttatgcttgatgtccgcgtggcagtcccagatggcgacgtggcggtccatggtggcggcgctatgcccggtgtcggcgcaacagtcgcagggagcagcggcgtggaggtcacgggaggtggcatggggtccgaaggcggcggcacggggtccgcaagtgacggcatgatggtcacaggaggcgaggaggccgcaagcggcgaatcgacgatcactgggggcggcgaggaggccacagttgccggtccctgaccgtcttcattgccgtctctcaggtgctgccgacaatcacccgagaagacccgatgacatgacctgggtgtgatggcacccagatcgtcacaccctcgcatcaccccagccccgccccatcgcgccctcccgacgcccattttgggaatctgcctatcctcctaggataggaggaagggcactgtggagaggagaaaggggagatggcggtgccggcatgctgctgcagatgaggggccagaaacaggtcaatagctctgttctattgctagctactccgtaccttgtttctttttttcttttacttactatatgacaaattgattaatctccctgttgggtttttattaattctgatggagggaagtacgttttgttttgattgataacttttgtgccatgtgatttgaaggattactttgctaaatttagggcctcatcctttggctttttccgtaataagccaaaacggcttattagagaataaaaatgaatttgtaggtaaaacgtttatatatgtgttctggtgacttaaaagccaatgctgaaaaagaaactacgttgaaaatatctcaaaatcaatgtcaaaaaaaaagtttgaaaattcaaattttagctttttctttggctgaataggccatccgataggagccgagcaattgcataaaattcaaaacggaggcttgcagtactatcactaattagagaacagaaacagatactacaatatagagtgagagttggtgtacccttgcaaaagtccgatgataatatggcattatgctcaatgaatcctttattcagggataagtaatttgggttggataatcaattctaagaagtgtgtctatgtactgaataccattttaacgagggagctgtgagggtttttagaattcaattctaatgaaatcaaagaaaatctcttgaagatatttctcaggttattgttgccttttgtgtccttcagagatggatattttgtactcattgtgtccttcagagatggaaatttgagtcaacacaaaataatgttgtctaagcaaatggttgtctaaaggtaagatcgtcttttcatacaacttaacggagagttgttaataacaagttgacggtgatggtatttttaggaagttacttttgtcgatgacatttataggattagggtgcttatccatgaatatatatatgttaaaaatattgtgcaaaataatgtgaagggagatgattggatgttgattcgtgaacggtattgctaaaaaaatgtcgcaagttttttgggcaaaagactttcaaatgtggctatagtatagttgtaatggaactacaatgcaattacggctatagtatagttgtaatggaactacaatgcaattacatcgtagttacaatagtgtagcactgtagctacattgtaatctctatataagttagatataaagttgtatatattattttaactagcatggtggcccccgcagattgcgcggctagcatcattatattttctctcgtatatgttttcttattatattattaaaatatattacaatgacaacataattttaaattttgcaataactttatgaaactactaatgtgtaataactactctagtctcctcttctaatattccttatcttttaattccgaatttcagctatttctaaattgtatttttatatggactctgctttttctttttctccgattaatgtgagaatttctaggtcataagagcgaacgtggagactccttttttttctaaattttagttagtgttaaattcctatatggactctatactctacttctaatattacttattttttaattccgaatttctatcttttttcttaattgtatttctatatggactctatactctacttctaatattccttatttttaattccgaatttctattatttcctaattgtatttctatactctacttctaatattccttattttttaattctgaatttcaaatatttctaaattgtatttctatatggactctagtcacctcttctaatattccttattttttaattctaaattttagctatttctaacttgtatttctatatggactatgttttttctttttctccgattaatgtgagaatttctaggtcatgagagcgaacgtggagactcctttttttctaaattttagttagtgttaaattcctatatggactctatactctacttctaatattacttattttttaattccgaatttctatcttttttcttaattgtatttctatatggaccctatactctacttataatattccttatttttaattccaagtttcagttattttctaattgtatttttatatggactctatactctacttctaatattccttatttttaattctgaatttcagttatttcctaattatatttctatatgaactctagtctcctcttctaatattccttattttttaattccgaatttcagctattcctaaattgtatttctatatggactctagtctcctcttctaatatttcttatttttaattccgaatttcagctatttttaaattgtatttctatatgaactatgctttttctttttctccgattaatgtgagaatttctagaccatgaaaatgaacgtggaggctcctctaatattccttattttttaattccgaatttcagctatttctaaattgtatttctatatgaactctgctttttctttttctccgattaatgtgagaatttctaggtcatgagcgcaaacgtggaggctcctttttgttacgaattttagttagttttaaattcctatatggactctatactctacttctaatattccttatttttaattctgaatttctattatttcctaattgtatttctacatggactctataatctacttctaatattccttattttttattccgaatttctattatttcctaattatatttctacatggattctatactctacttctaatattccttatttttaattccgaatttcagttatttcctaattgtatttctatatggactctatactctacttcttatattccttatttttaatttcgaatttcatttatttcctaattgtatttctatatggactctagtctcctcttctaatattccttattttttatttccaaatttcacctatttctaaattgtatttctatatggactctagtctcctcttctaatattccttattttttaattctgaatttcagctatttctaaattgtatttctatatggactctgccttttctttttctccgattaatgtgagaatttctaggccatgagaacaaacgtggaggctctttttttattcctttaacaatataatatatatacaagttatattatagttatagtggaattatattacaattatactatagttagatttgaaagtttttccaaaaaaaacttgcgacagtttttcagatagtcccgaattccatgaattggtaggtgatgttgcatacttgcatgagtttgttatctttgcatgttgagccttaggatttagtgaattttaactttatagtaagataggatgcgcctaatctaacctacatgtgtgtatgtgaaatgtaatcgtaaatcaatttttatgctgatcatctatttatcttattttgactcgtatgtaatttccgacataaccagtttcacaaataattaagtactcgttaggtaatataactggcaggaaagtaaagcatgaggcaacaagaataacattattcattgtttcataagcattgttttgctgtatcaccaacgccacatacagagttttgagagaattttataaacaatattacaaatgtagcaaaccaaaaataaaacatcagcttctgacttcaatactgtagcataccaaaatgacaggaatgtgaaccgttcaattcagaccatgttaaggaaatctgacttataagttttaccaagccgaaatctgagcttcaagacaggccattcacctatcagcttggtaagaacgggcaacagtgctgggacaaggcaaatcacaatggccaaccaccgaagacgagcgactaaaaccgtgtacaaactgtcgacgggggatactcgtagaccggatatagagggtattggggtacgctggtattaggatctacgtaatactacatcaagcaaatggaaaacaaagattatactggtttaggccccttgataggtagtagccctaatccagttgatatgagattatatgacggaaatcacagattacaaagggaatagtggaactcgatgataccgacgagatcgtagtcgaattggttcaactagatcactcggcgacttggctcctgtaggctctgactttgtaagctatggtggatgtgttggcggtgagattcgagatgccttaggtcctctcgggggtcccttttataccgctagtcagttggtctccaagtaggggagacatcggaccctacacgatatagtgacgacccagttctgtacaagtaggactccttccatctgtggactccgtgatgaatttccttaacgtatacagaaaacgtccgtatacgtgcagatataccatatctatacacgacgtatatccgagggtagagggtataccttacccgtaaccctgacagtagcccccgacttctgcttaaatgaactcatgtaactgatcgcgacttccgatgtcgaggttgttgtcgttttcgcctgatcgatcttggtatgagaaccgtggagacaaagagtaatcgacaacaccatgcgaagttcaacggtcatgagtgaatttaaattgaagtccgaaaaactgccgcgcgtaacggacccagaaatttccagcggtcatctctcctttccttggaattcgcaccatcggtagtgcgtctatttaaggaagttttggggatccattttgaagtccgcttgttgcgaaaaactctccagcctccaagcgttcctcttcttctccgctcccgcaaaaaccctagcttgctcatctcggtcctttctccggcgacctccggcggtaatggatctcgacaagtctacttctaccagtgcgtcgttgaagaagctgcaggaagacggcgcccttctcggtcacgggaccatagagagaagcaggaggtattgaacccagcatgtcctgggccgcatggtcgcggtcgaggactatattctctgtggttttcttcctccgccttctgagtttcttcttttggtcttgaatttctacggtctttctttgctccatttgaaccccaattccatcgccttcatcagtatcttttcgcatctttgtgaggcctacattggggtagagccgtttcttgacctctttcgtttctactacgaattgcgttggatggaatccaacagggtatctggatgcgttggtttctgacttcgggatggcctgaagtcgcgctatatccccttccagtgcccctcttctcatagtaaatggcgggcgaggtggttctatcttcagatagaaaacttggatccggtcttcgttgttcctgaggaacagccagacaagatttcgtcttggaccgccaaatccgccttaaccccttcccttcagtccttcatcgatatcatcaatgacctccgaatacgagggttgtcagggtatgaagtcactgccgacttcattggtaggcggatccagctgctccaggctcgagcccacccagcctttgactattctgggccggaggacgcgacccaggtttctcctcggggtatttttcttgtattttggattctattcctgacttatcgaattctggttctcgatctacaggtttgaaccgcgaaaccgtggagcgccgtgtcagccaagtgatgatcagcggcccgacaacgacgagcaacgtccctgtccccctttgcgagaaggggacagccgagcgtgaagccgcaatcaacgtgagtgtagtcgacgacccctttatatttttcttcccgaatcgcatagtgacttcatatggtgcaggctctccctctgactgacgtcatcgggccactcgtggaccaccaggcgacgacttcgttgaaagagggcgtcgcccaggaggcgtccaacgttgctgctgctgctacgaccagtggcggcaatgttccgaagagggggagtaagttttcctccgtgctcggtaaccgtcgtaaggcacccaccccatcggtaagcccctttggtcattcatcgcgtagtcgaaagatattgtcctcacatcgtactcattttacttaggcctcggatgcgtctcctccacttccgtgacggcagaggctggtgacacttggcgagaagtaagtagacgaacttgaggtcttgttaatccatcgaactttggtagcctgtcttgatggcaaactgcggcaatcattcatagggctgtgcgggcgaaggcggcgcaggacgggtctggaggaaactccagcacgtcccttgcagcgacttcgacagatgtcgtggtcgcaccgaggggccgtgaggcgacgcccagtggtcctgccggtggccttgtgcctgctaggggcccgcacgccgacgtcctcacctagggggagctctagatcgagatggagcgtatcctccaggccggtgctcgtggcatagggcacaagatcgaagaggcgaaggcggcggcggcgtcgtcggctaatgaacgcaccgacaagttggcgcatgacctggcggaggtccgcgaggacctccagaagatgaaggagctggtggctggcaacgagcggcagcggcaggggctcgagcaccgcatgttggagctcgagaacaatttgtcagagatccgtggctcgctacgggttacctacaccagcttgcatcagctagccggggagtgcggcgtcacgaccaccatcccggcgaatcccgatgagttctcgctgacgacttcactcgcggaaatggccacggtgatggaggagatcccctccaagcatgcggccaggatcagagaggaaacgtccaacgggatctacactggggcatgccacgtccttgcgtgcgtaaggttggcgcaccctgaactcgacctccagaggatcttggatcaggggacggctaacgatgcgcgtaagggcgtgatggaagaagtcggtgatttgggggagtctgttctccccctttttgaagagtaggacttcagtttccctgtactccttaattagttatgctttgtaaaacttttgttggctccaactgcctttgtgtgtgcagtcatcaccttagttttctttagcattttgatcccgagtactttgttgtttgtagagatgtcgatgttgaggatgtccagcagcgcgggcagcctgagttgccagtgatcgttccagcacttgcgttcgagccgtatgtgccgtaggacgacgtagatcagaacttgtccgtggaaacgggcatggcgacgacttccttaggttggtcctttttgttttcatctcctttgatcttccgtctggattgacttaatttgctgtgttctcgagagagaaaggcagcttgacttagtcgtttccatgctgagcagacctcgagagtgcgcttgccgaccgagatcgtcgcatctaatactggaggacgaagtttgaggtggcagaactcgagaggactatgttggaagtgaaaaaggactgggcactttggttgtaatctgtacctgaaaataggctttattgaagctgtaagatgtcttacaggtatggatactattgatttatacatagaatttacgtaattgatcaatgttccaagaatttgctaactcgcgaccatcgccgtctgcaatcttgaatgcgcctggccgcaagacttgcgtggtcgtgtacggtccttcccatttgggtgagagcttgtttcgccctgcttggctttgaacccatcggaggacgtagtcgccgatcgaaagcgtgcgcgctcagatgcgcttctcgtggtaacggcgaagggcttgttggtagctggctgctctgacggtaactcgttctcgatgttcctcaagtagattcacatcgtcgtttcgcttctccttctgatcctcatcgaagtacttctgtactcgtgtactatgatgttgtagcttggtggggagcatggcctctgagccatacacgaggaagaagggtgtctcctggttagacgttgtcggtgtggtacgcacgacccatagcactaatgggagttcttcgacccacttcttgtcatgtgacatgagcctgtcgtagacacgggtcttgattccttgtagtactatgccgtttgctctctcgacctgtccattgctctgagggtgagaaaccgaagcgaagcagatcttgactcccagcctgatgcagtaatcctggaagtcggcactgatgaactaggagtcgttgtccgttatgatgcggtgaggcaatccatatctgcagaacatgtcggccttgatttcccccgtgggtgtcgcttcaattcacttagtgaatttgtcgatcgccacgaataggaacctgtagccgccctgtcctcgtgggaatggtccgagtatgtcgagcccccagcacaagaacggccaagtaagagggatagtttggagcgcttgcgctggtagctttgtgtgtttactgtgaaattgataggcttcacaccgctgaaccatgtcacaagcgtctttgagggcggttggccagaaaaacccttgtcgaaaagcttttccaaccaatgtacgaccggcggcgtgtgacccgcagatcccttcatgtatgtcgaggaggagatgtccgccgtcgtcgaacgagacgcatttgagaagtatcctatttggcgccttcttgtatagatcgttgccgatcatacagtagatttttgcttgacatgttattttctcggcttctgcatcatcctcgggcaactcttcgctgcttatgaatttaatgagtggggtccgccagtcatctgtggtctcgatatcggcaacggcatgctctgcctctgtagcccccgagctgatgtcgggggcgactgggctatcttcgccgtttgcatctttcactaatggctttgtcaggacgtccagaaaggtgccgggttcgagtggctctcgtctggacgcacaccgtgctagatcgtccggctcgatgttgaccttgcggtatacgtgtcggacctcgatcccatcgaatcttttttctagcttcctgacttctgcgagatacttggataactcgggattagagcacttgtagtctttgtgcacctggtttgcgactagttcggaatctccttttacgatcagtcgcttgactccaagtgcggctgctgctcttatcccagcgagtagtccttcgtattcggcaatgttgttggttgccctgaagttgaggtggatcgcatggttgaactgatctctcgaaggtgatgtcaagatgaatcctgcccctgctccctggctgttgagtgcgctgtcgaacgccattgtccatgtttcgttattggtttgactgtttgacctattttcaggtatagtccaatcggctacgatgtcggcgaggacctgggacttgatggctgttcgtggcacaaagtggacgtcaaactggcttagctcaactacccatttcgcaatgcggccgacaacatctttgtttctcacgacttcaccgagagggaaggaggaaacaactgtgaccctgtgggcctagaagtagtggcgtagctttcttgacgtcatgattactgcatagagcagtttttggatctgtgggtatcttgtctttgtgtcgtggagagcttcgctgatgtagtagactggtctttgcaccttctctctctcgacaacaatgacagtgttaacggagtatggcgtggcggcgatatagagaaataattcttcattaggttggggagcaacaagtatagggggatttgacaggtagcgcttgagtgcgatgaatgcctcttcggcttcctgtgtccgtacaaatttgccttgtttcttgagcagagcgaagaagggttgtcctcattctcccatcctagcgacgaacctgcatagtgccgccatgcacctagttagcttctgtacttccttgagtcttgtgggcgacttcatgttctcgattgcctggatcttctcggggtttgcttctattcctctgccagagacgagaaatccgagcagcttgcccgatggtactccgaacgtgcacttctctggattgagcatgaggcgatatcgtcggaggttgtcgaacgtttcccgcagatcgtcaatcaatgagtcgcttgtcttggtcttgacaacaatgtcatcgacgtaggcctcgacattgttcccaagctgattgctaagtgccccctggaccgtgcgctggaaagtgtttcctgcggttatcagtccaaacggcatcttaacgtagtagaataccccgaacggcgtgatgaatgctgtcttctcctcgtcctctttcgccatgctgatttggtggtagccggagtaagcgtcgagaaagctcaacaactcacaaccggctgttgagtccaccagttggtctattcgaggaagtgggaagtgatccttgggacacgccttgttgaggtcagtaaaatctacacacattctccatttcccgttggccttccgcaccatgactggattggctagccactctggatggagtacctctctgatgaaaccagctttgagaagcttgtcgagttcttctcgtatggcttgttttcgatctggtgcaaatctccgcagtttttgctttactggcttggcgtcgggttgcaccatgagtttgtgctcaatcacctccctggggacccccggcatgtcggacagctgccaagcgaacatgtcagcattgtcgcggatgaaggtgatgagtgcgagttcctatttctcgcctagtgatgccccgatcttgacggtcttgtcggggttggcactggagagtggaacgatcttgattgcgccgtctggtttcggcgtcttgtttgttttgctcactttcttgggtggctcagctgtggcgggtgggctgggcgtgtgctcgaccatgtcgaggctccgcttgtcgcattgcactgccagcttagcgttcccttgaatagtgattgttccctttagtccgggcatcttgagcacttgatacgcgtagtgagatgcggccatgaacttcgcaagtgcagttcttccaatgatggcattgtatgctgtatcaaattcagcgacatcaaaggtgatctgctccgtacggaagttatttgcttggccaaaagtcacaggcaacgtaatcttgcctaatggtttggacgatgactgaggagtgattccatggaagggttgatcggtgggtgtcaactcgcttcgtgggatccccatcgcgtccaaggtgctggcgaagagaaggttgattgagctgccgccgttgatgagaactcgcgcgaccttgatatttcgaatagtgggttcgaccacgatcggatatcgtcctgggatgacagcagtcttggggtggtcttcttctgagaatttgatcttctgttcggaccacttcattttgggcgcggccccctgccacgtcgaacagacttcacgttccactttcttgtactctcgctttgaggagtatgccgtggaacctccgaagatgtgcgagacatggagatcagagtctaggtatgctgagtccgattcctgagtagctacctcagcgtccttctcgactacatgtacttgcttgcctttttccaatgccatgtgctttgcgagcgactttttgaagacgaggcaatcctccagagtgtgtctgttcgacttgtgtatagggcaccatattttcttcatgtcgctgctttgtgggactgggcgcttgggagggtccgcgtattttgtcgcgagaacttccgcttgagctttccttttcccactcttgcaatttttcttcttgcttgattcaggtgcgtccttggctggttccttctctcccccggtcttcggcttgtctttcttgcgtctcagtgcgtcatccgcgtgagcgcatcgatcgaaaatcttgaatagtcttcgagtagtcgtgatgcgcctcgttgccaactcctaggtagtatagcgatctctgacaccggacttgaaagcgcggattacagaagcatcggtgatttgggggattgtgtttctgcactcattaaagcgccgaacatagtccctcaaggatttacccggggtctgtgtcaatgcgtgtaggtcgtcttcgatcgcgtggcacttgtaagttccttggaagttagcgacgaactgctgccacagatttgcccacgaagaaatcgagtagggcgggagatgcatcagccaagaacgcacagagcctttcaatgtagttggcaaataattcgccaacgcgttgtcatctgctccggcagcgtagagtaccgtggagtagacctgaaggaattcttctgggtcggtactcccatcgtacttctctatcgctcctggtcggaatctctcaggccatcggacatcgggcaacgaacgattgaaagctctacacccggcgatgggggcggtgggttttcggcgatcgtacgtccttcgtggatgtctatctgacgatgaggatgaagaggatgatgacgatgacgacgggtcacttggttccggtgtacgattacgaggacgccgtccaggttctcgaggatcctgtcgtcgccccccgttgttgtctcggcgccgatctccatcgtcttcatcgttttggcggcgtcctcgaccagtatcgcctggcatccgccgttcgcgatcatcgtgatcacggcgtgtggcggttatcacggtctcggtcttcgctcgagcggcctcctcgttctttgttttcgcgatgtcgtgaagagacgcgatgtcgggaacggttcccgttgtctcgtgtgcgtcgtgcttcttggcggccattcagatgatcacggagatcgtcggtccgtgaggtggaggggtggcttgacgaggcgacccccgctgctcagggagttcgccattagcaccgccagctggcggctgttccgggtgcgctgcagcagcggcctcctcgaacgtattgctgaggttggtcactgattcccgtagccgttctgtccactgtgcgagatcatcattcagaacgggatcgtaaggggtttccctcagtattgcgttgataaccccgatgtgctgggctggtgtaaccacttgattttccgctttcacattagcgcgtgctgacgtgctggtcccatcgatagcaaatacatcgcgcggtgtactcgttgatgatgagccatagtctttgagaaagtgtaggactgatggctcgtggggatcgatgtcgattaccccaacgaatcgatccgagatcagcgtcgctccttgttccttgtctgtatccctaagagagattcgcgactgctggaccttaggaggcggtgtcttcatggcgctgagaaagaccttgcagcttgagaggtcgtgattctttgtcttgtgaataggacaatagacctcatgagttggagaagtacgctgaattccacgctccttgcaggcacgaatttcagcttgcacgttgagaaaaacccagcaggcttgcaaggtatgtttcctggttttgtggataggacaccaggaccttgtcatctcggaagttgtccttgtctgctcgtgattcttgtcggaaggacaaggtttggccgcactaagatccttctcgggctcggatgtcatcgacgttccgttctccgcttcgacgggtggattcttcgacatggagtcgtccagggttgtagccacggcgttctcgcttctggtcattcatggaccagtcgagatcgacaccgtggtgtaaacgggaagacaagttcgccgacttgagtccacaccagcattgttgaagcaggaactccttggttgaggccggtgttgacgctgttgtcgacgaagcctgatgatatagtagtagaaccttgagcaccaagagcccctacctggcgcgccactgtcgacgggggatacccgtagaccggatatagagggtattggggtacgctggtacgaggatctacgtaatacgatatcaagcaaacggaaaacagagattatactggttcaggccccttgataggtaatagccctaatccagttgatatgggattatatgacggaaatcccagattacaaagggaatagtggaactcgatgataccgacgagatcgtagtcgaattggttcaactggatcactcggcgacttggctcctataggctccgacttcgtaagctgtggtggatgtgttggcggtgagattcgatgcttaggtcctctcgggggtcccttttatacgctggtcagttggtctccaagtaggactcggagatatcggaccctacacgatacagtgacgacccagttctgtacgagtaggactccttccatctgtggactccgtgatgaatttccttaacgtatacagaaaacgtccgtatacgcgcagatataccatatctatacacgacgtatatctgagggtagagggtataccttacccgtaaccctgacacaaactagttgcaaatgttctgatagttgccatgtatgaaaaccacatgagcttcttagtaataaacctgtaatgaagcaaaaactggagatcctcccacttggctatgatgcatatgaatgcaacagcaaatgaggaacatattgctaaggtgtctgagatcaagaaggcctgaaatgcaacctttttttgccataacaggaagtccctcacttccagcatcagcactcgacgcaggtcattaatgaaggcagctactccatccacgtcgtcgtcgtagcgatttggtgaatggcggtgacctcgtgttgcacggcgctggttgactgtgtcgcgaaggtcgacgggacactggtgaggtggagagcgaggccgttcaactcggcgctccctgtgacgttcgggaggcgagtgaacagatcgttcgtcgtgacccctgctcctgcgactagatcctgtgccggtgatgctgaggcttggctgatgataatcatgagatcggaagtgagggactcggctaccagtcggggtgcgggtgcttgcggagttggctggaaccgagacagcgatcatggtcttcgtttggttcaagatgttgacaacatgatcagcttggttgagtgcgtcttccttgaggagggtgttgaggagagtgattgctgcaaccgcgttctgctggggggtgcgaaagaccgctgttccatcgacgtcttgttgcccaatgagttctctcgctcggcgcccagattccaaggcgcgttgccgtcgatcttcagcctcctttgcaatccgttcgcgatcttgctgctcacgctgtagtcgttctcgctcctgtcgctgtcgctcttcctccagtcggcgacgttcagcttcttgccgtgcgcgatcttggtctgcttctcgggcttggcgctgttcctccatttcgttgtcagccatgaatacgccgaagaagaggggcgtgtagttatcctcatagctgtcgtcgaagttgtcgaggtcaccgtggtcgtagtggtagccgaaatcgtcgtagtcgaggatctcggttggtcgagaactgacgccgggggagctaaggtaaccatccaactcttccgtcgagactgtcccaagaggttggagtataacgccaacctctctggatctagattggatcggggccgaagccggagctcgcctagatcttcgagtgggagatgtcttggcagtgaagacagcggccaaattatcaggaagtttcattaggattgagggataggacccgtcgtcttgatctggtcgcggaagagtagattggatctcgcccgagtggtttgaagccgactcgggagagatgatcttggagtaggcctcggccgagttcggaataccgaagggcatggggacctggtctctccccgactggtttgaatccgagtcaaggagagagatcttgctgaagtcgttggtgatgaagttgaggctgccgaaccgaaacgcttgcccgggagggaaggcgaagtcgtcgatgccagaaacgaaacccatcgcacttagtcggcgagaacttgacgctacccctacctagcgcgccaactgtcgaaacaagatttcggcaataataaaagggagtggctatcaagctaggaaagtggatgggtttggagacaagaaatttttatacaggttcaggccttcttattcaagaagtaataccctactcctgtccggagatgattccgccgagtgtgttattgattgtatgattgggagaaaaaagaatcgtcccgagaggaacccggacccctccttatattggggaagggatctgtaatataaagtacagtccatatcctaacgggatatgggattacagataaaatacaatcgtaaccgactaggatcccaggtattttcttaacatacaagtttagaatctaacccgagtcctcatagagatattctatctatatttggtaccgtatatccagctggaatataaccgccatgtagatatggggtaaccataatctccacagcactatatcctccaggcaaggtgaaagctgctgcaaatgtaattgttgctataaggatcgctactaatgaagtgttgcttgtgtatctctcagttagtgccttgacatccttccttgatttattagttactttttccttcgcttccatatgaacattatgcataaaggatgcatcttggggatcagcttccaacataagcaaggacacttcattctgcatggaaatccaaataaagtcataaataatggaactaggatcaatatagtagcagcggcagcaacaacagtagcaacaattaaaataataaaatccccaaaataatatgaatatagtattgttacattaattatagttgtcagcaataaattataaaatttgaaaacaaaaccaattctatgatattaaggatgcatgctagtgttgaataataattgtatagggaaacaattcaaaggtccaaaaaatcttttgcacggtcatgggatagtgccaatgtaataacatgaaaatgtctaatgataaaaaccaataagattttgaacttcttaaaacttttgcatcatgcatgttagatgttctggttgtcattacttataaaccctaaggcagtaaggccctgtttggatcatgggattttcaaatgaactgtacaagattcttttagaatggttcccatgcattcctccagtttcataggaaataaaacatccaaccaaagctaaaagaacaattccttcactcattcttcctcactctctatatctatttgccgtgtgttttcctgttatcggaatcccttatgtttcactgttcgtgtgttttgaattcattattttccactttacgtactcaaccctatttcatctttgtcggtttatagtagaggcccatcgaagatgactcataagtgacaggttctagttaactcctctactgggtcaaaactatcgattatgaggtttaatattggctcgacaaacataatagttatcggtgacggcgaccagctgataaagatgacttttcacatcacagaccattagtttgtgacggagcctctcgccgatacagataagcccccccccccccccccccgcgcgacatagatgaggtgttcatatttatatttttttcctaacgggccctgaattgacaaacaggaaaaataataaacaatggtcacaaatacacaactaaattaatatcagattagcccctcaaagaaacaattttgtatctcccatcatctaaaccccaattgtcaaaattgtcataaaaagtgcactactgttcgctattttgtattttgttgggaagtctgtctgagggtgtgtaaaatgactcaaatgctgttcttctattcctgtgccttctcattctcatcctcgcaatttctctctcttccctgtggacgaactcgatatagctaggagtagctcgatatagaatactaacaatatgatgacatgggaattttgttcatgatctactagtataagctggctttcctaagtctaaaccaagtaatttagttgatgccgtcatcgacgaagtttttaaagttgaattgcacttgcacgtattcaagaagatgtacttgtgagatcagaggggaatgaaacaagcatacatacccagtttaacgtcttagcgcgacccgtgactttccatgattgccaacttggtggattactgtcacgccgaaatttagcccaaatttccagactattttgtgtattaaatccctatccaggaccagccagggtacacaaaacgacaagtaataaacagttacaaacgtaaataaagcgtaaaatacttacagaagaggcacttagtcctcacaccgaaacaaaagcagcagcagcggaaaaggcgatcccagcggggcttcagctccactccacaggcaaaactcaactggggtctgagccttggtcttttaacttcgtcttcagctcagaagcactacacttttgaaaaaggggaacaatagcaaggctgagtacaaccaccatactcagcatgccacaccaatgatgcagacgtgcaaggggagacaatgatggtttgtggctatttgcataaaggtggttgtaaagcattttattaagcaaaatagtaaaacggttgagtaattaaggtaatattaaatctccactgatcaacgctacaccacgttgaacaggcccaaccatcccacttgaaccaactagtgcattgagtcgatttattaagggtcagactaatcacggtgaatctggttgatcgcccataaccgcgggtacggctattcgaatagttttactctggccagaggtgaacaactgtacccacaagatacaatccaccggcatgtcaccttgcctgcgtagacacgtcaccatgtcgagtgattgtgacaagaccctccgcataaccctcccataaccatccacacaacggtaaggtttcacccccacccctaccccagaggtgggcagtcccctcgtgcgccgcggtgaatccggcagctggacaaccggacaccccagctgacccaactccatcacgcccaccctcgccaccggtgtctaggaaagggtcgagctatacttcagatcaagcagttacccactcccgcttgtggcaagcgctgtaagtcttccagggtttcctatgaaccggtccttaattgccatggatgcgactcgcaaaaccatgcacccacagcccatcattgagtcgcgttttagttggataattacgatcatgaaacattgctagatgtctcgagcacgcagctcatcaatatactagaatgtctaatactgcaatcatcgactgagctagtagtaattaagcatggctaagcatatagttctagctaggttaacataagtaacacaagctagtcgatttatgacccaaggttgacaaagaacagatatcaagtaaacatggcagaagcgaaaagaaagaaaaaccctgatcccatgtaattagcaaaacatacatatttatttgcaaacggtaaaacatatgtaaattgggatcaacatgctcaaggggaatgtgtgacttgcattgcttcttcaaacaatcttctgaactgaactcttatccttgcgaccgcgaacatccgaaacaatggattctacacgctagcacgcaaaacgacgaaaaactctaataaacaccaagaaaaaagtacataaaaagtaaacaaacatgtggatctcaactttagatgaatcttacaacttgaatggcccaattcggagttcgtatgaattagatatgaattttagaagttttgagccatttaaacggatttctagaattattaatgatttattgcgcaattaatatttgtttttacaaaggaaatgggacatcgctgacgtcagcagggggcggccggtgctaacacgtgggccctacgcgtcagcggcacaagggtaggggcgcacggtggacacggtccaccgcggcctcgggcgcacgtccaccacatggacggcccagatggaggcccagccgatccgacggcccagaccgaccgtggctaggatcaaggggaggcggccagccggcggtggcgcggcacggcgcgtggcggcggcgacccagccggacggccaccggtggcggcagcgcaacgcggcggccggcgaaggagggaaaaagagaggggagggaggcagttctcaccgttgggcacggcgacggagggaggcggccggcggagcgcgggatggatgggaggcggcggcgttcctcggggaggcgacgcggacggcgctccggcgacgaccagcgaaggcggagaagcggccgaggcagtcctcccgcgaggccgaaggaggcgacagagcgacaccaggtggtccggaatggcgcccaatggcagccgatggtgatagaggtggcggcggcttgagttgacagtgaaggtggagtttcggtgaggggttggggaaatggagccgcggttgggcttgccctcacggtggtggagctaacagctgcggcggtgtggtgtgaggtggccgggaacggcggcaatggtggtggtggctcgggtgcacggtggggtggcggttctagcggcgaaatggaggagcggaggggatgccggggtacggtacgacgctgcgaagccgccagtggcagttgcgtggagcggcggcggcgggagcggctgtggcggccggctggagtgtcgccggcgagcggcggagagagggagcacggtggggaggtgattagggggtgtggcgagctcggggtggagggaaaatgggagagggagccccggggatgctttttatagccttggaatggcgggatcgagcccgggagaggcggaatcggccggtgtcgtgggacgccgacgtgggctcgtggcggcggttcggcaccgatcttcgaggggcgagtgggggtttcggttgaggaggtggagaggaaccggtccacacggttagatgcgagctcgggaatgggagggcgccggatttggcggtggagtgggcggcggttggctggaggtgggagatgaccccgacaggtgggacccacctgtcggcgggtcggggggaggagggaggacgagacagttgggggaggcaaagtagacttcgggagagagagccgagcgggccgagggaagggaggccggcctgtgaaggaggagggggaggaatttgggccgagcccgaaagggaggaaggggaaagaaggagaattaaatttgttttctttttatttaaatgagtttaatgaactttgtgactttaaaattacttcttgagctctgaaaattcgtgggaaatttcagagagtacattaggggcgcaaagaatattataaaatattctcggccataattttcaaaggaaatttttaattccctcaataattcacttgattaaattgatttaacttttatttaatttctagaaaatgtattattaaatgatttttaatcccgaacgaaaattggggcgttacaattaccatggttgtcaagcattgtgacatcagtgcctctatgagacaacaaagcagccaccatttttgggttacccttatggacagcaacacgtagagcagttttcccatggctatctcgcatgccagtgagtttccgtagttgtggtgtgctcaggataaacttaacatactctacttggtctgcggatacagctccatgaagacatgtccaaccagtctttgtgcaatagggagcatctggacaatggataagaatctcttgagcaatgccaatatgccctcgaattccggcagaaacaagaagaggatctagtggcggtgttattgtctgatacgatgtaccctagagaagaatcatgttccagcaatactcgtaacacggaccatgccccagagggcggcatagtgaataggagcacgcatatattcgttttgttgtttggccagccaagggcggttctccataacctttttagcagcgtctgaaagtatgtctagggatgcaagtggggcgggcttttttttcggcccgcagtcccgccccacaaaaaagcccgcaaatttgcgggctggccatcccacgtggaccttgcaaaattgtttggcccatcccgcacagcccgttgggcgccacggcattagggcacagactgggagacgcgagacgcagccgcagcggcgcagccgagacgggagacgggagatggcggcggcgagacggcgccacagcggctgctactctcgtcttcctcgtcgcccatccatccaaatccagcagccgacgccctccagtctcctgatccagcgaaatagtgaatccagtgcatttcatacttcagttcttgatagttcttgatagatccatccaatccaaatcctgcagcttgcgatgctgcactgccgcctccagatctctacacactaattaaggtacaagattaaactaacctttcatgtgtttcttgtgtatttatgtgaatcaacgaattgcttctccaagaatagtagcaggttgtctcactcactctatttgtttttgtatatgttaaactttgagtgtgattggtgatctagccattgttatactggacatcagcgtctgcaaatgatctattgcatcttttttttatctaattaatgtggtgcatgattagctaccactggtttgacataacaagattgataggtgctcattcagagaagtttccttcagactaatttcttaattattagcttcagatttttttttcttgttctatagtatataaagtacagttacatgtagtagtaatataaagctactgttgcagtatctggtacgttttacccaacttcaacatgctattttcatgaactttggaagataaagatggttttggacaaggaggctacaaatgaagatgtaccattgcatctattgtcaaggaaatgaaagaaaaatttaagaagtactgggacgctcaatacttgcaaatatgtttcccggttatttttgatccaaggtataagtacaaattcattgagtttcgtttgaagtctgcatttggagctgctgcaactccttaccttaaggaaatcaagagtaatatgcagaaattgtttgatgaatattctgccaagtatgggggctcaaacaacatcaattctcagcccgaaacaagtgttgagcagaatgttgatgcaagtaatcaattcactgattggagacagtttctacatgacaaaagcaggagcaaagtaaagagtgagcttagtcgatatcttgctgatatgcctcaggaaggtgatttccaagatgggcatgattttgatatcttgaactggtggatggtaacaaaacaaagtaccctgtgatttcacgaatggcacgtgatgttttggctattccagcaacatcagtggcatcagaggcagcattttcaactagagaaaggatcattagtgactatagaagtagactttcgagcagtactgtagaggcattgatttgccttcaagattggatgagggcagaaggtttgggtgatttctttgcacgtgatcttgctgagagtgatgaccaaaatgtgcaacattcaggtatttaaattgagattcgtttgaattaacttggctattctatatttttgtatagttgtatactacaccactaacatcattgtttcttttttattaacatctaacagtccagcatgtactcttttttattaactccattgtttcttcctatacaggtgaaaatgcctatacacctctagtaacatgtagtaccagcacaacaaccagcagcaggttatatatctcactatcctcgaataactgcttgttattgtcaattatgtcctttaattcatattttggatgcattcttaattgatgaaacttagtacatatttactccattctacaatatggaataacgttgtgatcagtcggttgatgaattcatttctaattttcgattagtagtttctccactctaactttattaaatttaatgtgttgaaggtaatatagaaaaagaccggaagagctcatagagttggaagcagttgtttgtcactttgtcaattgggacagttggtttatcatgaagagaaaatgcatcatcatcactctaactttagtcatgatgttgaaggaaaagaatggtgttcttattcagtactatacttgttatgtcattgaaaaagaatactttcacatgaaaataatacagttttcatgtgctaaatttgggatatggagtagttatgtgcttgtgtgatcgatgaacctaattaaacagagatgtgcacattgtgggctgtccagcggtgcccgttgggctgagcaatcccgccaagccatgcggggcgggctgccgtttgcccgcacatgcagtttgcggctggtgtggggcggggcgggacggcccacaacccatcccacttgcaatcctaagtatgtccaaggaaacaatatggttgttacaattacagagtgtctgtgttgtactgtgtaattctaaaaaaaaagaaattaacaacgagaaatacctcgacctacaaaatctcacctgcatttccacttctcacgg

SEQ ID NO: 18124 - DNA, 2248 bp, Oryza sativa
aaggcagttgctcccgttcttagttgttcgaagcagcacgtctgcttcacgggcagccatgtcctccttcaacgttgtggaatcaccagatttggctgcttccaggagttgtctgtcgatatagatggcccgcccggcacggcctggcccaggcacggcccaccagccatcgggccggcacggcccgatcggcacttcgtgccgggccgtgccggcccatgggctgcgcctcccgcccaggaacgaccaccagccgtcgggccgtgccgggccggcccgaaggcgcgggtggcccatcgtgcctttttttatataagtctatttttcatctctcctctttgggctgtggcatatatatagcgaaaataagtctatttttcgtccctcttctttgggctgtggcatatatatagtgaagataagtctatattctgtccctcctctttgggttgacatatatatatatagctaaaataagtctattttacgtccctattctttcgaccatggcatataatatgtctatttttactccctattgtttatgtgtcgggcctagcctgcggcccatcgtgccgtgccgggccagcccaacgtaccggtggagaggcccaggcacggcccagtggttgagccaggccggcacgggcctgacccctgacgggccgtgccgtgcttgggccggaccaaaacgccgtgctgtgtgccgggccatcgggcctcgggcctcttggccatctatatctgtcgatcgtttctactacattctctgataggttagtgtcggtgcctgatgtttcctccatggaattttacctccaattttagaatattgtgtgcacagattatctgttttccgttcaatattttggacaaagtacggagtactccaactggatgacttaacactctggaagccttctctgttaattaggcaaaaaaaacatattggatcatgtcaagaaattaataggactataatgttactagtttttagcgaaaataaaacccgggcctaacgtgttgatcgacatgcccagctgggctaaactactttgtcagagaagaagagaaataacgcgagtgttcgacagaaaatgattgtgtacgtattttgcaacaaaagaaagaagaaaatatcgtgtaatagttaaattacaacattctgggacatccttttgaaatatgtcaactgtcagcgtatttttgcaaggatatatatatatatgtgttctttggtgtggattcgaaactaattattcctcgtacatgaaaaatggaacgataattaacacacaattaattaagtattaaaaaatattaatatgatttttaaaagcatttttttcaaaaaaattcacaaaacattcatttaccagtctggaaagtatgtgtgtggaaaataaggaatgggaggttggtaagctcaagaaatgaaaacgacctagaagcattcatattaatcatatttatattctgttttaagttcaatatgttcaaggccgcagctctaataaaaagcactaaatctctagaaaagattttacccgttacataggaaggtttgtaacggttttattatgcatcgaacactgtgtcactacttaaaaaaacgatttttagtgatgttggccttttatttttctagtaggatatgattctcggagccaaatgtccgtctacgaaaatgtaaaccggagtgtattttcatcatccgtctacgaaaaacaatttttcagggcacagacggacctcttaagtagccggctgaaaaaaattgattttctcatgcggaacgttatatggtccgcatgcaaaaatcatgcataaaaaaaaatctaagtcattcttatcttctcctccacccctccccacaactcatttcccctctccactctctcacacacgcccctcactctctcctccctccctccctcaaaatctgactggaggagaggagggcgacggtggtgcggcggctccccctctctccctccccactcctagatctggctagaggaaagggagcgacaacggcggcgtgcactgtagcgcctacagcatctggaaagattggatttgctgcctgcgaaaatcattttcgcaggtggtgctttggtctgcctgtaaaatttaggtatttttacgagcctttagatacatacggaaggtttggccgcctcgaaaatgtgtttttaccgccaggaacaacgctttttccagtagtgtgcataacctttttttttcg

SEQ ID NO: 18125 - DNA, 9567 bp, Oryza sativa
ttatgattttcactaagaaactatattgatacatatatatgacaactttacttaaaaaatgacatggtttgaaataacatcaatataaacaacccctaagtttagaggcggtaattgtgagtgctcacttttacttctctcttggtacagtaaatctggaccatattcgatgtactacctaatataatactcccttcgttttacattataagttatttaaatttttttttctgagtcaaagatttttaaggcttgaccaagttcatagaaaaagttagcaatatttataacactaaattagttttactaaatttaacattgaatatattttgataatatatttgttttgtattgaaaatgttagtgtatttttctataaatttgatcaaacttaaaaaagttttgactaagagaaaattcaaatgacttatatcatgaaatggagtgagtacaataaatatgtactagattatgtctcatcttattctaagatactctctctgttctaaaataaatcaatctcatactaatatatgacatatcataatacaataaatattgttatattttatatgcagatttattataataggatgcatcaaattctagtgcgaggtgaggttaatttatttttggttgacggagagagtactgtacagtccgtactaaatcaaaatatagccgatgcatcaagccagttttttctttctcctgtgcgtctcaaaggtgccgggtatggaatcggcacctttgaccctggctaatcagtgccgccttgcgggtgttggttgggcaaaccggcacctaagaggttttccatcgggcaccatttaggatttctgtactagtgtttgtatcactcaacgtatattgttagactaattgcttgtcaaatttatgaagtttgaattttaaaatggtgcacgccgaagcgaacatattaactaaaagtagtacgcgttgccgttagaaaagaaaaacagatagataaccaaagaataagattttattgcactctcacatgtatttatattggtaaaagagctaaatgattatatagatttatcgtttctccactattataaaaattgaagatgtttttgccgagattttggtatatcatccgtgtgtttgagttgatttctaatttcatctttatctttttttgtctgtcttctttttttcgctgctttttttttcgattcgttttttcattcggtttcttttgctccttttttttcgctattttttttatctggttttttttatatctcatatcggatatgttgcacgccgccactgcttaccaaatctagcgcagtcccacttcaatatgtgtcccatgcgttttctactccaattgattacaaaaattgattccccacacctctctcatcatttttttctcacaattttcctttcaattcgctttaatccattggatttagtttttgtcgctgatgatagttggccggcctttaattttgcggattcgttctgtttcggaaaagcggaaagagtagatcgagtgaatcaaaacccctcgaccaattttcagatataaaaaaagatttgactggatttgatagggagaatcagctcctgcatacgggcataggactaggaggttgaagatggtggttggatgtgtgaattaggcctatagctccacttgtgggctggatcagagagataggacagtcggctgtacgagctgggcatgtcgctcgatttgtgggctagattggagagaatcaggtcgagcagagggaggaaagaatgggctttcgacccaaacaaaggaacaatttttattaagttttttaattataatgtatatatagtgatcctaatatttcattcattgctcagttcctaatagcggttgtaccacggaaaaacgtttttacccgttgcaacgcacgggcatttttctagtagaagaaaaagacaaagaaacttatgttaaaaggtagagcccatcggctgactaagagctgattataagtcgtaacggctattactgaaaaatactaataatagaacaaattaagagtaagacttttatacctgtattgttagcatcttaaaactcaatattaaaaaaggggactacgataaaaatactctaaaatcagctttaaaaatatttattataaacgagatgaggacttacaatacgtagtgtgtccgctcgggactactgtcgagagggcatggaattgaaacgccttagcaatgcttcgcggcgacggcaataaacgaagagagtttgagcatagcacagatgacccgatggatggcacgagcgagtatatatatgtacaaatcgttcatgaactgagggcacgaatgccgcgaagacttcgtataacaaatcgggggtggtggtcagctcagatgatgacatgtgaacaacaaggcgaagacttgagacgacgtcaatgggcctcatcgtttggaacagtactaacctaacaagttgttgggtttgctgtcccgtgtaccatgcatctgtttctgaatgtaaaatctctttttagcacaaattttatcacttctatagtattgttatttatttcattaatatcctcttattttaatctatctataagttacggacaatcaccattacatttctacgtttagggcaaccatattgtggctcaaaagcagacagtaagcaatgaatacacttttattatcaggttataagcattgtaaaaagaggtaacaacaactacttgattgtagtgttactaccgggtagcaagcataggaagttagcaaccaaatagcagataaggaacgtagcaattctacaggataggaaataattttttttcttggtggacccaatcttattctctatggcaggcaacaaacattgtgccctctatcataaactattacctcctgctgcttgggcccacactaatatcaagttgggttggatagactggacctgttctgctgcccgggctgcggccgcagccggcaagaacagtgctgcactcactatgcacgactgtagccatcacagtcggcctgccgaacatgcccactgagaatatccttaagagggagtggtggtggtgaatttgccacacctttaccaccgtctacttttatttttgcaaacaaaaaaaaaaggtcctacatgtcaagctccccacggtcaactttttacttttctgtgagaataaaatatataatgctgttagtaacaaattaaataaagaggatatatattgaaaataatggtaataacgagttaatgatatttttagttaaaacttctgttgcacagataagatgctaaacaacccaaatatatggccttattaatttcgcttatgcctatacttatattacttatattataagctaaaatttaaattataaaacttaatattttatttttctatcgatgtttatttcacaacatttatttttatttttgttactaaggacacgtatataaaatttacttataaattatttttatttgctaataagagatataaaggaaaaattggaaaaaccaccccataaatcactcgaagtttgacattccacccataagttattttgttgcaaatgtccactcacctactaagttttgttgcaaaaaaccatcccagtaaacacatgcttaatccaatcaatatgttttcataaagtgtgagcgattaatgtggttttaccaaaattaaatacttccagagtattcttgatattttttttgagataccacaaataaaattgcagacgagagcttaaacgttgtcacactgagtttctctatatgaaaaaaagttcaattaaatatggaaaataagtctaatgcaaacgcttggacggtattgacttggctagcttagtctgtgataactatacaccagcaataataaactgatttgattaagtatgtgtgcattatggtgattttttttaacaaaactaagtagagagtaggtatttgcaacaaaatgacttacggggtggaatgccaaacttcgagtgatttatggggtggtttttacatttttccccgatataaataagcacaacaataggactcatgcttattttctaaaactaagaggtaaggcaacctaaacattctagacttgtcttttttttttttgaactgagagagagtaggtggctgtcctacctgcctgtcgggtgtaccggttagtagtattaaagtcgcatattaacttttttcctacaattaatttacactagtagtcatcccatatatgtatatctattaatttcatttcattattgacattttacattaaatttgcctcatcgatgttgatatcatttggcggtattaatatgctacttttttattttcggaaagagagagctctatgtattaatcatttgagggattacaatcgcgagcttttagctcggaaacacacgccggtgcttgcaagcacaaaaccaccaattgcttcaaggcaaagcaagttgggctaaactatatgctactttattaggacaagttttacaaaagagatggatgtcacagctaatcttgactataacatcaactaataaatatatgtaacatgtacaatactcccttcttccaaatgtctaagacctatctcttttttatcaaggccaagaagcaattaacccattcaccatatgataaaaccaatggacatggaaccaataagtactaaaataacttcttcgattccgatcaacaatttaatttagtacatggtgactacatataggacttagacttttagaaaaactaaataatagactaagtcttagactttcgaatggagaaaatatatcatatctatactagttctagtgcccccaatgtttgttcgcccaatctactcttttttgtctctctccttttgttttgaattttgtgcagtggttgtctcttacatgagggggtggctccttatctctctcatctcttctctccttcacctaactatttaagcttatgtagcatctaggagattgtgcttggatgcttatagtatttgacgtggcggacgtgagcctattttttgacgcggtcggactgaaatgccccggcgccttatctcctcatattgcttgctggacactaaattgcttgctggacactaaatacataggtagatacattgtacatatatgtgacagatataccggcgtggactacgttctatccagccaccgccgccggcgagctccaccgtcgtcatggttgtcgcaccgggcgtgagaggtatacacggcattgcatcaccatccagccaactttgaaccccagcacgacggtgaacccgacagcgcggtcaccgctgccgcccccagcgctgtgtcactgtcaccgttggcgtccatatcgccccccggcagccgcctggaagatggtgctcacaccgccatcgaacgtgaggaagaggcaatgcagtaaccagacgtggcgcgccatcttggcgaactcgacgaaccatggcgtgtcggagaacgcgccccagcgctcgccacggcgccgcgctgcgccgtgctcccgaagaacaccgcctccatccgcttatgcaccacggacaggtacccgtcgcacgggaactcgtcgagcgcgccccaccgcgagctccgcgcgtcgaggaactctgccgctggtgccgccttaagctccgcgaactcgtcgaagaaccgtcgccggtcataggagctccggtcgtggagggcgctcaggccgaagtcccactggtggaagccaacgaacatattgagcgtgatgaacgactcgagcgtgaacttggcatcgccggcgtggcacagcgggacgcccgggtgcacgatgagatcccaccccgcctgccgcatctcgccgatagaaccctagctcaatatgaggagataaggcgcaggggcatttcggttcgaccgtgtcaaaaaacgtgctcccgaccaccacgtcagcacagcaagttttatatatttagacggcgaggtccatcggcaaatatcgacggttatgtagtgtctttccctaaaactttgtttttgcgatatcttgtagcaaaatttgccatatatcattgaccaaatttacctcaagaaagaagagaagattgtcggaagattgttcctccagccgagggtgtgtcgcttgccatataactagaattaaacactggaggatgctgccatgtggtgcggcgtgtggatcgccaggtgtaacaccacaggtaaccacttacctagagtaccacaccaaaatgcactcaaaaccattaacttccaaaattattagaaatttcagcagagtctcccctataaatatggatatccatgacagacagttataaattaaactaataataatatcattcccacagtgtgatccatccatataacccatggaaagaaactaatagatatctaaaggattatttcaagaccaaaccaggatatagtttaagtgtcattatgtacctaagcaatatagtttgatagtgcacagataggtgtgtatacataggtgtgtatacaggagtgctacttcccgcccatacatgccgatctcaatgtggacctaaaaccgaataaacacaagagtgagtacagaaatagtcagcaagtacaatatggaactagaaaacacatatacacatcattggcaataaagcatgcacagaaagctttttttctttgataagaaacacatttttaaacaccaagtcaaagaaaaatagtagttcccgtcccgtgcaggcatgaattgaaatagtagtttacatcccggacaattgtgaatacatcctagcatttgtcggcaaaaccgagtaagcgtgatcaacgcttacccacaggaacatgaatagaaaactagatagcacatccatgactcgcatggagcatgaataattgaaaaaaaaaacaaagaaccaaattgaaaccatattgcacatccatgtcaagcatgaaacttgaattatttaactagaaccaaaatccggaatattaaaacaagaataacattgtaaacataagatgaactcgaaatctaaatagcgtgaacaacaattttgaacataagcagtcacttgtcacaaacaaatatatcggaaataaatagatagagcaaacaatccataaatcacacaattagttcgtcatgcacttgcctccaatcaagggttggtatcatgcacgatctgaaggaccaccacctaatcacaaacaaaaccttaacaaacacattcaaacatgcatataaaacaatgaaaaatgtgaacctactcccccatcccatcaaaacacaattacaagaaacgccgcttgcactataaacaatactgctgcttcaaacctttatatcttgaaaaataaaaaggctatgactgaaaatatatacattttaaaaatctacagaacaatacctacaacttttatgtagaaagcatatttttattctaccatttaaatggactaatttgcgcttgaaagcaggcttcagaatctgtctagaatttcagagggcatatacaaaaacaactatatctggagttctactcatctaatcaaagtgtattttaccaatatggaaatctcggagaaaactctacaactttgtctataagaggcctgactgattccgctgtttaaccactccaaaaacggttcaatctactactatccagattatgacatagaaacaacagttgtactaaaaaatccatatcgcctaaaccacttgagataaattcgcgccctttggtcagaagatagatccaaatattatctacaactttctagttatacacttttgcataaaatatcatttagacctccgaaacttcgaaaaccgaaacaatgtaaatctgccaacgtggagaacagccaaattgaatcacaacaaataaaactccttctctaaccttccttatccacgaattaaagcactaaaaacaccctagaacaactgatagtacaaggggataaacctcacttagagtttccttcaagattccaagggaaaaacaatggggagcactgatctacctttctcctttctcctctcctcctccttgtttcgtttttccacttcgtttcttgttcgaagttcatggggtggagatctatgaaggcaagttgctgtagaggagtgggggatgtgatatcacatacagacaggaggaggggagggagaatggcggcgacgggtgagggaaaggttgggtttccggttcccctcctctctctctaggttttaggggagaatcaatgggctgggaatgcaactcaaaaccaataaccaaaccaacatatgttttttttatttttttcgaggtgttacaccgagtcgctacttgcctcatgacttgcgtggtggaattgaaaagaaataagttcactttgactcccggaaaagtgactcgaatctaatctatccatgaccctcaacagcaaaacctgatatcgtgattcctaaattgttaaactggtgcaatttaactctctcggcggttttggaggacagtttcactaacgtggcacctgcgtggccgtattgacgtggcacttatgtagcattagaattaaaatatatacgtgaggcccacttgtcatcctctcctccttcaccttctcttctctattctctcttacgcagttgggcagcgatggcaggcagcgctgctgtgggaagtggaggagagggcagcggcgggcaggcacagggcattgctcagcggtaggcggcgttgcggcgggagatggaggtgagggcagcggtgggcaatagcaggggcgctgctcggcggaggggctcgagggccccacaatttgtttctaaatgggtcccatatataatttttaattctaatgccacataagcgtcatgtcaaacgccacgtgtgacgaaaactaggtcaacacagccatgtcagcgaaaccgctgtacaaaaccaccgagggagttggattgtacatgatttaaatatttaggggctcaagatatctggttttatggttcagggtcacatttaaaggagtcattttgaaattattccaattggaaatatcgtggcgaacatttaggatttgccgcacggcgcatgtgttaagactttgccacacgtccaacttacactgggttttgggggcttagacagccgcactgatcgccctcctccagggccgggcctgtgtcctgtgcaacaatctgatgcattgcgagtagtcctgtccttctggatctctcgcgtatgtgtgcctgggccaatacagacacccggccagactcagtcaccatgcgaatttttttcgtttttagatttttttttaatatttacagaaataatctatcgaccaaaaaaattacagaaatagcccctgccgccctaatggtgggcggcaagctgacgtggcagacggtgggtcgaccgcgccgtctgccgccgtcggccaaaattgcgattaggcccctgccgcccgtacagagggcggcaaggggctaattgcaattttggccgcccataaagagcttgcggccgtactttttcatctggg

SEQ ID NO: 18126 - DNA, 19431 bp, Oryza sativa
aagggacccagatgaaaaaagtatggccaaaagatttttctatgttatgttaataataaataaagaagtatttattggtaaaacttgttaatattgttataaaaatgtattgaagttggttgttgcgcaatttcatatgttaagtgaggtattattttgtaccttattcgacgtattagtactcggataatttatataggcctatcgcagtctgggtcgtagaaacattatatggacttaaacaaggagaattatgtaacatgaagaaatagtagtacaatttgaacatgatacaactatttgcattgcggttacatagatgatattagattcgaactaggagggaggtagtgcaatagttgaacacaacgacgatgtagtaatgggacaaggaagcatgacagtagaaattttaatatgccaagttgtccgataatagctaacccctacgtgaggatccctctcctctcttaaaccgcgctttagtaaccctgtattgctttggtagttcaagctgcacaacacggctaggtggagttagaacccttctggtgtctatccattctctgtattgacatctccttggtggttcctgggaggaaagaatagatgtaaagcaagcaaagttagtaaatgttgtgagaaaataaggattcatgtaatcaaaatattcttaccatgaaatcgtcgtcaagaatatttggacaaacaaagaaccttcgacccaatgttgtaggatttatggaacgaagaacctgacaacgatcaccacacctgcatcttggacgggcttcccatggagggagtgccgtagttagcacccgccagtcgctttgttgttcacgacattgtcgttcataagccgcttttctctgtaagtattgctcagtactttcggatgcgaaataccagcgaccttcttgtaaacaagtggttaggtcgagaacgggattttctgtatcgacccactcgatgtatgcgcaagccgtagtgcgggtctgccgaatagagtagtgttacgaagaataaagcgattgcctatacggaatgaataagcatatgcagataataaaatacctcacggtcatagttagggcacctaaaaaagcgccttcctcgaatatcaggattcctcgaagccattagttggcatcgatcaccgcataggcagagaggacgctggcaccaaggtggtagtaggtatacacaaggatcgctacgccagtttggatcctcaacacctcggcgtctagccattgacgaaagccggtcggatttgtaatgaagcaagtggggaagagagtactgaatgtgactgagttctgaaagattgtgaggcctcactcgttaaggcgacttatataggcgcaaaaaatcgagtgatacccctgacatgtgaacgtggtggggtatggtgggtacgcctgattggcgccgaaagatacatgcatgatcggcgccgaaagttacattggtcgtatgcgccaaatggcgggcaaatactcgtatcacacgcgaataaaggaggctgcatcggtgcggcagaaagtagtcgtgcatgcgccgaaaggtatcgtgcatgcgccgaaaggtatcgtgcacatataacaacaacgtagtcattacacaagcatacagtactggaaagtgaagcaagtaaacaaagagaagactgctctactggccctgccccgcgccgcgaccacgcttggtcctccgggcctgtgctcgcacgtggtcctgggagtaggtgaaacgatccggtggcacagcacgggtagcacgagtgtcccgcggaggagtggcctgcgcttggtcctgcgtctgcaccggcggtgcgcctcccagctgtgaaggcccgatgacgtcctctgttgagcctgaagcgaagtcgaagtcagtgatgtcgaagaggaaggtggaaggcaacaagtggtccgacgaggtcccagcatggtccagtggtggaccctgactcgacgtgccggctgcctgtgacgaagtcccggtgtactgccagaactacgctgagtgcgaggtcgacacagctgcctgagacgctgaccctgcagcctgggagaagtgtgcggcctgcgtcatagcgaactgggcgaaacctacacatcgacaacgggacccttgtaagctaagacataaaatatatgtaaattgattgtcgaagtaatgttgtttttttaagtacctgtggggggcacaacagaaggcctagccgaggaaggcggggtgctgaacggtgcacgaaaccctgaagcaatcggcaagtgaaatggctcacttatatgtgcgaggcatgtacagaaatagtaataaaaatacttacctccgtgcggagggggagttggcctaggaacgtgcgcagctggacggggaccagtcggtacgggtggccgccgtacagctgtgtctgcccgagcaacgtcgtctgcacgacaggtgagcactcggagaatcgagcgcatcgactccaccatccgcgtgtacgtcgtcaggtgctcctctacgggtaccggaatccccgcgcctaaacgttggatcgtcgttgaaccgtcaacgacgacccggttgatgtcgtcgacctgcatggttaatttgttcgtaaatattcgtaaaatttgacgaagagaaagacatgaaaacataaaggaatggtgcgatacagggtactcacagcacgagcgaagtcctggtcgcggtgcctggcatagaggtctctagtgctcgcaacgtggggttgctgctccaagggagcgaaggtgaccctagtacgggtgcgtggctggtaccagcgtaggtaggcctggtacgactcctcagtgtgtggctctccctcgtggtccacgacctcctcggttgcgagcaaccagtcctcaacaaaagtcgccaacttggcgggccagtcgccagctgagtgctaacccttgcgcgagtacctgcgaattaatgtgtaatattagtgtgaaacgacagatgttacaaattattgtgaacaggcagattttaatgcaacaacggaaagcgtagtgcaagatcttacccgtgaacagcagctgggacggtggtcggaaacggtactggaaagggctgacggaagccgaactgccgcatcacgcggaaaggggcgtgaggctcaacgcagatgtcgaagaccatcggaaccgtagtcatccagtacgcctggtccctggtgcagagtgtggacagacccaacggcgcacgagcctgggtagccgtggcactgtagggctcccacacgacgtcagtcggcagaaggcggtcgaactccataacaaactcaggatacgaccgcctaacctggacgtgagcccatcggcgctgcaatacgagacgatcgatgtgatgtacaatgaacttagcaattaacttagcaatacgataagatcgatgcaacgtacctgacgacggcaccacagagtacccatcgtagggtagtcgacctctggttgctcctcgtacagtgactcctcgtacgcgtgctggtccacctcagggcggccgatcgcaatcctctcagctgcccagatagaaagaaagagagggcacccaccaaaggtcgcgctgggatccgtcttcgtgcaagactcacaaagtgcacggtacagagccgccaacaacgcggaaccccagctccactgaggcacctcgcctaccgcggcgtcggtgatgctcctggcgtagtgcacgagtcccttgtcgaccgcgtgcccgtggccgccacagaacatcacccagccaaaaagccagagcaagtacgcctccaaacatcggctgtaggagtactcgtcggcctcctcctgtagctgctcaacctgcaagccgtcgataaaatgttaggcaccttaactgtggactaaatatgtaatacaattgtcatttcggtacaaaaacactcacggtgaactaaagcagccacctcttcgtaggtccggtgttgcggtggtgtgccaacggctcgagcgggaggtgcggtgcgcgctgtactagtgcgaaacgtgccgtcagatcgtcctgccagtctacagccgtggtcactggcccaacaacgtctcccgcgagcggtagccccaacaagtacgatacgtcctgtagggtaggggctacctcaccgcacggcaagtgaaaagtgtgcgtctctggcctccatcgatcgaccaaagctgctaggagggacctgtccacagtccatcgtctggctgggtccgcgtcgccggccgcagcctccaccagccgacacatcggtaggaggccggcctcacgtagcctgcaataacaaattaatatgtcattataaaaaatattacagtgcaactaacttatagtaaaacactgttcgtacctctcgacaaaggagtcgtgaaccgtgagtagctcaccgcacgtccgtgcccggaacgtcccaagctgagccccctgcaccgcagtaaggtgagaccggtgtcggtgatctatcgccgggtccaacaactgaggtgtatcctgacgtgccatctctgaaaaatataatgtttcgtgttagaacaattcaaaaaatagtaatgtaaaacaaaagataacttgcaaaattatgaaatagtaataaaatcatgagattaattatgtacaacaagagtacaggctatttaaatatagcaaacgttactaatggtacataacgatgacgtgcaatttaacatatatgtagagttcaataatataacataacattacttgtcaaagtccgacatacatcagcatacctaaagacattaggcaccttagtccgacgttacatcacgagacctaaagacatgacttgccgaagtctgacattacacgacgaaacataaacacatcgataagttcgaaacgaattacaagcaaatccacatgccgacatagaacataagaactacaccacgtagccagacgtggcacgacgacgcctaggacgtggtcgagtggaggtagtgccttcacccgtagggcgagctccatttgctgctgatcctgatagtcctgcctccgccgcacttggtttctccttgtctttaggacaatgcttgtaggtgtgcccatgttcatcgcatttgctgcaacgcttcaccctgccagcctccgactcgtccatatcgttgcggatgcgacgagtcctcctccttccagccttgcctcggagcttcgatgggtcaggaatattgagtacttcatcgttagtctctgtgaactccccagctatgccgaacccataaatctcgccgctccatgtatgatatattgcttgcttactgaagtactgtgacacatatactgcatctggtatgccacactccgctgcggcagcaatgacatgggtgcatggcctgtggagcagcttcggctttgcacaagagcaataacatgtgccgtcggctttgagaacacactcctgcttcactctcttgcggtagatacccctgcctgccttatcttgacatagtatctcaaacctgtgctgttgggtaccttgcactagagctcaatgtttcatggcctttttacgcaactcctctagctttttctacatgaaagctccaaacaaaatgctgttgttcggcatagagggaagaactgcctggaaccgatccctaaaatacctgcatgtcccatgtaaaatgaactccactatgccaactagtggcagtccacggacaccgcgcatcacccaattgtaaacttctgccaaaattgttgtcattattccatatctagcaccacctgtgtcatacgccttggcccatttctcttttggttcatgcagaatccactgagaaaatttccgaatctccaatccagttcttctaaccaatgttggactatccgttgggagaggtccaagagcttgaggagggtcagcaacggcggtcgatggagccgctgcacgctgatcactgcatttggctgtcaactcatctaatctcttccaaagctcattgaattttttctcctggttctgattgcacagcctcttgaacatgttcatgagctccttgttcttgaattgcttgaagaaattagctcccatatgacgcatgcaccacctactctgtacatcttcccaaacaccggggtatcctcgttccatactcccaaactgcaactctcctatcgctcgcagaatgccagcgtgcctatcatgtatcaggcatacatttggactcataccaacaacttttgttttaatcaattttaggaaccagtaccagctgtcggtattctcactctcaacaaaagcaaatgccaagggcaatacctgattgttcccatctacccctattgcagttagtatctggccccgatactttcctgtcaagaatgtcccatcaatgcagagaacaggacgacagttcacgaatgccatcttgcatgcatgtagagctaagaacgccctttgcagcacactcttgccaggatgttcaatcgaggggaatttcttcacttcgtaagagctcccagggtttctttcctcgataacaccaagcaggcgtggcaaattgtcatacgaggcttcgtaagttccaaatctcatctctattattttctgtttggccctccaggccttggcatagctaatagtatacttgtatgtctcttcaatgtgttggattattgaccttggttcatatgtgagattatcgatgacatgcgcatacatctcagatgcaacaaatgcacatgtaatgttcctgtggtatttctaaacactaggtagaaaacatgtatgcttggtaacaactgacactgtccaataatccttccatttccccttatacgcgtgcactctccagggacaaccatgtttttccctttcccacaccgaacttcatattgcgaccggttcgacttggcaacccaaaactctctatgaagtgacactgcaaaatgttttaccgcctccttcatatcttctgctctactataaatcgctccctgaataacctcattttctttgtactcccatctcacactatcctcttcagagacgatcagcccagaaaaatcctcactagcccattctgctggattaatatccgtctcatcatctgacgaatcacctttctctacacgctcgttgtcagaatcctccctctccatttcatccacaatggcaccgacagtctccccctcgtcggccactccacctggttgaatgcccactggagctactacgcccccgtcctctcgtgcgttgacctcctccacagaagtctcgtttacttcagcacttggtcccttgccatcatccatgttcgtctgcacacctggatccttcgggtgaacaaacggaaccaaagctagaggccacccgcgttgcaatgcattttccaaataccatctccacactcgagagttttgaactggcattagttcccaataaaaaccctcagttgcccgacttactataacattgattgttatgtcacttgtctgtggatcaactctgaagcccctcattaaccatccttttatagaaggtacactcctctcagccggtctatcaattcccctttctgatacaataaaatctgacagatctaccccagttggcccgtaacggacgtttcctggtccatggtaaacttggaatatttatttgttcgacatatctgtcaacgaaataactagatcatattactctttcatgcaataaacatctacaacgtaatatcttcttgtgtaagccaatgcaacggtaatgtattaattccaaactagcagatctacgtagttaccgatatctacaatacgcacttctagattagtacaactaaaaccctaaaaatataatgcatttattcaaacaaatttttaaagaatacacactatttaactcaatagtcacatataggatctatgaatattacctgaaatcggcgtctgaatccggcagggcttcgccccttcttctcttctcctcccctctcttctttttttttcactggaattgaggagagaagaatgagggctgggggctgggcagcaggccttttataggcagcgaggcctgccgcccggccagagggcggcaaggggccgcctgcaaaatagccggccccgactggtttttgcattcgggccccttgccgccccaccagaggacggcaagggttttcctgcaaaaaaccctccctccgtcaccgcccgttcctcccccgtttgccacgtcagcttgccgccccagaggtgggcggcaggggctatttctgtaatttttttggtcgatagattatttctgtaaatattaaaaaaaaaatctaaaaccgaaaaaaaatcgtcaccatgctagtgcacagctcactgtgcaatattaggccttattcgttttgaaggattcctaaaggaaatctcaattcctttggaataaacactatttatgcattattcatgcattcggtttgtaggattcaaaggaaaattttccataggaacactatgccaatcctccaaaaatcctgcaaaatgtactaattccataggaatgaaaacatccactctatcctcttttgtttagctcggtggaggaaaaatttctgtgttccaatcctttgttttgcacgtgcattcctgtattattcctatgtttttcctattcctgtgatttggaaatcatgtgaaccgaatagtcacactaatctaaaataccgatttcaaggtgcaaactctaccaaatcattgggccacgtggccaaaccaaaaaccaagttcacatatcgttaaaatgtgccacgtgtccaaaagagcacgctcattttaaacgtgtgtgaagagtccagataaaacaaaggaaaaatccagagcattctaaactcggttgaaaaaaataacatgagaacacgaaaagaactggtgaaaaagaacttttaaaacaactataatataattataatataatttcactataactatatcataacaatattataacttgtatataagtattaaaatactatatgcaactttatatctaacttatatagagattacaatgtagttatagtacagtcacactattgtgtactccttccgtcccataatataagggattttgaatttttgcttgcgttgtttgaccactcgtcttatttaaaaaaatttgaaattattatttattttttttgacttactttattatccaaagtactttaagcataacttttcgttttttatatttgcacaaattttttaaataagacgagtgatcaaaccgtgcaagcaaaaactcaaaatcccttatattatgggatggagggagtacaatgtaactatagtgttacactacactatagtaacatttaaaagttttttttgccaaaaaaacttgtgacagctttttagcaattcgaaaaaaaatataaacagcgagctaatattagctgtcgtaaaccggcgacaaggaagacatctaccgcaatattttccggatccacggaagctgttgccaatgagcaagatccattcactcaatggagcaagcggagggcgtcgagccgtaccagctgtgatggtccgcgagtgtggacgcgccaaccagccaacgagcatcgaggtcgagacgccatccacggtagcaacgaccgccaccccaagctcgaccacatccaggaggaagaagagagagggatgaagaagggctcaatgaggatatccagatttggacaatcaagggacgagggcgatgttacctccgctaccatcatcttcctccacttctccttgttcttgcaagtgttgtcttcgtcaatggctgatgcctttctcctagcaccgacgcggcaatccttgttctcgcaagcaccatcttccccaatggttgtcgcctttctcccagcactgacgtggcaatccctgttctcgcgagtgtcgtcttccccaacagctatcgcctttctcccagcaccgacgcgacaagtaaagctccaatgccacgatccaacgaccagttctctaagccaccaaatccgacatcctttaacccaccggatccggggccacgatctccggtgatgctgagacatggcgggccgcgatggcaatgagcggtgacggggacgaatcatcgaagattctaggcccttccactttctattactaggtgattctccatgctttgctacaggtttgctaagcaatttttaatatatatttttttttcatcaatggagctaagagtaaaaagaatagaaaataatgaaactaagcctcatcttaaaagcgaacaatttttacttgtcaaattacagttttgcccttgactagagaacaattgccaagcctaaaaattttaaaacggtttatttacacgacaagcaaaggcctaagaatgaactaataacaatttgacattggaacataagatgcaagtaaacacccattaacataagccatgtatagaagcaatgttcagagtacatagattaggacttgcgcagaattccactatcaacaatatataataaacatagtcagctaagtaatgtacaatctgtaatcaataataaatttttttgggctcaaacaatatcaagatacttggtcttaaaagcatgacccaaccgaaatctgagcttcaagaccggccattcaccaattagcttagtcagaacaggcaataagattgatagaaaacaaattccaatagccaaccacaggatgcgaggggcaagaacagtgtataacccagtggcaaatgctgttgtggttgccatgtatgccaaccacatgaggtttctagtaatggttctatagtagagcaagaactcaaggtcctctgacctagacaggatgcacacgaaggcaacagcaagtgaggagcacatagctaaggtgtcagagatcaagaatgcctgaaatgccagctttctagccatgataggatgcccatcatcgctgctatatcctccaggtaaggtgaaagcagcagcgaaggtgattgttgcgatgaggattgccaccaaagaagtgttgtttgtgtatgattgagtcagtgacttgacatctttccttgattcattagttaccttttgcttggcttcctcaagaaggttagaaagacatgttgcatcttctggatcagctctcaacataagcatagacacttcattctgcacacgtaaaaaaaaggtgcacatgaagcacatggtattatgatagcaatgcaaatgagtggtgctataagtttgtgattagaggccagaatgaaggagaatgtaattatgtaacagcattttataagactacgcatatcctgcaaatcaaatggaaatgatgtatttatgccacatgtttttctttgtcatttgtccctttgtttactttttgattcatgctgctgatgcttgtttgggtttgctttattaatagtatattgcacagtatttaacaggcatcaattctggtttattactccctccatctcaaattatagagtgtcatcttttttaggaaaaatcaaactcactaacttttgactaataaccatactaatcatataaatactaagtattatgtatgttatatcacaagattcatattttaaaatatttttatgtgatgttaatttcatattcattaggaatataacatggaataaattaatggtcaaagtatgttattgaagaccgtgtaaaaaataaagatcttataatttggaatgaagggaatacattttactactagatcttatggatatttaatgcattctactaaatcaaatgaccatttttgactgaatacaataacttcaattatagctactactactactactccgtaaatcaaataaagtgattgtacaaatttatatacgagagctctatttccgggtaagatactgggaatcgatccaaataggataataaaaatgagaaatcaacaagtactttgaaattgcggtgcactaatgcctttcatggttcctatatcaatgttacttttcagtttcattgctattgccttacatgagtatgtatgcttaatttgttcagcagcttactgatttccagtcaaatttatcttggttttctaccatgaattaactgcaacggttttatggaaattaatttgcggcaaatatacgtacccagatgagagtcttagcatccttggcatcccatagatgcgagcttgctgtctgtgcactgttgtcaaccattgtgtagtcaacgtctttccgagacagtagagcggcaaccatcttcggattacgcttcatgaccgtgtaatgtagagcagtctttccgctgctatcccgcatgtttacgagtctctggagttgcggtgtcctcatgatgaactcaaagaactctgtattaccagcttgcacagcttgatgcaggcatgtccagccattcgcactgcaacagggagcatctggacaatgcttcagaagctcacgagctgcaccaatgtgacctcggtatgcggcagcattgaggaggggtgagccatttgtggttgttatatatcctaaagactggtcatgttccaagaatactcgtagcacatcagccttatcccagagtacagtgaggtgcaccggagaagtcccttttgtgttttcttctctggccagccaaggacgtgcctccacaatcttcttagcaatagctgaaaaacaagtgatcatggcacaagtggaatatgtaaatttgagtagtagaagtggtcaatgttctacatagtcctaaatgtcaaaatcacgattgatgctgaagatacctgcatttccattcctcacagcagcagccaaagcattgtagctgcaggctcccacatgagaagaattgggaatttccagcactttctcgagaacgtctgcgagatctctcatcgctgcaatgaacatgggagactcgttgtgcttgttcacaccttgcgacagcgcaggctcagcttctatcagctccagagcaagctccttgtggccactgcggatggcatggtgtagcgcgttgcatccatccctgtcttgcctcaagattgcctcgctctgtcccagctcgaggcagcatctgagtaaaactgaggccagagcatcatggccactcgtcaccgcagtgagcagtggtgtctccccatacaagttgactttagcgacaagacacggggatagcaccattaaatctttgcagaagctctcacggccatgaatggaggatatgtgaaggcaggtgttgccctgtggagttgttccgagcagtatgcttggatcctgcgaaaccatgttcttcaatgatttggaatcacctgatgtggctgcttccaggagccctctgttcatctctactcctggtgtttcagactttcagtgctgatgtactggctgaaacaataaatatagctataggaccagtagctggtgactaattttttggggcattgtggctacatacttgatgagatatctttttggtgctgattgtgaagatattgaatgatgtctttgtgcaatgccttacaagaagtaaaactccaaccagattccactcttcacatgtagagagcactgcattttccacacatgtaaaaagcccgaaactgcaaagaaaattgtacagtatatcacatcatagcatgtatcatttctacatgtttattatctatcgtataataaaatccactgacatgtgatctaagctttcttgacaagacaaaaggaaaatatatagtagtacaagatttaactaaaaaatatcaacatttagcacttgatttgatgaaaatctaggattagagtaaaattaatctggaagctattactacttaaactacaattgtaatgtaggatctaataggatatcacgatttcagggagcggggttcagagccagttgatagggttgtccaatgtgggttgactgaactcaactcattaaaacccatcactgaaggtacacatgagacacggtgacatgaccgaattgatgaactagcagaactgttttcaatggtttgtcaaaagtcaaaaccaggtttgaacaacacccatacctgttggcacgatgctgttttcccccatggggctggttgctgcagcttggacaccatggtgttgactatgctgctcttatatggacacaaatagaaatggattgggctggaaacagaggaggatgacaagaaagcaattttctacgttttcctaaatttacctcccacccccgtgagctggctaatcctggcttcaaccagaccagtgtaactgcgtaagtgatggtgtgttgtctattgtgctctctgctagtgctattcttcagtgtttgcctgtggtagcttgtatcaactaccttcttattgaatcttgtacttctttcctaccaaaagtgtaggaataagtaataatgctggcttcgtctagcctttgagccacgcatacccagcagtgatggttaacaattaactcaacggctagttgaataataatagaaaaaagaaccgatcagctccaactagttttgagccccttaatataaactaatgcacgtattgtgcctattcagttccccattttcaaacaagtaactcactgtaaatcgttctttcgtcctcacatcatcaggttaaatggttaactaccccttcagccaacttggcattccaacaaacaccttgtgtacacaacctttgagccctaacaaacaccatacatgtgcacagttgtacacgatctctgcgctctaatctgaataaaaactacagttgcatcataaaagaaacattccacatccaaaaaaaaaataataaagcaacaactctcagataaaacacgaagcgacaatcaagccagggctaatatctggggatttttatttgagcaagaacaaggggctaatacttgggattttcgttcgagcaagaggagaggatgcactttgtccgtgcgtcggcaatcctaacgactggccagccaactcctccgccatggatacgacaagccaactccgctgcgggctgcggctgtgtgcgccgctgtggccagcctcgctgcactcggatagagaagcatgggtcggcgtaatgcttttcggcacccgcccccgcgccgagagctggtttctcccccacttccccggcgccgccgcgtcccgtcgccggcatctctgcgcctcgccgccactacggctggggctagctcgcctcgcctgctcgcgcgtcgccctgggcccgccgttccagcgggacaatcctagaaggaaaaagttccttttaccgtcgagtttcattcgttttttttttttttttgtttttgactgaagaaggtagaggagagagagaggctctatcttataaccattttattaatagtagttataaccattttattaatagtagttaaggtgttacagcaaaagtacatcagagcagaaaaacaagggaagaagaaaaaaaatagagaaaaagaggaagaaaaaaagaatcattcgtaattctaatccgcaaaactagatatataaataactatcaaaatttctttttatcctatatcatactagtaattgcctgtactaacgctatggtgatattttatagtacaatagtgataaatagaaaaatcccaccggatgtttttgttgttctattttcttttgaagagcaaaacgacatattaatttgcaatcaagaaattaacatataaacccaaaaatagtctaatataaacgcattctaattaatcttgttcacatggcccagatattgttagtaggagcaacaccgttattctttttgaaaatcggcaaatccatatttcgggttggcggcagcgccgatctgggcgagggcactgtggcctgaggggcgaacttggcggcggacgggactggggcgcagccgcggtgatgtggggaggaaggcgtgcaaaggaaagagggcggagcggcgtcaacgcgatgcgtagtggcggtgccggtcagcagctgctgcggatgatgaggaagttagcgccacgccggggatccagtggcggcagcggtggagtggcgtcagcgcgatgcataatggcttaatgcggatgtcagtgtgtgcggcgatgcgtggggatgggaacggggtggatgcgtgagggagaggcgcgatcgggtggaagaagcgcggatgccgtcaaatgcaaactcatcagatcattgtcgatcgtcggatgtgtcatacgatgaatgagtgaaccacttatttaactatagggtagatgatgtgttgacttttgatgtttttttccatgtcacacatacatggcacgagaaaaaataaaataaaaataaaaaaaatcaatgaaatcaacgtgtcagttaggcaaaattttttaccctgtgacatcgaatgtttggacacatgcatgaagtattaaatataaagaaaaaataactaattacacggattatgtgtaaattgcgagacgaatcttttaaccctaattgctccatgatttgataatgcggtgctccacaaattacatcgtcccactcacgtcataccaaggaaattcctaaattcctatctggagagaaaatcggatggccggacgcccgcaccactcctcttgaccactccaacctcatctctttctctctcatgtcggtggagatgctgaagtaagaggcggcgtcctcgccggacgacgatggcctcgcgtccgccgcgccgcccttggccgcggccgttgcggcgccctcctcctcgccaccaccggccactcggttgggcctctcgcgcggacctgcgcgaggcgactggacaacggtgagatggagcatggcgggcaggtcgccggagtcgagggaggcagtcgtggtgcggaggtggtggagggagagggatcagcagcgtgaggagcaagagcaccactgccgcggaggctacggggaggaaccgacaccggcggaattagtagtcgtggtggtggccgaggccgtggccgagggagcgcaacattccggcaccgttgaagatttggtcaccgggatggaggaagaacccaaatctagaccaggtaaacttatgtgatttttcgatgttccaatttattttctctcaatgtttctctgtgttaaatcgaaatgtttcactatgtattttaatattgtttcacatttttttcatcgattcttgaggatccattgatatttctcaatgtttatatgttaaatcgaaatgtttcacagcgtattttaatggtgtttcacatttttatcattgattcttgaggatccattgatgtttcaacagtataaacttgatgtttcatgtgtaagacataaatgtttcaatctttgattccaatgtgtttcatcttttctaattggatgttgcacacaatggtgttttcggtgttacaatcagcatctttaaatgttgcatataattggaatatttttaaccacatgatgaaacattttttcattggacaagggaacatctaaaacatttttgttgaaacattttttagttaatggtgaaacatgtgaaacaatttttctatatacggtaaaacaccgtccgaagttttgactgggattggatgtccgatccctagtcgtctccaaataaataatgctagaattaacaaaaacaaagtcattttagaagcatacatttaagttcttttgttcgcttcgttgttagctcatatataatgcaaaatatagtacatttagtaaacacataggtatgttaattcggctaataggttagagaaatgatttttcacccaccaaattaacaatatcttcaaatgatcaaatccaagctatctattatgcctccctcatttcatactaacccttcacccactttcctattctaatcccgttcctctttatcagttaacggtagagtccctaaacctttttaggatctgtaagagaatttctagagtggggtgcacgttgatttatctcaacgaaattgatgttcaatcacacggtaacataactaaattctctttgttaaatcccatccccacctgtaaataatcataagaggattccatcaaacgtgacaagtataactgatgacaagatcaaaatctctaaaattcccaaatttttttaggacatatacaacaaaatccacaaaagaatggcatagaagatcaaattgtatgaaataagaatggcataaaactcgcagaagtactgtaccttatataaaatcggagagcagtagctaaagatccatatatgctgctgaaggcagttatagggatcttaagagggtcgccaacccagccttcttatcgttttatctattgcacgccaaacgctaaacaatttcgataatgacatcaacactgatttggccccctgttttgattaggtcttctaattgcattgtcatggtgcacaccattgtgattaaactacatagtatatactaggggcggagccaggaaaccaccaaaagtagggctcacaacctgtttagataccttatatcttcgaaagtttcactaaaatttaaatgaatcttataggaatttaggaaacaagcctaaagccctagctgccctaggcttgtcatatactaactattctttcttgtataaaagttagacacatatactcacgcacacaagccacattcacgctcatgtacaccccagatgggtgcaccttagattggactagtctcacgcaattatatatatgaatttggttgaagtttgattaaactgcttcaaattcagtcaacttttgttcaagatctgaatttttcatggtgaggttttgcccagacatgcaaaatcatgctatctcaggctctcccatgatcattttacccagaatgatatattctgttcccaatattcaactgagctgtacatcgcttggtatgttgttattttttttaataaccggaagtgatggacaaaaaatagtggctatggagatgaaggtaagatgagctcaagactaatttattaatttactattaattaacaaaacttttttttacccctaccaatgaattagaaatttacaacttcatatccccatccttgtaataattttacaatcaagtatgtgacacattagtttgcattaatttttccattgttcacaaattatcattgaacatccctaaaaggctaaaactgtgatgaaaactcgcatataatttgcagttaacaaatcaataacaataaacaagaacttgaaaaaaaagatacaagtcattacataagctccacatgaataatgttcagagtacattatttagattatatacatgaagttaaagatttaacaatgtatgctattattgatcaaacaacacgtgacacatatatttgaacaataacgatataatatgctatcatttacaagatatatcgataatatcagaccatatcaaggaactctgatttgaaagcttgcatgcctg

SEQ ID NO: 18127 - DNA, 1028 bp, Oryza sativa
gaatgtatgttcaagaatttggtgcagaatgctcctacccgaaccagcgtcgtgtttatttgtcatacctggattctgttaaatacttcaggcctgagattagaacggtgtctggagaggcgttacgtacatttgtttatcatgaaattctggtaatgttctatgtttgctgagtttttctaaatttaaatgcgttgttttgccaggctggtcatactatttttgtatgcaactctttgggggggattctgccttcctccttaggctagcgtttttctgcactatctaatgctaggtctctatgtgttcagataggatatcttgaatattgcaagcagcgtggattcacaagctgttacatatgggcgtgcccacctttaaaaggtgaagattacattttgtactgccatcctgagattcagaagactccaaaatccgacaaattgagggagtggtaagacctttgttgacacttctgttactctgctcacttttagctcttctagtttacatgatttctgatgtactttacactcaggtacttatctatgcttcgaaaagctaccaaggaggagattgttgttgagctgacaaatctatatgaccatttcttcattactatgggggagtgcaaggctaaagtgactgcttctcgtttgccttactttgatggagattattggccaggagctgcagaagatatgatcaatcaacttcgtcaagaagaagatgaccggaagcagcagaagaagggcaagacaaagaagattattacaaaaagagctcttaaagctgctggccacaccgatctcagtgggaatgcttccaaggatgctatgctgatgcacaaggtaggattgtacagtggtttgcgtgctccttattttgatagatcacatggctgctagcactctacccctctttccctttctatcatccttgctcagtatttgtttttttcactttactggatggcatctttaccatgaacttgatttgttatgtgcagcttggggaaaccatttatc

SEQ ID NO: 18128 - DNA, 16660 bp, Oryza sativa
tctggcagttgtcaatacccaaactgccggaaagtcaagggactgtttcgtcatgggatgcagtgcaaaacacgtgcttcaggagggtgtgttctttgcaagaaaatgtggtacatgctccagctccatgcccgagcttgcagggactcaggatgcaacgtgccgagatgcaggtgtgttggtgcttctcacttttgttccgtcaccttgccttgtgcttgatctggaataacaccctgaccacttacggaaactatacactatgcagggatctcaaggagcatcttcgaaggttgcaacagcaatctgattctaggaggagggctgctgtaaatgaaatgatgagacagagagcagcagaagttgctgcaaacgagtagtggcatctgtacagctatatactgtggaaagaagatagggagcgcgcagtgtcgctgccctcgctcattcccactcccaagtagaagcttgggatatggttgaattagaggatctagctaagaagttgtctcagatggattcgtcccatgaaactgtcctggagatgcaagacgtcgcgcattcttccgccagttgttaacctatggcttggaagcctgcctctgcctcctcttcttcaaaggaaagaaatgaaatggatgaaaggggtgtaccacaataggtggtaactactgtgttctgtgctaactagttgcaccctgctgacggtgcccggtgaaatcgtcgtcgtcgataggacccccagcccttgggtgtggtgattcttttatttgacctcctgtactagtggaactaatcttgttttgctgcttgcctcctcttcatgtataataggtttctggaactcttattgttgatgaaaaattggtctagctgttccccctccagcaccttgttgttgttgttgcctccatcaggagtgagaggggtatagggaagaaaaaaggaagaagaagagggttgggcattggatatgaattgtttatttctgccccccattttgtaggaaccaatctttgttttaaagtataaaagcatagcatatcctgcattctgttgtatcattaacattacatctcctgcatttcttcttgtttcccctctgttgcatttcagctggctatttctgtgcaatattttctctctggaaatttatgttttatagtactatccgtcctagaaaataatgattttttttgacacggatattaagaaactccatctacttttgaaggcaatatttctaaatctgaaaattttacttttgatgggcatatttcaatccaaccagatatcttcttaatgactttctcggatttaatatgtaactatccattctttcacacaagattggcattattccacacaagattggctacatgctcatggagaaatgtaaatattaaggcaaatgaatcgtttatttacgatgaataactagtaacatgtttaaatgaatgataagtagaattacttatccttggtcattgtgctaagatgaaatataactatcaaaagtagatggagtgaacatgaaggttgtgattgtacgagggaaaaattaaatggtcgacaattatgattggttagaaaaataacgttcgtggacaaataaagaccaatgttgttatactccattacggaacggattgagcaagtttttttttggaatttcacctatataagtgtgtcctgcttctgttgtgccactgccagtaacatgtgcacccctacattaattgctgtgtttcctcccctactattatactctggtcactgtaaactgtgcgcattgagatttaaccaaaatttcgaaattcgcttgaatatcctatcagttcgaattttgataccaaaggcctcatgtttgaattacgatgagctcaaagcctcgaatccataacttcaagcccgaaccctgaaatcctggccgtccatttgttaatcgggcggttggcaaacaccctgcttgctgttctatccgcgccttgcccgccgtcgcgtgtggctctcgcctcgacgaccatggcgatgttcgcgcggcgcctcctcgtcttccacctccgcccgcccgcgcatcccctcgcagccgccattgccgctccccaccgccgccgcaagcacgacgccgtcgcgtgcagagccgctgcggggaaggggacgagcaaggccagggcgagggacaaggacggcagtaagcggcagcagaggcgggcgctggaggagcacctcaagcggcgcacgcgctccggcgccgccttcgacgccggcctctaccggcggcactcccacgcggagcacgtccccgtcatgctcggcgaggtcctcgccgcgttccgccgccctctcccgctccgctccttcgtcgactgcaccctcggcgcggccggccactcgctcgccgtcagtagtagttccccctcctgttctcccttacaattccagttacctttacattgctcgccgacgatagctgctcgacgaaatgctgcttcttcttcttggctctttagtgttatccgttgtgtgatcgttgatgcgcaccagctgtttgatagaatgcctattcggcttgtgcaatagatgatggaggcacacccggagatggaactgtacattgggatggatgtcgatccctctgcgctggagattggccggagccgtatcgaggccttccttgccaatagggaaactaatggagatgacgaagatgcctcgcagggaacactgcgtgcatacactcacgccaagaatttcaagtacatcaagcatgttcttggcagcgtggatgagaacattgctgttggaacgtctggagttgatggaatcctcattgaccttggcatgtcatccatgcaggtcaggtgttccgtaaaacgcagtgaaattgatggtaagcctcctttatttcccatttagtcatctgaatgccctgttgtactatccacaggtgaacagatcagacaggggatttagcgttcttcaggatgggccacttgacatgcgcatggatcctaaggtcagtgttgctttgctctagtttactgcccattccttccttccacttgcatacgaaaatgcattgccacaaaattttcttctagttgaagggctatgaacattgattgacaaaactacagtcttacatcttcatcttgttaaagtctagttttgctggagcttggaaaacatgatcccaaaacatttttatgcataatgcattcatattgcaatgcaaacttgtataaaatctttccagaaatttctaaaacattgaatcacactccagtccattttatttggatctgtcttgactgtagttacacttgtgttgacaattggtatttcactttttgcaaacaatgttaacccagtaaattaatacattatattacttgaagtgcaacacatccttaccaatggcctgttcttttccatatgaataaactaccgttagatttgccatgtccaaaaatttcaaaagaacgtagatttagtgccactttatcatttgcagtaatccataatcaactagcaaagtgacaaagccccaaaatagcacataatcttaatcttggttgccttgaaatctttgtactacacctaacctatatatgagattagacaggcaactttgaaagcagaagatatcttgaattcttggcctgatcttgaagttgggcgtatcctgcgtgattatggtgaggaaagtaattggcagtcccttcagaagcggattgttaaagcccgggctatggggggtttgcactcgacaggggagcttgtcaaacttatccaaagaacgtgtaccagttcagggggtatgtatgatgatggtatctctaaatgtggttatatgatttgtgtatgtatgacctgatgttttatgacaaacttataaactgcaggaaggcaaggttggattaagactgcaacaagggtgtttcaggccctaagaatcgcagttaatgatgaactccgaactctagaagatgcacttcatgcatgctttgattgcctagcaacagatggtcgccttgcagtaatctcattccacagtttggaggatagaatagtgaagcagacctttctggaacttattcatgaagatgaaatagatgatgatgaagacgacttggtgagtgctgacattgatagtgaagatgaaccctggtttaagcagagagtgcaaggaaagaatggaaccattctaacgaaaagaccaatatctccttcacaagaggaggaagaactgaatcagaggtgcagaagtgccaagctcagagttattcagaaggcgtgaacctggattaatcatatgatgactaaattctgagctctgaggagcagtgaggacatccatgcgtgaactcatataacatgtgaatgatcgcgcttgcagttgcaacaataataactggaaaaactagctcgagaggatgaaatggccatcctgtttctgcagttaacttagagagtagagcttaggtaagtccaaaaattaatctcactatttgcaccaccattttgtaccccattcatgtacactaaactctctaacaatagtttttactgcatctcttcttgttttttttttttggttatgcaggaagcctctgattaaattgcatattttaccagctaattaaacatatgatggttgtttgacttgggatttcttgctcatatcaattgtacttgtttacactcaagcagggtagggaaccaccacaaaataagtcaagttcagataaaaccaaaacatgcatattcagaatccaacgttggtgctcatcttgttcttggcagagatatggctacaaccttttcgtggctcacattgtcacccaatagttgatagtacaattaaagatcacctaaatttaagtcatttacttctcatatttcatattataagttgctttgacttttttctaatcaaattttaagtttaactaaattcataaaaagaatatagcaacatttcctacataaaataaacatattatcaaaatgtattaaaagttaattgtaatgaaaataagtttgtattgtaagtaatgctattttttaaaaaatttggtcgaactcaaaaagtttaacttagaatatattataatccgctttaacttttatctaagttaaaactctataagtttaactaaatttataaaaaaaatatcaattcttataacactaaattagttcattaaatctaatattgaatatattctaataatacatttatttggtgttgagaatattgaaggatttttctttaaatttaattaaatttaaagaagtttgattaaaaaaaaaaaaggttaaaatgtcacgcggacgtacgcaggcaagccagcgacgagtccgtagccaccagcgagagcggtgaatccggcggagccacgtcgccggcgccgccgatcgccaagcccacaagccgccacgtcaccctctcctcctccgcgccacattttctttaaattatttttctccaactcttaaatcgtaccatgagtcactgcagcgtgggccccacctgctcttctgacaaccacatccacaagcaccagcagccgcgagattttcttttcttccatatataagcagtgaagcagcgcacacgagcagccaagaatctctctctcgcgcgcggatcgcctcgaattcgcgagctcgcggaaatggcggccatgtcgtcgcgctgtgcggcttcctcgtcctcatccgcgttcctcagagctccgcttcccggcggcaggcaccaccagggctcttgcggcttcgtcgccgccggcggcggtgctaagacgacggtgagggttgcggcggcgctcgacacggaggccacggcgaaggctggcaagtcgtcctcccgggcgcggcgggcgaggaaggacggcggcgagcccggtggctcctcctccaccgcgctgcttgctcctacccatcccgacggcggcggcggcggcggcgtggcgctcgacgacgtgatcgtgaacccggtggggctggggcggcggtcccggcagatcttcgacgaggtgtggcgcaagttctcgcggctcgggcagatgtcgacggtggcgtcgccggagcaggaggagcaggagggcgtcctcttccgcggcggcggcccgatgtgcgacttcgccgtccccggcgcgcaggacaccaccgtcctcgtcgtcggcgccaccagccgcatcggccgcatcgtcgtccgcaagctcatgctccgtggctacaacgtcaaggtcacttacttttacctcttctttcttgtcaagctttctcatgtcaaatcaacaaattttgatcaagggtgtgtttagatctttgggggtaaagcttttaaagtatactgacacatatttgaagtattaaacgtagactaataacaaaacattacagagtccatctgtagactgcaagataatcttattaaggctaattaatccgtcattagcaaatgtttacggtaacatcacattgtcaaattatggcgtaattaggctcaaaagattcgtcttgcaatttatctatgttattttttttttgaaacaggctctggtcagaaggaatgatcaagaagtgatcgacatgcttccaagatctgtggacattgtggttggtgatgttggcgatgcttcttcagttcaagctgccgtgtcaggctgcaacaaggtaatctactgcgcaactgcacggtcaacgattaccggtgatctcaacagagttgataaccaaggcgtgaggaatgtcaccaaggccttccaggtagttcttgtgaaaaatctttgaagaaacatgcaaatcaatcttatttagatttctgatatgtttactgaactgtgatttactttgcaattcaggattactacaatcagttggctcagtcaagggctggtaaaagcagcaagagcaaactgtcgattgccaagttcaaatctgccaaatctcttcaaggatgggaagtgaatcagggatcatactttcaggatatttatccttctagattcgatgaaggcaccgatgcatcgtttgaaatatctgaaaatggacaggctgttttctcaggtatcacctgatatgaaagctattacatcatgatctctgaattgtacactatagtgagattgccttttttaaaaaagtattcagatatattgcttcagttgatgatttttcatttgtttttaattctcttatcaaaattttctgtgattagggtttgttttcacaagaggtggatatgttgaagtgtcgaaacggctttcgctcccactaggttccaccctagacaggtgtgataagattcttcagtttattttttcttaataagtttgcctgatgttgcaaaatcatgacatgatctgttctttgttatgctgccatgttctacctgaagatacgacggcttacttctatccgtgggtggaaatggaagatcatatgttatcatccttgagactggtccactagctgacacctcacagagcaagaaatattttgctcggatgaacactaaagtagggttttgcagggtaagtggcaagtgatgatcccacttcactaaattacctgtttctgcattgctaatcggagtgatcagttaactaaatgctgaaaatattcttgttctgttcaggtgagagtgccgttctcagatttcaggccagtgaacccacaggaccctcctcttgacccttttcttgtgcacacattaaccataaggtttgaacccaaaaaacaggtcagtgcaaaatgatttgttgaatcaattggagataggcaatgcttctggaagttgttagtttaccaataaaatccttgtgcagagacctggtgactcgtctcaaggagctagtgacccaagaaatttccagcttataatggaatttataaaagctctacctgtaagtaattcacctgattctatcaattgatctgccatttaaatttccaatgttgcagatatttaccggaaatttcatttgttttttgcagactggtcaagaaacagacattgttttggtttcatgcacaggctctggaatcgaacctaacagaagagaacaagtcctcaaagcaaagaaggtatcacttctcataaccacacatcaaatgcaaactgttcttgatgcactcttgatacaaacattaaccagtttattatctctctaggctggagaggatgcactgaggagatccggcctcggatatacaattgtatgcccaggtcctctgcaggtacaacatctgaatgaattggattgtctttttttttcttttcctaaatgtatattttcagcaccagttgtttctcatgtagtgcattgcatattgatattgctgctgaatttcagtacaagctgtagctacataaaccttagtgtcaaaccgatgaaactaaatattcatcaagcaagcagccaagatttaagcatgcaagttgatcactaatcatagaattgagtgtgaaatttgagtataaattatgcttatttccaagccccaaatatactttcttcagtccatactacagtatagtataacatagtatcccttcttcattccaggaagaacctggcggtcagcgtgctctgatctttgatcaagggaacagaatctctcaggtgacatagcattcactgcgtgcaattatgcctgatataattgcatgttcaatgttagtatacatgctaaccattaggcttttcaactgaaatataaatgcagggtatcagctgtgccgacgtagcagatatctgtgtcaaggcattgcacgattcaacagcaagaaacaaaagctttgatgtaaggaaaaaaaaaaccttgtattgtgaactggccatttgtgcaacaggtagtgaaatgactaaccaggacaccaacctgatttgtgtaggtgtgctatgaacatgtctcaaagcaaggggatgagttgtatgaacttgtaagccccaaaactgaaacttcagtagattcatctttgtacagcaattcgcaaaatttcttctctgatctgtctgtgttttgcacttttgctaatgatctgtcgaattgttttcaggtggctcatttgcctgacaaggcgaacaattacctggcaccagctctctctgttcttgagaagaacacctgattgatcaaatgatcagtgacccatcaaattttatgtcattctgggtcagattattgtccatgtgtatatgattcatcttgtaaaggttttccttttctcatagaaaccgtgtggagtccacttgtgccatgatgaccgtctccagcacaaaagtgaaggagttgttgacaaaaaaaatccatggtcctactactttcccatctctgtaaaacttgtagaattttcataacaattgggcatgaattagggtgtgtttagttcacactaaaattgaaagtttggttgaaattagaacaatgtgacggaaaagttggaagtttgtgtatgtaggaaagttttaatgtgatgaaaaagttggaagtttgaagaaaaaatttgtaactaaactcggccttaggcccatcctatatagcaattttgagaactttgaagaagtaatgagcatgaggaaagtgcatttgtctaagaagtgaatatctcccaatttgtgtacatttgtatcgtttcttcaattttgtcacgctcaagaagctatgagtatgaattttagaatttaattctatgattaattaagggatgttcttcgtcacttttgttgcctagttctgtgataataatgctatcaaaacaagtaaaactcaacctaaaatttttttgaagtcaaactttattaggcataccaacttaagtttctttttcttgtttccatagcaaagccaaagggagtctaaatttacacctccatcgttgaaacattggcagtggctttgctaggcatgccaactcacgtatcaccctctggtaccacctttgtcatgccaactcatatttctttctctaactcgtgtttaggctcattttgatctgtatgagaaaaacctcgaaaatttagaggattttaatcctattgaaaaagtttctaagggtgtgttctatagtacaatttttcaacttctacttcctcaaatattgcgcgtacgcttcccgaagtgctaaatagtgcatgttttgtaaaaaaaatctatacaaaagttgattgaatgtatttttagctaatatttaattaaccatacgttaccatttatgtgacagaagtgttttcaatccttcttaccgaacctcagataagaagccctttgaaaaaaaagatagaaaaagattgaaccatatcaagtctatctctctcatcttttttttttgttttttcctatggtatattcaaacgacttatattttgcatttacatttgtatgaaaatactatgcttttatattcctttttttttcttaatccttcaattcaaaggatcccttaaatttaacatattatttaaaaaacagaatggagatatgttatactataaggacccacatgaaaagccatccaagtatttcattatacaccactcttcattagtactccatccatccattctaaaatataaatatttgaacttctttagaaaagattaaagttgagagaaaacgattttatttttagccacatctttgatcaaattctgaattttgaactagttagattctttctccaaccttctgattggtcgaaaaaatactgagattttggaactgctctcagccggccaggcaagtgttaccaaaagataaaacacggaaaggaaagaaaaaacccagagatgcgccctgccaggtcagctttccgccgcagtctgcccctctgccaccgggccccaccccccacccctgccacaggttactgcctctctctgaccccattgaccaactccgttgaccagtcaaacctctctctccctttcacattttcacccgcctctcgccgctgccgtcctcgctatgaaatgaaatgaaaccaccaccaccaacgacttcctcctccacccgcttcgtcttcgtcttcttcctcctccacctccacttgatcccagcatccgcatccgcagctgcagcagcagcggcgaggtggaggtagctagatccgtgggaggtggtggttgtggtggtgagggggagatgaggggggaggcgaacggggaggaggagcagcagccgccgcggcggaatcatctgcgggacgacgcggaggaggaggaggaggtggagcggagggcggcgaggccggtttccggtcagcagcagcagcagcagcggcggcgaccgacggatgtggggggaggggcggcgatgaggagcgtggggtacgtcgggaagcaccgcctctccgccgccatcgcccgcctcgaccaggagctccagtcgctgcaggtcagcgccacccccctccctcctcttcctctcatctcccatgaacttgattctccgtgtgcttattgcttatcaagcactagtatgtgtgcctttactgtctctgtgctgtggcctgtggatgtgtagcgagtcagcagttcaagctgtggcgcgatctagatcttgagaaaatccagaaaccgaagttttttttttccgttctatcaatgccttcttggcttcttctgttgcgtatgcatgtactgatgtatgtgtacaatcagtacatgcaaagggaaacaaaagagttcttcctttatccacagcttttgttcttacattgaaaaattatgaaagcgttgaaccaaatcacccagactactagacttatagtgctttaaaattaggagtttgtcctaatttgttttttttacattttgtccatgaaacatgtccaccattgcccatattaagccacataatctgcctacttttgtttaagcgggttgcgagtttgagagctttcagggggtattgacaagaacacaagtaacaggattctggtggtctcaatgcatatatagatgtctcctactggacagcttgagctgtgctgaaaatatgattctgcacaactttctgaagtgcagcaagtgttacgcataatgttccaccccctcagtgatttagatcctaaagcagcaccagtggacaagttgaggtacttgcatcccttgtcttcacttgctcttctggcctgtgaccctcagaaacacacatatgttgcttgcctctatatggtagctttctagagcttgttagtgaaacatttgatgggaactgttgactgaggcttataatttgaatggttgaatttgatgaatctactccattacaagtatttgttattttccactatgttctctgattttcagcttctctctcctaggaggaccttgtttttctcctaggggggtaggggatccacagtagtcttctattctcttgggtttaattctctgtattttttctaagttagtggaaaacaagctatgcgcagagagaactacatacattggcaagaagaaaattcagtttcccttaatattctgcatcatagacaggttggatagattattgtgcaatgcaagattcttcaagaatctctccaggctgcattcgtattaaaggttggtgtgcttagcgtaatcctaatagtataaccacctctataaaatcctattcggtccttctggtgctaggccctggaattggtaattaaagtcctggatttagtaatcggaatgaatatgtgctattactcaccagattacgtgtaattatttgtgagcacaatcagttcaactattcttctcatttctgttcgcaaaaacatcttgtttcatcatatcagttgaaactatacagtgagaaattcacttacattttctactggtattttgtttttacttagccacgtttattagaaatattaggctaaaaatcctaactaactcatcgagaggacttttcttatgatttcatttggtttattgtcgccatgctttagttttttttttttatttattgtgatgtatagtatatgtgcatttgacacaggatgaactgaacgagcttgaaaccatggaaccggcatctgctgcatgccaagggtaagtaaattctgagtgtagcatttgttttcccttgtacctaacgtttctctgttttgtgattcttttgtcctcttgatcatgccagagtgatcacaagtacagagggaaaatccgacccgcttcttcctgtgtaagtcgcgatgtttagctactcattctagtacctcaccctgcaagatctgaagatcgtactgcataaggacttgtgtaaccatgatctttctcatctttacagcaccattggtccagagaacgcttcttgggagagatggtttcagcgcgtgcgtagctctcgcagtaacaaatggtgggcatccaaaggctcagatttttcctagccccctcctgcaaagatgagactaccagctttgtgcagattaaaatcacctgaactgtatcatccacggatggcttggcagccaacaagaacacaacgtcgcttgccgccttgcgggctgtctagttcttctcaggacacgcaatagtttttggagagaattgctattgttgttaatgtatgtaatccctaacacgaacatggacgaatgtaccgacattatcttccagagctcttgattagctctgcttgattgattctaatgctttcctgcaatgccatgcaaaacattcagattgcgatgcacaatatgtccatggaaaggatctgggaagaaaaaaaaataacaccaggttctgacctttgacgctcagaattttacatgtgctgtgctgttaatcttcagtcactggccagctgtttatgcaggttatcaacttatcatgcaggtttagtctcgactctgaaatagagttgccgtggttgtgaacaaaatggacggcaaatcagctactccgtcctgaaatataaacatttttaaaatagtgttaagtcaaatatttttaataacaaaaatatagaaaagattaatcatcattaaacacagtatcataatatacaactctttttatttaaagctttttacttttaaacatattattagtcaaagtttcatttcgaaaactatgctaaattcaaaaataattatattttgggacggagatagaactcgctactcagcaccgccacccagcccagccatctcctctgctctctctgccatggcttccaccgtcgccttctccgtgtcgccaattgtccgccgcctgcactgcaggaggccggggaggggaggactcggaggagcacttctatgcccgtcccgagaaccaaggccgtggcccgaacgccgcggcggcgtccgtgcagaccaaggccggaaaagatcaccgacgagcgcggagtggccgcccggctgccgttcccgacgccgcgggcaccggagatcgatcaggcctggcatgctcccccatagaagcattggattcgcaaagggggagaaatctcttgctgtcttcgtaatggacaggtgagttaaccctattccggtcgatcgatatgagaagtttactggcaaccataggtgattgatatgtaacacaacctcctaaacaatccgcattaatcacattgtgttcatctatgcaacagtttagtacacaatccatggtttaacaacaattcaaagtggccaccgatgagttgattgcacatggtaaaaattgctgatagactttgggcttttatccctctaaaaaaagaattgagatgaaaaaaaaaaaagaagagctactacacctttcacgatgatggctgataacacacacgagcattttgtcttattttatttggatgcgaactctgaaataccagcggctgacttagattccattagtactgatacccaattaccccttttgttacgcaatgcactggatagaaatagaataatggctgatatcatttgagatgtcagcggctgggttctattctccttttgacttgtatctgattggtactgatttctgttttgtcagcggctcaagattggagacattacttatttaccttctgtaccattagtgtcaattcccttttgttatgcaatgtaatggacatctatcttacacgaaattgaccatcatattataaagataaatcacaatgaaagtgaatacacaatgcaatagatttgatgcttctgaaagcatttctgttagtcttaacctcttatttttccatggtatgaactaatcagctgcctagagtgacccacagcactgctctgcctgcaacattgcatatagtaattcgagagcacatagtaaaccaaccataatgatttcccactttgacttttggtttattcatacgtatctcttgcatctctaggactttataaagcatcatttgttgttttatgcattgttactctacacagcaaggacctcagagaaacatacaagcaaggtgaaggttcccaagatgatgtcctcaattgctgtagcagcagctagcgctgggctacgaggactagcacagcccatcatcggcaatctcagcagttttgcatctcgctacgttggagtggacatggcacgtgagatggtagacctggagaccatcatccttccccagctcaacctgatcattgcatctgccgagagccaacctcagcatgtgaataacatagtgcagaaatgtctgcaaagactcaaggtagagctgtctcaagctgaagacctgcttgatgaacatgagtacgatcttctcaaacacaggatgaaacagaagaaattatctgtgttttctgtacatggtcagtgccagggtcctatttcaaatccttttatttgggttctcagtaatatatctagcttatcccctcacaacactaagatgttgaatcatttgaaagaggtcaagagcattttagaaaaagcaaaaaatttccttggtgttctttcagttgcaacacaagtgagtgctgacactgcaggaagcagggttattcaagacacaacaacctttcgtgaggaaaaggtttttggacgtgacaaagatcgagattctataatcaacctcttatttgatcctgccatggttggaggaggaaattccaatataaaaggctacagtagcatcgcaattgttggagctggaggcgcaggtaaaactactcttttgcaatatatctgctctgatgatagagtacagaacaatttccatgttatttgggtatgtatgtcacacaagcttgatattcgcaagcatacgacagaggttattgagtctctggccactgaggaaactcctaagatacaaaatctcgatactcttcaaagaaaactcaagaatttgctcctggaaaaaagggaaaaggaattattacttgtactggatgatgtttggtttgaacaaaggcaccatagtgagtgggaacaatttctggcaccactcatctcggctgaatttaacaagggcatcaggattcttgtttctagtcgttccaaagaacttccttcagttctaaactgcaggaaaacagtttctttagaggacatagaggagaatgatttcctaacatttttcaggtactattcccttggtcatgtcctgatagggaacgaagtagtagaagaggaactacaaggaatcggagatgatattgccaagaagctccgacggtccc

SEQ ID NO: 18129 - DNA, 13556 bp, Oryza sativa
  unsure (1)..(13556): unsure at all n locations
tgtgctgtccctctgctttttcagcagttacacactaccaaagcacataggcaagttgaagcatctcagatacttgaatctggaaaggacgtccatttccaagttgccaaaatcttcgtgcaaactataccacttgctagtactcaaaatgaacaaaaaggtgcccaaaacattgccaaagaaagcaaacaatctcatcagtttgaggcgcatcaacggccctttgaaagacgtatgtaatgtcgggatgcttacttctcttgaagatatgaaagaattccaagtgaagaaagagaagggatatgaaataggtcagctaggcagcctgaccaaacttcgaggacatctccatatcatgaatcttgagaatgtgcaaaataggaatgcggcaaaggatgcaaagctccaagaaaaagccaatcttgatgcattgcggttggtgtggaaccatgacacatacaagaacaacaatgttgacttggaggtactcgagggacttgagccttcttcaagactgaatgaacttgcatagaaggttacagatccacttcatacccaaagtggttaagcggttgctctcaaagtttgaggtctcttgagctcttgaactgtacctttctagagaacctcccatccaatcttcaatgcttcgcccgctgccgtagtctagctcttctgaatctcacagggctcaagaggctgtcacctctcccagaaaatctcacaagtttaaaattcggtggatgcccgtcactctgcttcatttcaaaggaggaagaagaacatggagtaaacccggccagggagaaagctttgcagcctctgacgagctctaccgagctggaaacacttactgaaatcctaagactggatgggtcagaactggagcagtttcaggcatgcttccaggagctccagtatccagtaagcacaatttctgccagacgccgtgatgttgcgcaactggtcctgccattaacgctccggaggctcgagctatcaagctgcaacatcacagatcaggccttgtctgaatgcctgcgaagcctcacctctctgaaagacctggcactgttgcatatcaccaccttatctgcactcccgtcaaagcaggttatggagaatttgtccatgctttcatcggtgggcataacttcatgccggtctctctgctccgtggctggcttgggagccattgcttcacttgagaagttcgcaataagcttctgtccctcactagagctctcggaccgccgcatccttccctcccagctgaaggaggtcacggttcgtggctgcacgatccatgatggttttctgcatgatgatctaccatttctggtcaaccttgagatatccaaatgcagaaccccctcggttctacaagtcggtgcatggccttctctcaaatgcctgaagctgtgtgattgcctggatgtttgcttcctagtagggttacctgctctggagtcactccaagaagtgcagttggtgctcccaaaccttggagctgattcttttaccggatgcaaagggaactggagatcactccgagttaggacatcatctctgctccatgatttgtctgaactagagggctttgcgcccccgatgctgctgacaattgagggttgccaagagccagacttctcgttggagggcattcaaaatctctcatcaatcatcggcctgagtttcatgaactgcaaagtccaatccatttcagcaatgaaagacctcgcgtctttggagactcttgccttctttgactgcccattgctgatttcattgcctgaactgcctccatcagttcaatatctggacataattggctgccaaatcctggagaagagttgccgatcccgtcgtggggaagaccggcgaaagatttctcagatccctcacgtggtaatgtatgagtaatggtgatgcttggaacgctgcgagcattctgcaaggttgcaattggtgttcacttgtttatcctagatatcctgcaaggttacttggagaaatgaacttttcaccaattacactcgcagatagatttagtgattttttgaaagattaactgtaagatttcgtccttcagtagatagatacccctctatgaatattgtcaaaatcagtgagtgaattggggatttaactgttgatccattgagttggcccttagggctaatatgagatgaatacaacgtgaaaagacagaaataccccttaacatatacacactaagggcctggagctggagctcagccaaacagtttcagctccaccgaaatagggagtggagttgggtgaagctctctcacaaaatgtaccacaactccactctagacctaactgctgaagctaaatttaggagttagagctgtaccgaacaggcccttaaatcttggtagctcaactcctaatatggtgaaaaattgcctctcaactctgaaaactgcttaaaacttcatttaaaatctgatgaaaggggagacataacgattaacgtgggacgaaatccctatatgacaagtgaatactttcgtcaggttttcagttcttcctgtccttctcttcgattcctcgtggtctggtctgccatggctaccaccgtcgcattctccccggccgtcgccaatgctctaggagagggaggaggagcgattctctgcctgccttgagaaccagagccacggtcgttagggccggcgaggtcggggaggaccatcaaggagtgcgaggcggacgtggtcgccggaaatgttaggaaatgataggcaacaaacgataaaaaacaatagatcaatcacaaaagacacgagatttaacgtggaaaaccctcccaaaacaggagagaaaaaaccacgggcgccaaccaggaaaatatcttcactatatctggggtnanncacaacgccgcacggcggcttacaagaggtatatatatggtagaaccctaaaagggatgacgatctgtttcgcgggggcctccgctccactacggcagaagttaccctttattaagtgcaaatgaatttgtatcagacctctgaatttgtaagttatcacatgaacccaacaagttacagagagcaatgtttcatctgctaggtgaagcctggatgtcctccggctgcaaaatctgatgatattttcctagtgtattactcatgttcagtacaattttctctagcataactgtccttgaaacctgtgtatatgtaaaagtataatttcccccaaagctgccgaatgagcttgtcccataatgacatcaaggctatgaaactttcccattccagccaggattgacaatgtgtgtagcagtccttgaaacttgaattaatgaaatgcacatatgatgcctgatcatttgtcacatatgtgcagctgccaagttctatgtgtgtcttatctcgtttcttgaatggtcgtattcgcaacgacattaaccatggtattgtcttgtaggtctccggcgagtactcgatgatcaaagccggcggcgcgctgaagatggtggaccacgagagggtgatgatggagtcgctgctgtgcctgcctccggcgagccggcgccgacatcatcctcacctacttcgccggccgccaggccgccaacctcctctccggcatgcgccccgtctcatccaactgatgcccaactgtactgtacgtgtgctcctctcttttcccctctgcatcgcgtattcgcggtacgtcgtcatcaatgtgttgcgatgcctggacattggggatgaataggatacgagatttgataggatcctatactcgtggggttcacatggtcattgacaggtggggcccacgctcctgctcccgccagtacgtggccctggcttccagtggccgcgctctactggatagagactggagtacctctgactcccaagcaggattcaccaaatcgttttgggtagagttaccgtcatcccgcggtttagcggttatcgtgaaaaccatgtgattattatggggtatactatgattttaaaaattgagaaggttaccgcacgtgtgataaccataataacagcactgttttataaatcctatgtcagcatgacgtatcggtgacgtcatcatctatgaattaccactaccctggttaattactccgttaattaattttgtcaaggtaacagcggcgtggcggcgcgaccaagctattcccagtggccgcatctgcgccatccagcccactaccaatgctactgtcctccaatcaaaccggctcattgttgctaagaaactagtaagtcagctgcaaacatattttaaaaagataaataaggagagagaagtgcagcgggctacttgtagccagctgtagcacgaactccaagacacagtgtgtgtatgataggtgggattagatattaatagtgtagtatgtaactattgtataaatgagctactagattagctattgataaactgaagctagtagttggcaatactattgaacttgctcgtagcagtgtcacgttatctgcagacagccggatgcacacgtcgtgttgttcgatgtgcaatcatcgagaagattgcactactgggggcacagggtagcgtagttggcactttgtgaaatgaacatggttcaccggtcccaacagccgatccattcgattcgagcaccctccaacactagctttgccgtacgccatcaggaaggaaggaggatgacacaaactgcaatgcctagcagagggttcccagatctcgagctggtgcgaacaacacaccttccaatcttccatatctcgtagtcctatatatgcactccccccttttcgtttggatgataagtgaaaaagacaatgctacctccgtcccaaaataagtgcagccatatgaatccatgtctaatatttgaccatccgtcttatttgaaaaaaatttatgagaaaattaaaataagttagtcacacatagagtactattcatgttttatcatctaataacaataaaaatattaatcgtaaaaaaaattcaaataaaacgaacgatcaaacgtgagacatgaacagtgtaaaactgcacttattttgggacggaggtagtacaacatactcgtttactttgaataaaaattttatatacttattcttaacgatgaaatagtaaaggctaaaaaaataaactttgacaaaaaaaaatcaaaataaactttaaaattaaagttgaaaatttaaattttctttaataagcataaacgaaaagatgaggcctcgcacacaaacaagaggatctttagtatatcctccatcttgttgcacgtacaatatgtgtttctaactctttgatagacgggttttttctccgaaacaggatagatttatgctaagaagatattacagtagatctttgttgttaaaagaaagagagagaaaaacatatgaacacttcaaacaaacgggttctacattttgaaatgtcgcaagagctgcaagaagacaaaccataacgctcgtagactctggtacatacaaaagtataagagcgagtatggaataataccgttttcactcttcaatcacctgatagatctataaaacggatggcactgatcaagttagcgtcttttgaaacaggtgctaccgattggattatcgacaacataacatgcatgcattggtattttatctgaaatattgatcatggtacaaaaagaatagtttaccactccacaaaatgggaaccgactatttcccatgctgggtcacttggacagttccatatgccaatgtcatcgagtgacagcataatcaaagtgacaacctttgggccaacgaatcatcaacttttttcctcaaaaatatcatcaaccctgtccttcccctagcataaatcggtctggctgattgtattgtgtattatatattaacgtgcaatcttttttgccgaaaaaaatcatcaaccttggtctaatgctttttagagaaaaaccacctgggctaatgttggctttggcaggagtcatagctacgcgatccaaaggttgggccagagactgaacgtaattatgtaacgtgatcgaacccaaccacacaaatacaggcggtcgctagcagcagcacatgacccccaggtcagaaacgcggagcaacgtgaccgcacgtgggccccggaccgaccgaccgaccgacggacgatccacggccaccggcgtcagccggccacgtgcggccgggatcatcctggccgtccatggcacctacttggcccacatgaacagccacgatgccgctgtggcgcttcgaccacggcgtctaccggaccaccgaccacagtggcacagtgttacgcacccctctctctcactgacccttgggcccaaccatgtaagagctagttcaataatataaccaactgctagcttaaaaaaggttaaaacataagtaatctataaccaacatactaacaatctactcatataataattagttatatatatatatatagcatataggagtataatatatcgtatcattaatacatacctcttccgctaaaaaagtttcaattctaagaatgaatttggacaatccatctttagaattttttttattggataaggagggagtaattcaatcatctctcacatactgtagtagcttgttttctctcttctccatataagggcatatttagttcccaaaaagttttttcctaaaacatcatatcgaatctttggacacatacatgtagcattaaatatagattttttaaaaaactaattgcacagttagagagaaaatcgcgagacgaatattttgagtctaattagtccatgattagccataagtgctacagtaacccgcatgtactaatgaccgattaattaagctcaagagattcgtctcgcactttctaggtgagttatgaaattaatttttttattcgtgtccgaaaacttcttctgatatccggtcaaatgtccgataagacaaccaaaaattttctcagagcctcagaggtctttagctcttaatccaggtgattatccttggaaagatggcacgagcccacgagagccatggacacatgcatatgatccatcgctgatggcgacagcgagaacaggaggcacacacgaagtacaagacgatgcccacttcactccctcctcggtttccagtcacgggcgccgatctcatcaaccacctgcatctcatctcattgattctgattctctcatctctctcactctctctcatcgcgtagctgaagacaaacgccatttcgatcctgatttgacaatcaccttgccctttgagatccttgtgaaggcagcaaaaaatttgagatcgcctctctcatgcaaacattctcatgtcattttgcatgaaccttaacgagaaactaatccatgctaaacatgagctgtcgtagatgtcatgtcatgtaattaagctcaaaattacaccgaaattaattaattaataaatccgatgatttgattcagatttgagaacgaggaaggaatcaaagaaagaaggaagaaagaatacatagcggagctcttttaatccaatttttcatccaatactcgcgaggaagaagaaatgaaaagaaaaaaaagaagaaagaaagcaaaaaaaaaaataaaaatcaagaagcaaaattactacagggagatcgaggtattatactggcgggcgccgctcgatccgccggcggcgactagttgtacggcttcaccggcggcggcggcgacgcgtacgacacgccgtacaccggcgggaacgggagcttcccgccgggcggcgttgacgtcgacggcgggtgtccaccaccgtggccgccgccggtgctgctaccgtgagacggcggcgagcagttgtgcggcgtcggcggcgggtggaagcttggccccgatggcgatggcggggtggatggatgcgagtgcgatggtggcgtggtggtcggggtccccgctcccggcacgtgctgcgtcggcggcgacgcgccgggctggcccgacggcggctggtagccggaggaaggcgacggcggcgagccggagaacggaggggtctaggggatggggccgtacgagccaggcggcggcgcgaaccgcacgtctggtctgtcggccgaggtcggcggaagaagcgtgtatgtaaccgccggccaagggtaggacggatgagtaggcgtgctctgcggcggcgagtgggacggcggancggtggagctcgacggcggtgacgggtgtgatggggtggtgtggccctgcggcggcgagtggtaggacggggtcgtggagctcgacggcggcgaggggtaggacggagtggtggatcccggcggcgaggggtgcgacggtgtactgggcttgccaccattgggcgacgggtaggacggtgtggtcgagctcgagccccccggcggcgagtgggacgacggtgtggtggcgctggatggcggcgacgggtaggacggggtgttcgaccccggtggcgccgggtaggacgacgacggcgaggggtatgacggggtaggagagctcgatggcggctgcgggtacggacctctgcgccgtggcggcgagctcaccggcgccggtggcccttggccaccacgtccagggctaccaccgggcgtcggggtgtaggacgcggcctggcattgcgccttgctgcagtcgaacgggtgcgccgcagcggcggcgcactgcgacggcggccgctgccccggcgcgccggggatgcagttccacacgccgtcggcggtggccacgccgcagcccgggcgcgaggtgatgaagttgtccgtgtaggtgaagttcttgaggctggcgaggccgcagacgccggccggcacggccccctcgaagaggttcctggcgacgtcgagctgctcgacggcggccatcccggcaacgctcgccgggatcgggccctgcaggtggttgtcgctgacgtcgaacaccgtcaccttcctgagcagccccacctgcgtggggacgcagccggtgagctcgtcggcgatgagcacgatctcgttgagcgtgtccgccatcttgccgatggacggcgggatgcatcccccgaggttgttgtgcgcgagcacgacgacgctcgccggcgagttgccgaggttggccgggatggggttgcggaggcggttggagttgaggaagatggcgtcgagcgggcggtcgaacagcgcgggcgggatggagccctcgaagtcgttgaacctgaggtcgaggtagcggagcgaggggagcgcgagcaccacctccgggaacgcgccgacgaagcggttgttgctgaggtcgagctcgtggagcaagcggaggcggcggaacgtgtcgggcacgacgccgcagaagcggttggagttgaggtggatgagggcgaggtcggggagccccagcgggagcgacgccggcaggtacccggcgatgtcggcgtggttgaggtcaatgccggcgacgacgagacctccacctccgccgccgccgtagccgggcgacggcgcgcagtagacgccgttgtaggcgcagacgttggcgccgacccagctggcggtgaagttggaggggtcggagaagatggccgtctgcttccacgcctggagcgcggcgtacgcggcgcggaggcgcgggttggggaacgcccacgacggcggcgcgtcgtaccgcgacgcgaacgacgccgcgtactcctccgacacgttgccctcgtgctgtgccaccgccgccccgagcagcagcagcagcagcgcccacgccgcggcggcgtggccgcgagagatcatcgtggaacgacgcggcggcgacaggagcttcgctagtgggaggcgagtgtgcagtgtgtggcagtgtgtgggggagcgtgggggtgtgatgtgtgaggagagggagtgggcattcagagcgggtcacatgggtggagaggggtcacatggggggtggcggtgcggcggtggaggacgaggcacggacgaagaggagcgcgaagggagcgttttaacgtgggggagtttgatgattttttcccattttttgaatttttaaatttaaaaaacaaatattttcaagacttattttctactcccttcgtaaaaaaaaatcaatcctaaattaattattttgggactgatggagtagatcagaacatttttccgctccagctcaacagcagctcaacaacactgttacaccggtctaaatggcgtgaccagtgctatttgatcacgttgattcatggatacaccaattataatgttgttaggataatactatcacactaattatagattgtgtgacaattttattttagcacgctagacagtattggtgccatggtgtggctgaaagtttacagattttgaaaataagtttttgaattgtttattttttgaataagaaataaaaattcgagtttggtggtttggcggtgtgattggggacgtggacggatggatgggttgcaatgtggaggtacgtgttggttgctgcgttggagtagtgctgggctgctggctggtttggcgagctggatggagttgtttacgcatccccatgtatggccgtggcgtgatatggtactacgcgtcggtgtttgtgttcgaattagtaattcaaaaggttcgcgcctgtggcggcgcagagcagacagccaccatggatttcagtattctcccgccatctactttttaatagttatattttatcttaaaaaacagaccaacgatgagtcattctacttattatctatttaaatacactactagcatttctcgtaaacaagcgattcattaatatttacatttttcgatacccatgtagccaatcttgtgtggaagaatggagagtcacgcattaaatttaagaaagccattaagatgataatttgttggattaaaatatgtctatcaaaaataaattttttagatttggaaatatgactatcaaaaatagatggagggagtatttcactagccgtatccagagtttgcaaaaccgctcggtttcagtcttaaaaatcaaacgatttttaaatttttttgacaacaatttaaccacatttcgccaggagataaaggttttcaaaaaacttctaaggatgtgtttagttcacgccaaaatttaaagtttggttgaaattggaacgatgtggcggaaaagttagaagtttgtgtgtgtaggaaagttttgatgtgatggaaaagttagaagtttggaactaaactcggcctaaaccttttttttttactcgggaacggtttgatgaaatcctggctgtattgctgttttagaaaactctttttggtgaaaatgtaaatttaagcatataatccgtctatgcttctgtgtggaaccaagcgagcgatgaatatgaaatctcacagatattgagctgattttaacaaggttcatatagaatcaatgctttcctgatggacgtagcccttgtttagttctaaattttttcttcaaactttcaatttttctatcacatcaaaactttcctacacacataaattttcaacttttctgtcacatcgttttaatttcaaacaaacttttaatttttaacgtgaactaaacatacctgtagtgcaattcatgcataacaaaaggacgacctcagattccagcgacaagaactgtcctgagcccaaaattgatggtgttcacctacggagtacgttgcaagaaatggaaacttgaaagtgatgtggtggagacaaggcttaacacatgcccagctcaatttactctccagttcaattagccagtcttgactaaactaattactactattactactaactgggaatcagatcatggaccatgcctgcattaactggaccacttggttacttacaaggattaattaccaccagctagagtcgtcgcccatgaagtcgttgcagttaattatgcaaggtaagagggtaattaagaggcgcatgattaggtaaggatcagatccagagaacctaacgtgccggccaggttagagtaatagttgcactagtaatacatctccattccgtactgtttcctctcaaacgatttcaaaggcatccagcttcaaaactttttgaaagcaatgagaatgcaagaggaaacagcttgttgatgcagacaaaggtgtcagtaatttaacctaaacttcttggaagctggtgcattattgtatttgtccttttgggttccaactccagtctccagtgctcttaaacttttgatttcttttttcaacatctgataataatcccttcatcatccagagatcaatccagtgtttccacaggaagctctgacaccctctcccttgttcaattgctaattagagggtcccacagctccttgattgcattggctccagttgtactactacactgaagctctgcaatagtacagtaaaattaaatggaaaaacttagtggtattttcaattttacaggagagagaattagagaagacagtggcatattcatgagtaattagtcaggcagtagactaccaaaatcttctgcagtaatagcaatggagtctcttgcactcaatgatactacaatttgcaaagctgatcaatgaaataaagctagctagcttagactgtaaacgtgtacgaggtagtactacaaaagctatatataatgctactaccagtataattatactggactgccaagtagttgctgtttttttttctctttccaagagtgtttatataattagtaccccacttcagtacttcagtaggagatctatatacatgttcatgtactgtgctgtacttttcatccgagttggcgacaccttacagaatacagagagatatgcaaggacgtaatagcagccttcaatatgcagttatgccaatttgcaacatggagtagtagtaatgatcatggcaaagtataaagccgtatgtatgctagtatggctgtaacatggagagatgaatgtagttcacatgatcttgtctccaaattcaactgaaaaaaaaataaacgtacgaatcgtttggtttggtttggtcctttttattcggagttattaagatccatgtgatgaccatgtatgcatactctagttagcagttacttcctccgttgcatctatatgaatgtgaacaatgctagaatgacttacattacgaaatagagggaatactagtttagtattaaattaaactttgattcaccgtacaaatgaagctgggagatatcaatgaaatagacggtatcaaacagtagagtagaggtggtgaacagtacgacgactggtactcctgtagagtaccatatgtcatttttttcatgtatcatttttttcatgtatatatctgcatttccggcgcatttaataggcatgaaaaatgcaattagcagggcgagatgagattaatttggtttacacgtcacctcatgcacttcgttgttgatggaggcatggccatgtgcattaatcgtcgttggatcaaagatatgagaagcgttttgatcaatctgcattgatgctttacgtttgtatggtactccctccatctctttttatccttttt

SEQ ID NO: 18130 - DNA, 30602 bp, Oryza sativa
  unsure (1)..(30602): unsure at all n locations
gagtagtttgtgtcaatggttgttgaacgacatgcatctgcatgtgacattgtgtgcacattgccgtacgtactgcagatcgatggagggatgggatacaggtgtgcactgacagtactgaactgcaaagcttcggtgtgaggcaaggacatgttcgatcagcttcctttccaaccaagcgagtgaacacagaacagaatggcatataatgtttggttggtaactaaatttgtcacatctaaccttagtcaagtcacagttttagtaggtagtatttgactcttgccataagtctattttgtctaactcttagccacctagcccacatgtcatacactctattttcttgccaaacgttgcctaagcttagtttgtcattttgtttgccacaaaagtatggctagactaagcttagctaccttagtaaaaaaatgtgtcacaatattagtcccaaccaaacagaccccactcatcaagaatcttaattgaccacaccacaatttggctaactgaaatcgtgtatttgtaaaacaaaaatagcatggtgacccgcgcagattgcatggctagcatcattatattatctcatataatagcatatatgttttctcattatattattcaaatatattaaaatgacatcataattttaaatttcgtaataactttgcaaaactacaaatgtgtaatattcatattgtattttatatacgtgttatttattaattatttttaatatcaaattttagttatttgtaaattatatatattcctatatggactctagactcgtcttttaatatttttttaattctgaattttctgtaaattgtatttctatatggctcttcttccaatattatttatttttatttatgattttttattatttctaattgtatttctatgtggactctaaactcatctctcaatattctttaatttttaatttcgaatttcagttacttttaaatggtattcctatattgactttaaacttttcttcccatgtttttcttaatttcgaattttagttatttgtaaattatatttttatacggactcaaaactctacttttaattttattatgtttattccaaattttagttagttttaaattcctatatggactctatactttacttctaatatttcttattttttaattccgaatttctatttttttcttaattgtatttctatatggactcttatactctacttctaatattacttatttttaattccaaatttctattatttactaattgtatttctatatgaactctatactctacttctaatattccttatttttaattccgaatttcagttatttcctaattgtatttctatatggactctagtctccttttctaatatttcttattttttaattccgaattttaactatttctaaattgtatttctatatggattctagtctcctcttctaatatttcttattttttaattctgaatttcagctatttctaaattgtatttctactagcaaaaatgcccgtgcgttgcaacgggtaaaaaaattctaataataatatacttttttcatgcataatgatgtcaatgacaatgtttctattttaatgagcagcttgtttttttataaacagtgtttttttttcttttgcgattttctcaaaccatttttcagaaatggcgcatttctttctaacagttttttcctaccatgttttttttctttttttacttatgaagaaaaccatatttttctccctttttttgcttttcttttctcgtgtgtttttttttcttgttttctcgcacgtttttttgcttgttttttttcgaaggttcttttttgcttttttccaacacaggagaatatatgacaaaataaagccatgtagtagatggcaaaaaatcgatgtatcctatccgactcaagcgtccatcaatttagcttttttctgacagttttttcagagcgattttttaatagacggtatttttttcttgcccggttttttaaaaccattttttttagaaatggtgtgttttttcgatagttttttcctcgcatgtttttttttaaatattttaccgacaatggaaataatttttctcgcgcgtctttttattttttttattgatgatggagaacctttttagtgtgttttttgcgctttttttctgacttttgccccacacgttattttaaccttttttattttctcatgcattttctctttttaaatagttagattagagatagagaagagatatatactggttagaaatcagatttggtttcgccctttccatttttttctctcttgcattttttattttatacgaaccagctttttattttttacgaaccattttttcaccattttcttagggaatcgaacggacttttttagatgtttttttgcctctataggaatcagactttttttttccgtttttaaaggattcggatctagcgtttttttgtcaccacttttttttttgccttttatatgaatcagattttgttttccgtcggatctacagtttttttcaccactcagggaaaaaacttttgttgttgttgtttttctttattttctttattgtgcggtttttcttttttccttttatgcacctttctttctgtctttgttctctttctcttttattattttttaacaaaaacgacctcaagtagcttgttgcaagattatagggactcaaatgtaaatataaaaaatatagggactcaaatataaaagtacaaatccaaaaattaaaatcatataaaaatggaatgctctcgacatgtagattctatttttgcaaacagatctctggcacatcaatttttttcaccaatctgagtcagactttttttttggcttttctttttctttttatgcacctttgcctttgttctctttctcttttattattttttttaacaaaaacgacctcaagtagcttgttgcaagattatagggactcaaatgtaaatataaaattacagggactcaaatataaaagtataaatccaaaaattaaaatcatataaaaatagaatgctctcaacatgtagattccgtttttgcaaacagatcttcaatccggcacattaatttttttttcaccaatctgagtcagtttttgtttgtaacagtgaatctatatccggatacaggagtcggattttttttttggttttttttatcggacaaacctggtttttttccgtccgttttttttggtttttttcgccccttttttcttctggatcggacttcttttttccattccggttttttatcggacaaacatggttttttctgttcggtttttttcacccggtttttttaacggacgatggaagcacctcttattttttaagtagtagtagatagatagatatggactcttaatgtgagaatttgtaggccatgagagcgaacgtggagattcttttttctatccttttaataatataatagatgtggagtactcccgggaaaaaatatattaaaatacacctttttgcccgatgatttaataggaatatacacgtttagaagtgaatagcagaagtataccactgtcgcagaatgtaagtgtgagacggcgcgatctcacgcgactaatagattaattagtgcaattagcaattaatcaattattattattttaattaacatcgttagtaattaaattaatcactaatcagtatgattagttacattagcgtcaactcgagccatctcgcttggccaaccagcgagactgaacgttctcacgctctcgccttacgagaccttcgcgcgttggtctcgtgatttcgcactaccgaaccgcaacaacggtgtattcgtgtaaatccattcaaatcttatatatttctgagacaaaaaattcaaaagtataatttcaaaattttctggattgtgtttttcttttttttcttttttacatgaaacatagaggaattgtcccaaatctgcctggactggaagaacagtagaagactctaccagggaagagatgcagttgggctgtggagagtccacgtaggctcactaaagcctgaggctatccacccttgggaaatgcctctgctgccttctccctccacagaatggcctcgatgtgggccccactggatcccggtgggcccgggccaaacgaaccagtaaactaatagcttcgcttccgagttcgagcctctcatgaccatggccgccgccgccgccgccgccgagctcgacgagacaagctagacgtacagaaaccgcgcgaagaagaataagaatgcggccgtggcttgtgccgccgccgccgccggcgtggcacggcgtggtgatcaggatgctgcaggcgccggcggtggtggcgctggccgccgtgctcgcggcgtcgacgtcgccagcgacggcggcggcggctgctgctgatccggctccgcaggaggaggcggcggcggagggcggcgcggcgagcacgctgtgcaacgtgccgccgacgctgtcgggggaggacaagcaggcggagaagataaagcacccaaagtcggcgagcgccatgcggtgcacctccaagtgcgtcagcacctgcgtcctcggcggcgccggctcgcccggcgtcgacggccccttcaacatcaggaggtagcttcattggtcgccttatcttgtcgatcttaactaatcaatcattcagagttaacgagatgaacacttcaatgcttctgctgatctcttcaactaattccttctgctccgttcatggatggatcgaaatatatgcagaccactggtggtgttcaaggaggattttcgcagccgtcagtactggtacacgcaattttcctgtttcaattcgcatgcaaatcctcatcaattcacacgcaaaaaaagaaaagaaaagaaaagcatcagttcatcttcatcttgtgcatgtgtagccttctggaatgctcggacatctgcaacctaatcaaggacggagaagatggccaatgactcgagatgtattatgctgcttcaccaagcagattagcagctaagacacgcgtgaatccgtcaaggaagcaatcaagcattacagaatggatgatttagaagcaaacaagtgattagcttggaacaaacgtgcatgccggcccagattaactgaagaaccatggcgtcggacctgtcaactgaatcgtgatacggatgaacacaagtccggtccatactgtatactgtacagttgcattaggtctctaacaacaccgagttagcttgatgtagccagctccctacgtagtgcgaaatcccgagttaaatttaagattggattaagtacacatctccttgtcaagttgttcaaacccgtctctttgcatacgcatttgcacttacatgtttgtatatgcagaatagcttgcaaacttataattagacctttttttttgaactgatgatcacactgtttgcctaaattgtttgatctgcgcaatttggcatcttaaattgttgacgaactatgtttaatgcacagcagaccgtccatccagcagtccacataaatggccaaaaccaagcccagtagcccatatcgctatatgggccggcccatgaagcaggcagtctaacgatacagcccgctagcccgctaggtcacacgattgacaagcgattccccttcgtagttgtccgcactcgcgcgtcgctcgccggccatcgccgccgccgccgccgccgtcgccggtcgcaggcccgcctcggcctcccctgtctctgtctccatcctcgtctgccctccgcctggcgcccatcgccttccgccgtccatccgcggtgcttccgtactctgttcccatggcggcggcggcggtggaggagggaggcggcggtggtgccgtggcgcggatcttcgtgggtggtatttcggagggcgtggcggccgccgacctggaggccatgttcgcctccgtcggccgcgtcgccggcgtcgagttcgtgcgcaccaacggccgcagcttcgcctacgtcgacttccactgcccctccgacaaggctctcgccaagctcttctccaccgtacgcatcgcccccccccaatcttctcgtctctccactccagtagcagccatcaacaattcgatttctagcttatgtctgttcgtggtaggaatcctagtgtgtactagtggagatcaaattacgattaattttggatttattagatgattttacctattatgatttgtgccatgcttgctgaattgttgttggcctaagactgtttgagactgatgcttgtgtgcagtacaatgggtgtaagtggaaagggggaaaacttaggctggagaaggctaaggagcactaccttactcgcctgaagcgtgaatgggagcaggaagcggcagcggcgcaggaaatgccagctagtgctgatgtggagagcaagaaggagaagctcgagctgaataaggctgttttggatagtacgaagattaacatctacttcccaaaactgaggaaggtgagcaattggtcaggctgtgagaaacttttcttatgctcagcacttatgctgttcatgcatcattatgtgctctatagccacttagtcctgattcctgaatgggtgtgactgaacaagtaaattgtattccatccattaatatgcagaataacatgatctttgtgaactttaggttttctctatattttacattagtgtaaactgcatccttttatcagacatgctaatcatatcttttgtctttcagaatttgggctaaactaagcaggtgtaatttttaagatcaattgttgaattaagaactgaatcagaaactgggtatacattaactccttacataaacttacttggatacacatcccattgaaactatgcttgtaaaaaatgaagaggtgatatgtattgacaatgtttattcaatatgtcgattaattcctaaacatgcattgacctaatcaagatttcacttgacaggtgaaagccttgccttttaaaggcactggaaagcacaaatacagtttccggcatatcgaagtcccttcttacccaattcatttttgtgactgtgaggagcactgtggacctccagaggcagctaatgatgaatatgcttctgttcttgatgctgctgcatatgaaaaggagcgcagtattatgaattctgtgatgagcaagctctttgagaaggagaatgaccatttagattcaatggaaattcagaatcatggtgtcgattttgatgccgcggaaccctctaacgccaggaatgagttgcaaatggataaaagagaagaaacttctgaggaagatttggatgaccaaatggaagaaacagaagatccttctgaggaagaattggatgatctcgtgcttaacatcgtgacttgcaagccaaaaagctctgtagcacaattgaatagcgaaaagcaagcagcggataaggtatgcacattgcaagtatttcgaacattattctgtgatgaactactctgttgtgcagttatgttcattaacattttctgcattttcaggactcgcgcttcagaaaacgtcaacaatttgaagaatcttctctgcagaagaggcataaatcctctgatttctctgaaactagaaataggaaacagtctttccctgctatatcaggagccatccaaaatgaacaaaaatcttcagatttgtcaggaaaaggtacacatgagttctcatcagaactcgatggagataaaagttctgctagtgtccaagatgttgaagcactagcagattcttctaccagaaatgggagtgaacaaaattcgcttgctagtgaacctaaaagagtttccttgtggactcagaaatctgcctggagggatcttgttggtggcatggggagtgcatctttcagtctatcacaaatattgccaaacaccaatccagcaccaccaaaagtttcaaatgctaccgaggcctctgcttcacatgctgagtccaggacgaaagtgaaaccaagcgggaaatctttgaaaccctcggaagctgcaactcagctcttgcctgagcagaagatgcctacaagttccatggcaatgctgtctagtgagcgtaaggagaataataagctggaaaaggagagggtggttccaaagatcactattggtgaagtgtgtccgttcatgagaaattcagagtcagaaaagcaatggtcaaaggcaaagaaggttctgactggtttcatcaagaagggcaatgagagcactggatcgaatgtcgggaaagggaagccatcaacaaggagataacaacgtagcatgtcattccagcttcatcttgttgaactacaagctcggtagcatgtcattccagcttcatcttgttgaactacaagctcggtggtttcgtgtctcataggaacatgtgttattttgttgattggtctcatagtctgcctgttaagaatgatctgtctttgtttgtgaagcacaatgctatgtacgagttttgttcaaattgttattattctttgtacgagcaatttaaagtcaaacatgtttcaaaaagtgacatctaacgtgcaatttaaaaacgaacggtcaaacatgtttaaaaaagtccaatatattttaaaaagtcaacggcgttaaatattgggaaaattataaaaaccatccaaatatcactctgagtttgagatgcctctccataagaagatttattgcaaatacccacctcctaaaccttggtttgatttaggcacattctctccacacacgcgtgattcctaaataatctcgtggcgaaatcaaccgagtcccactcagcgggagcaagagattatgttgttttctatataagacgatcatttcgttgcgttatcatggccatttcattgtgtttttcatgatatactagctatatattccaaactaatatcatgtgtactgaacaacatatccgttttttagaatgtaatgggcatatagaaacatttaagcatgaagcagtaatcatatagccagattataactacatgacttcatctgttgcaattggtcagatgacccaaaacagcaggtttcattacagtttaatcagaaattaaggccacacaatctaatgcaaaagagacttgttgacaaatcatcacgatgagtggaacttggctaatttcgccacgagatgctccaggaatcacgcatgtgtagagagaaggtgcctaaatcaaagcaaggtgaattaggacgtgtggatttgcaacaaatcttcttatagggggcatctcaaacttagagtgatatttggggtggtttttgcaattttcccttaaatattttgtgacagaggaaggaccaatgtgtaattaacagaacagagggggcctttttgcaaaagtgaacgtggcacccctaactaactctccggcaatcccggtgttttaagtagacaaatgtattcgaactcctgcgggctgtggcgctcgtgctcgccgtgctcgccgaaatggttctccggtggctcaccaccgcactaccgctcgccgccgctgccgctcgccacgcggccgcggctccctcctccgcggccacgctcgccgccgccgccgctcgccacgcggccgcggcttcctcttcctccgccgctcgccacgccgccgcggctccctcctccgcggccacgctcgccaccgccgcggctccctcttcctcctccgcggccacgcttgccgccgccgcggctccctcctccgctgccgtggcggttctaccggaggcggcgcggcgagtctccgcggcttccctcctcgaggagttaaacgccttcccggagatgtccctagtggtccggtggctcggcgccgctcgccgcccgggagcggaggtcgtctccaaaattgcggggcgccgccaccacctcaccaccaccgccgccgccgcggctccctcctccgctgccgtggcggttctaccggaggcggcgcggcgagtctccgcggcttccctcctcgaggagttaaacgccttcccggagatgtccctagtggtccggtggctcggcgccgctcgccgcccgggagcggaggtcgtctccaaaattgcggggcgccgccaccacctcaccaccaccgccgccgccgactcgaaccttccaagtcaagcgcccggacgactcgtcaatcgggggggtgctcaagtgatcggcgcgggcgacttcttcggctgggagagcaatgattgcggctgcctcgccgacctcgcgccgttccctcaccgcggcgcgccgttccctcgccgccgctgcggtgctgcatcgccttctcttccctggtggttcgcggcagagcaggtgcgcttcggcgtgggcgaccccttcgagagcgatgatggcggcatactccccgatctcgcggcatttcttcgtcgccgccgccgctgcgcccacagcagaagaatcttcgaattcgagagcacccaccacggctttggcaagagcaacaatggcatgagcggcggttttcgttttatgttggatgacaccgacaagaggtttcgccatgtccgagctcggagaaatcggtggcaacagctggtgataaggaagatgttctcaagttcagggaagcgcagctcgtcgacttcaaggcaacagacgccttcgccgacctctttaccagcggccatccccagccaaccagcagcggcgatttcttcctcttcatctgagactaattcatccagtgagcaggaaaaaggggcttcctcgtcagcatgctacattgatgaatcattcggtaatcaggagataattgacgctgagacttatgtcaaggcaaatcctatgcttgttaaggcgaatgtactgggctcagcgaagacattctggagaatgtcggatatagcagtgagactcattcggcgacttgcgaggattctgaaaattctgcacgaacagaagcgttatctcctggccccgctctcagtgcaaaatctagtaattgtctcgggtgaacttaagctcaggaatgtcacccttgcagatgatgatttcagttttgatcggattaaatgtgattatcagtatatgtccgttgtgctggaagagttgatcatgttatctgtcggacaaaatggattgtccaatatccctcctgattttggcaaatacttgggtttgcttaaaggactagtcaaacctgatgacgaatttctgataaccaaccatgcttcgttattgcccatggcaaacaggtacacccgaatgtttttacatactttagttacttcaattagatccagtaagttatccaaaatcagtactcaagtaacacctagatgaagttttgcttagtaaactgtgtttgctactgctgtccttatttagttcgtagttagtactagctaaatacacgtatcttgctagctaatatgatttatgctactgttgtccttattatttagttcgtactacctaaatacacgtgtcttgttaatatgatttacgcatgctacattggttcgaaccaatttggtagtatatatattagtggcgaaaattgataagaaagcaacgacattgctgaaatttggtagggtaaaattgatttcgcgaacgctttttctgtgattttgctctattcatgatttgattgttcttattaacaagtttggtactagtagatatagagtttgtattagtgcgggaaaaaattggtagcaaagcaaacatatatgtgatagtactaaagttgccgaaatttcagtagggtgtaattgctttcaattaaacaagtccatcatgcacatgtttttgtgattttgctctattcatgattaagtgattgtttacattatttgggttcatttttttcatcagtatgcatctctactacatgtgtaggacggatgcatttatgatgatgtacaatcatattatgggctatcttggccgcaaagatcctaaaaagaagatatacattctatcacacctgaagtatgacacagactggcttcgcacagcgtcaggaaacagtgagatagggaaatggctttggcgccggagatacggccagactgttaaggagtttctgcacttaaatcggaatatcaggtcccatccatatgaacattccgaggaaaagatcgaagaagctctatacggtgaatggccggaactgctagttgaaatgcaagaaaaactgcacaaagagggtgaattacaaaacactgagatggagtcgaaatttgggcagcagtgattttctgcattgagtctgcatcatggagaaacatatgttctattggcgctgaaaatgaagacatataacatctgtgacatgtaaacaaatctttcatacatgcagacattgatcttgcaacatagtgcacattaatatcataaaagtgcctcagtgttttttttttctctcttgagcggaaatgatgttgatgtgcaaatgaacaatcagtttaatcttgggatcaatgatcgaggcacttgttgggtgtccatgcatgaggctcatgagcacaagattatgcaaaacgaacaggaagaaatatgtatggttcgtgtgcaaatgactgttgattgtcagcccaatattcatggagatggcgtacttccgttggcacaaattacttaattaattattcatgcatgggcgggcgcagcctattacacttgttaattaggcccacacggccggagttgagttaataacctgcgcgtatggctggattgttgtacttgtatcttggactcttggtttgggcgtgagcgagccgaacgatcaatttgttggtgaactgactgatttccggccggctgtctgctcatttattagcaggaggtagtttttttttaacggaaaatagcactagagtgccttttcattgaatagaggaggagaaaatacaacccctagggacaacaggaaaaaatcgaggaactgtagctatacactatacatagtgcgggattaactcgcgcagccgcttagcccctgctaaagcccaaaggctagcctcttctttaattcttgacaggaggaaactcgttgccacctctttgtggtcaaagattcgccgatttctttccttctagatttcccatacaactagtaggatgagtgatcggagttctttcttcggaacatttggcgtgtttgcgatgctctcccaccactgttgtactgactgtgcctcctctcattgagccggctcaatttgctgatatcccacccatccagcaacaaggcctcacattcttttagtgtatctacaagtggcaacgaggtgcaaggaggtagtttgatcactttggcggcggcggcggcgacaggcactgatcgatccatgcttctgctataaaatttggcctgaactcgaagagaagcgctggctctcacaaacacaaccaatacattgtcaaattaagcctgagctcgaagagaacggctctcacatacacaatcaacacactctcttgcctattctcaaaaaatacactctcttcccttccctctcactctcgatcctcaccacaaccacatgcacgcacggcactagctagctgccgtcgtcatcaccatctcacacgtgcacaccatttttctttcatcccgatctccattaagtacactattgctctctctctctcatctattcctttgggcttcccttaagctcgtccttgtccaccgtccacgcggctggtttctggtgttgtcaacttggcaacaaatatgatggcggaatgcaagacagagacaagtgtcttttaaaccatacaagattaatagctgcgacaacaagcccaaaccatcattaaaaaatatagttttattccattattttcattttttttcatcctcatacaaccatgttttcattttattgaggataaaagttgttgctgagcagttattacctacagtagcaatattttatctcttttctttctcttttccatgtcagcaaatattcataattagcaacattaagagatcatgtcgtgttaatgaccattgtacatgtctttaggggaggggaataagttcatctgaggtcctttaacttgtcaacgaatccgattttcgtccctcaaccggaaaaccagacacaacgggtccctcaactatcaaaaccggtgcagatgaagtccctcggtggttttgaaggcggttttggctgatgtggcgcctacgtggctaatttgactcggtcttcatctgacgtggcgcttagtggcaattcgagctgaaaaaataataaaactcgtggaacctacatgtcagttccacacacaaaataataaaaaaatggtgggacccacatggccccacatgtcatcctcactcctcctccctctctgtatcctctctctcccctctcctcggcgccgacgcttccatccacgcattactcaacgtggtggccgccgacgccgacccacctcgcgtcgtcctcgtcttcggcggcaggcccatccgcgttggcgccgagctcctcgacgccgtcccgtcgctccgctgcatcatcaccatcagcgcggggatcaaccacatcgacctccacactttaggaggcaacaggggtggaccccaggccttgggccgcccggtccatggctcgaggcctaggatgcaatctctattataaagtctattttttcaccatgtaatggtccaaactataatgggctggcccaaatcgtgggccaatcctgggtccaaccctgagaggcactagtgactagtgaggtcgtgtatgtttattgtgaataggttaagtttatagtatatatttttcactatttttctgggtcatttattttacttcgtttagttagcagcaatatctttttcccctttgttagtacctactatcgaccattaagagaaagatggaaaaaccacttaagaaaaagagagagggaaaataattgagaaacgcgagcaaggcaagaagatgacttgggagaggcgaggattttgtgccgtgaggaaaactatcacatcctgatttttgtttcaggatttataaattatttaataaattaataatagaatttatattaaatgttctttaatttacaagtgaagttaaatgtgggaaataaaatttcctaaatataaagcatggatggatttaatttttattaaattctccatgattaagtaaactctctgaaattttctcggatttttcagagctcaattcctaaatgatacaaagaacagttcagtaattatttgatcattaatgatctaattataattgttaagtgcttttcttgtttaaaatccttaaattataaattgttgtttaaaaggaattattagaaatgatttcaaaagcctagaagagaagatcttttttttaatttgctaaatctcaatataaaatggggccagataaaatttcattaaatactttgcttaattctataattcctagatttttctgggatttatttgagctaaggaagtatttttaataaatagaattgcatttcatgaataatttaaattgaaaaaggtttttaaaagtctcttttggctttgggccgaaagccggcccaaaatctctctctctctctccctcggcccagtccggcccagtccgacgagccgccgctctcttctctctctctgtcactgacaggtggggcccgcctgtcagacccgtcgtcttccttcggccgccgccgccgagccgcgccgccgagccgcgccgccgtctctttccaaattccgtcgctcctttccatctccggccgaattgatagaggggaaatgatcctctcgatctcctcttccttttctcttttggaatcatcacctaattcggtttggaaactcgtggattcgatctcgaatcggatcgacttctctcctccgaaccctacctttccttctcgtcgccggtcgccgtgggccttcgccgccgccttccaacccctataaaaggatccccggtgtctcctctacccgccgccaccctcgccttcgtctctcgccgtcggaagcgctctagcgccgtgtagcctagcgccgccgtcgccgccgtcgctccagccgcgcgccgccgccgttccagacgtcgccgtcgctcgggaagaccgccgtcgtggtcgccgtagcgtcgccgtcctcgtccgccccttcgccgccgccgaagaccaccggagcaccgccgtcaccgtcgacccgaagaccgccgccgcttttcctcgtcgccggcgccgtccgttgcccttccgccgttgttttggtcaccggtgagttcgccgagtcgccctctacccgttggtgccttccgtttgcgtcctcgcgccgtcgttcgccggcgagcttgcgctcccgagccgccgccggtgctgacgtcatcgtcgccctctcccgtgagccagtcgtggaccgatcgatctcggccgtccgttttggatggatcgatctcggccgtccgttcccgtgaaccgccgccgtgcacccggtccaccgcaaaccctagccgctgacgcaataatccttcttttccttttcaaaaataattcattattgcgtcataattcaattaaaatccatataagtgttttaatccgatttaatctttaaaaattcataactaattcatcttaactcagtttaatgtggttcaagttgcaaaagttgtataaaataaagatctacatattaaaattgtccataaattgaattaaatttatttaattctttttaaatgggctttaattagatttaatcttgtaaaattcataataaattcatttgaagtcagaatgaggccgttcaagtctcataattcatctaaaattatgatctacatgtttgtttactttttatgtattgtttatttggtttttattagtctttttcttcgttttgcgtgttagcttgtcgtttccgtcgttgcgaaggttcgcgagtgcgtcggaagtgttcaagaagattatttgaagaccgattattgcaaggcaagtcacacagatcctaaacacaatcctttgagcatgttgatcctatatttaaattctctatttatttcaactgtgcatttgttttcgaatgtcactgggtggtgtgaatctattcctttgttatggcctgtttgcattgattactttattccttgataccttgggttattataacttgactagttgagctatatatattggttcagctagatattagatatgattgcttagccatgcttagaaacattagcacactattgggataacttatgactcattattatttaatgatggcttaatgatagttcacgatggttaatcgtgattggttaattaattacttgccaactaaaacttgataatggtgggttgtgagcacatggttttgagagtcgtgctcatgacaattaaggaccggttcgcgagctactattgtgaaacattaatcgtgccaaccacaagccagcgtgggcaacggctttaccttttgtatagcatggttcattgcggagcaccagactgagaagtggcggagataagcccacgggggtcgctggggagtccatgcctctggtttttgagggggtgattatgatccaggaatggtgcgctgcggtgggttgtgttatgcaaggggtaatgtcacagctcctttccgaggtaccgtggtggtactgaggcacatggtgacatgatgtggagctgtgtcttgtgggtacagtggtacacctctggccagagtaaaactattcgaatagccgtgcccgcggttatgggcgggttgagcaatgtttttcgtgattagtctcacacctctcacaataattatggatgttatacctgataataatttgcttagctcctggtttggagttagatctgttcagccgggtatggttgttcagaatggttgggcctgtgcagcatgggtgtgctgttcagtgttgattaaaatttctgattaattactccactgttttacttctcttaaatgttttgctaaatgctgcttttgcaaatgagccaatattatgccattctttggtatccttgtgcacttgcgtatttgctgtgtggcttgctgagtatgtcatatgctcaccttgcaataatcaatcaacctcagttgaagaaaaaggatccagaaggagaagacgtttggcttataccccagttgagctgcctgtgggagtggagccggagcttcgctagattttattttccgctgcagttttcttcatgacgaggactaagtgcctcataagtaagtatttatcgttttagttaatttgatgaatctgtatattaaattgtcagtttgtgtacctcggctgattcctggacgaggattttatgcacaaataagttcggaaattactagtgaatttctgggcgtgacaaaaactagaaaggaatgtgcggcgacacgccgcgcacacaaatatgacttacatcaaaacttcttttaaacacaaatcagctatgggctatttagttttttaaaaaataggagtcataggttatttggttaaaaaaatcagagaaaggacaaaacaagatgcagacaatgccagtcgggcactaagatgcaagtgatggtctgatgagtgatgaatgccagatggaagcaggcaagcagcaacgagtgcagggtttcccaaaccgacggggccagggttatcgcgcccccgtaaccgtatgtaaccgtgtaaaatttatcaaaaatttaaattatttttaaaatttatttgaatttaaggaggtaaccgcggtttttctattatggtactcccgcggttaccgatggtaagtcaaacctagcaacaactggacaaacgactctacacgtctgaacaccctgttaatctttactaaggtggtgattgggaaggagggactaaattttaatccctcttacaaaagcataagtttctatgggaggaactaaaatttttgtgagagtccctcctttctaaacaccacctaaataatatgccaacgtgtatgtaccagtcgcctaagcaaaggaggtcgttctctcatctcgtgtgcttttgttcgtcaatgcaaccgagattcaatttattgccaattcagtctgcaatataatcctaaaagaatgtgtaattgtgtagtgggagggtgtcacaaaactgatagctcttctggtgggattagagtagaagtagccctcttccttgggtttgtcaggaataatctgcgtcctagatgacgcgtccatgcggctgctatgtggtgcattcacagcggaggagaaacggtcccatctcattgtgccgttttttttactgatcaacgagttcaactataagctcggcttgctgttactctaagctttcaatataagctgggccttgtgccttttatctcaaattagaaaggtaccccgcgtatgatagattttgaaaagcactatttctcaataatttttctacatcataatttttccaaactatttattagcttttaaaatatatgatatttaatacattcctataaataattatctatgatctcttcagtacagagctatatttagtttgtttagaaaacatttctaatttaaaagtaatatgttttgtcttatttaattgaatgtttagtggccttttgttaacaaattaaaaactattattattaataaatatgttttatttgtagaatcaagttatgcatccttttagttggtttttattgacgcaagttattacatacttagtatacactggtaccttagtgtggcttcttatatatgtaataatatgtggaaaaactcataatgctatggtatggtatagtatagatttaaagccattaatatctaagcatttaaaaattgttatgaaaatgaaacatgcaaaggttggttcaattttagtaaaaagtaagaactatttttttctgaacttattagactttctccaaataattcaatttagtccttttggcattttacttctatcattatagatctaatttaattattgtgcagttatatagaacgataaaatctatatcattttttttcataatttcagaattgtttgaatgtcatgctaaagtaaaaaaaatataaccccaaagtggcatatgaaaagttaaattacagtgaatatgggtttctaaatgtaaaacaatctaaagacataaacggatcgcgtgatttagatgttatagttatttatttttttagtataagtttggcagcattgctcatagttatattcattttacttttctgagatctaatttaaattgtgaagttaagtacgatgataaaattattactattattattgttgttgttgttgttgtagttgttgttgttgttgttgttgttgttgttgttgttgtttttgttgttgttgttcttgttgttgttgttgttgttgttgttgttgttataataataataataataataataataataataataataataataataataataataataataataataataataataataataataataataataattattattattattattattattattattattattattattattattattattattattattattttcatattttttataattgcccgagtgacacgcaaaagtctgaaaataaaacccaaaatgacatttcttttcaaagttgaattatagttaaatttgttcttcaactgtaaatttagtcataagaataagcggatcaaaaattagttatatgatttagattttacaaaacatattttttgcttttctaactaataaaacatgtaaataggagaaggaacagggagaaaagaggtcatattttttcttaaaaaaagtaacatacgtaagtacatacatgcctaggtgggcccaattttaggaggtaattttttttcgttaagattgtcagagggtgaactcctcaagcgggggacagtgaggccccccttgttgattcggtcgggggcagcgggtgaaaatcgaggactctatgaaacaggtgatgtagaggaggtcgggcccctcgtaaacgatgaaaccaaaggggtttatataggttcgggccgctgagaaacgtaataccctactcttgtgcttgactgatcgactgaggaatacatacgcttgaatcactgagaaccaagcgtgagttagccaaagaaccgatctccccctcccactaggcttggacctctttttatatctcaagagactgccatatgtgcctagaggtctacctaaggttgagggaggatactctccacattaaatgcatgtcttgttgcttggcctcgaagccacacgcacaggtgccgcggcatggggtccgtcaaatccaaacggctaacatgggggactctcatgtcattcaccatttaatgggtgaagatatttgggtcctcacttgcgccgggatatggaaaccctgctctaatcgggtcagacgaatcgactccggctgggatgagaggataaaaagcctctcatcatcacgatgtgacaggccgactgacatgcaaccagtgcgcaggcacactaccctggtcccattggtcattcgaccagtcagtctcaccacacgctgcatttaatgcggcgtgtcgcgcccgctcatgccgccttgaatgtggttaggtaggcgttgaggggcgcccacctaaccctacacacgtggcgttatgcggtggggggtcgggacagcatggagggggcggnnnncgncctacctcgggcccgacccccctcgggggagtgccacatgggtaccggggcaacctcctccctttgggcttgataccccagggcctgtatcaccgacaaagataattataggctgtaacgatttcaagtttttcttatccataataatgacatacttatatcataaatatgggttttatactgtaaatttattaatgataaattatctgaaaacataagctgatcaaatacatgtataatttagatactacatataaataatctaacaacataagcatataagaatacatgcatgatttaaattctttcgatggtgttcataggggtagggtatacgtgtgtgcatcctagggggtgagtgtgcatgtgttgtgagtgcccgcatttgttttgtgtttctaaaaaaaatactatagttgcttaaacgtttttatataaattttgctttccaactaatagaaggaaaataagagagataatagagtgaaaagagtagaacagaataggatggtacggagtacctacgtacacgaacgtccattcaaatagggtggggcccaatttagaggtagattggtttttcttttccatctaatctaatagttcaaaagaatgggtccaccaatttaaatgaaaatcgatggttagatgtttttctgccacgtggcagcttagaagtgctcgtagaaagtttaatggacttttagtatataatagatagataatagatagatagactataagctcggcagtagtcttcttgaagaccagtatctgtgcacatagaaacaagaaagaaggatccaattagcaggtgatttttttagataattattagcagatgaataggaaaggagataaaaaggattattcagagtttcagacacaataagtttcagcttagaacataacagttgctaagaatgcaaagactatatacacaaagcatccagttttgatctgtaattattccaacgatgtcgagtggagcctctcggtgtagcattagttgaggatttgagaacatccttccattgaaagaaaaggttgagatcacgcagcatgacatgggctgccatttaggcgggcaaatggtggaggtactaacttttgatagcaagggatagtgtaggctggcagttgtttctcaggtgttgtgtggcaaaagtactaagcaagatgttaccaggaatgaatttatcagcagtacctgtgatgaccgcccacaacttttgccatcataagtggggatgaaaatatcactctccaaggacaatataatctaacgctaccatctgggaggaatggttctggaaaaaacctgagatatctgaaggcaataatgtctcttttctcacctgaccatcaacaatgagaaaggaaattttataaatatgagatatgaaaggaatgcgcaatcagtagcattggagaagataaactgaccacattgggataagctgaggtaagggcagccattcttctttggccaccgtatatttcaccatcggcaatgtatatttgataactcctatcaatgtctagtgccttcaataccattgcagcctcctccattgttaatgggcagagctcatctttcctctttgcattcgagtcaatcaccttctctttccaccatgggtaagtatatctttcaattttcaaacacaatgtagttgttaatacagattgcaaaaattacttgagaaaattttagacaaaactaaatacctcattattgtgaactactccgtctcctcgttgttgcaaccatgtgcgcaaccagaggaaggcaaagcatgcccatttcatatcgctcgcaagtgaagaaccacaaaaaggcccattattacgaagaatttgaaccacacgtctacccacctcttctatttcaggggtaaatcacaatgcagcaaaattgacacaacacctcaaattctgaatctccataggcaggcaattgcaaggtgtgcatcggttttgttcaaatgaagaatcctgtacttccatatcagtggtagagtcagttttccacaaataaacacttacaatcttcaactgattttacacgtgattttgagttcatgacgaaaaaccaatggaaatgagagatgaaaccaaacctgactatggcaataagatatatcagaccaactgacaggcggcatggagcggacatatccaagctcaactcttctttacagccttagaggcagctctttcagtttcagtacccggaccactatcaataatgcaatgaagtaatcgacatcacattatactaactgaaacaaaagaaccacaagaggttgagtaatgagtcaggaccattcttaattgaattctggtgagtgccaactgcaaaaagaaggctcaccttggatcagcccaagatgaggttatgtccaattctaacacgataagggtgttgttgagggatatatcacatatctgacagacaaacaattaaaatttttgttcggccgcgtgatttgccctctcgtcgcagggtggcgagctccgggaagtcaacctcctccgcgcgaagctcgcggcggcgcgacgtgtcacgccccgaactagccccgagcggaactagcccgtgacgctccaatttaacccattaatcgataccagtcccaggaaacagtgctggtatcacagggagacagaatatcacagcaacagaggtctctttattatagagtaggagtacagtcatgttgggctgcggacccgagctcacaactgcattacgaaagggaagcggaagccaagacttggaccaaacatcataggcgcgacttgggaactaggccgaaaccctaaaactcatcgtagccgacttgctcctggaagaactcctcgtcagcgggatccgcttcatcttccttagcaactgggggggttatttatatagagcaagggtgagtacgggagtactcagcaagccatgggaaataagtgtttaatgcaggcttcaaggaaaggctgttgtttttgcaattgattttatttaaactcttttctgaaacaattaagtgagtgcttctcaaacgacacgaatgagaccgtgcgtctcgtccggtcggagtatgtgcaaggtatcagtcttttgaattgatcatggttggcacccggccaacggcttttaaacggccacccgggcctggctgatcccatcagccgcagattttccaaacatcgaacccaaaccacatcagcaaatttcacaagcagtaggcaaacaaaactacgctaggaatcacctcacatccacccatgaccgtgggcatggctgttcgaacagtttaataacctctacagagggggtacactttacccacacgacattactaacccggatcatccagcccgtgcagaacggccacgactagagaccttaaggctttcatgacaaggcatttcgaaagccgacacaggttcaccatatgccaacaagaggggtcccagaccatactgtgccaggaaacccgggggttctccccgacaccaccccgttgaatccacatgtctcttggcatcatggctcccccgattagctagttactcagccaggggtgtcccattccacccatgtggtcgcacttgtcttatgttcggatgaacttccaaggaaacggtccttaagtgcaagagcaggaaaccgtacacccggtacgttccccggtccgcgattttggaaattcatttagttcgcaagcaccgacccaggtgtcgggttttccaagtcttttgtaaaacccaagttttacccaagatgtttctcagtttttaagtttgaaggcgaccgtcgatactcgtgcagagtgcacgattaccgaggcgcaactaggtggttacaagggaacatggtataacaattaacaaaggaaggataagatgcaataagctaggtaggcccatcggtctgccttgcagacggggcaaacagattaagtgcaatcctatcaatgcataatatttttcaagcaacataattaagttcaaatataggctcaagatgttcaagggtggcttgccttgctcgagatcttgagcttgatcctcgaaattctcgcactgtgggtcttcgggctccgaaactacacgcgaaacgggacaactcaacaaacggagaaaataaagccctattattgacctctaggcatgccattagatagatctcgagatttgaggagttttggaagttgaacggagtcaaacggacttacggatggaaaaatattgaatttctaagattattggatttttggtctaaaggaaaaggatttatttaaatcctttttgaaaatgaaaagaaaagaaggaaggagggagggaaattagactttcctcgggcggctaggacgcggcccgagagaaaggggcggctcggccgaacctaacagaccggtcggcccgagaaggcggcccaaagcacgcgcgcgggcggggaggggagaggaagccgatgggccggatccatcccgcgtggtcccgagtgggacccgcttgtcggcgactcggctcaccgtgagcgaggtgcacgcggggcgtgctagggtttggggagggaggtgcggtgcatgcgcgcggttcgcggaggacgcggatacggcgggcccacgcgcagcctcacggctcaccgcggaccatgcgcacggggggggggggggaaacggagggagcggctggccgggtcagccgatccggtcgtgccgaggtggctccgacgtggcgcctacgtggctgccacgcgggccggctagaggaagacgaaggcgccggccgcgaatggacggcaggcggcggcggtttctccgggacgccgtgcgacgatgaggggcgacggggcgtacaccgggatgacgagggagaacgagagggagcgagccaacggcttggattcgccggagggagtccgtcggcggcggattgcggcagcggcaaccggcggagagaaaaggaggaaacggcgacgaggtcacgaggggccgattcccggcggtgagagcatctacgcggctacgggaacccaccccttgcgccggattaggaggaaacgcatcgagggaggccggcgacgagagacgcttccgagctcgggcggcgacggcggcgagcacatggcgagcgacggcagcagtcggggcggctccagctagctactggggtactacacacgctactaaccaagtctaaggggaggagatggatcgaggaaggagaacgggggaatgcactaccgagatgaggcggggcgctgtgacgagatgccgacggcacgggagtgatctcttcggcctcgggccggggtagaggaagaagatgagcgcccggagtccccttccgcgtcctagcgcgcaccggctcctccggcacacgcgacggcggcggtcggcgagagagacagagggacggcaatggcgcgggtgaaaaactgggaagattgggaggggaaaaaggaagggagggcgcctgggtttatagggcggcaatgtcggttttggaaaccgaccttgggcggtcaaggtgcgagctggcgttcggcgctcgcggccaaaacggcgacagaggcggatgacgccggcggggaagaggaaagggaaaaaggaggaggaaaagggggcttaccccttgccactttggggaaaaggaggaggaagagagggcgacgcggcagagggggagagctctgcctccgtcccttggaggttagcgcgcggagagaggcggggccgagtcgatgacgacggcgatgacggcgggggcggtttggaatggagcggcgacacggacggcaggcgcaggcaggcgcggcagaggctgacggcggcggcgaccaggcggtcggccaccacggcgcgcgcgcgcgggggcggcgcggcgatttgggcggcgtcggcgggaacggcagcgagagcggagagggagggctcggcgcggctcacgggcagagagagagagagagagagagagatgggccgagaggaattcggcccatcgaacccgagggaggcaaaatagacttttgcggagggatttgatttgggaaggatttggattcaagattgaacttgacgatagatcggggatttgagatccggaatggcacggacactagacaacaagcaagaaacagatttcgcaattagggtttttaagagatagttttcccgctaggcgccacgacggaacgggcgccacacgacgcgaggccacgatgcacgcagtgaactctggctcgaaggttctcctcatcctcaagatcgttgtcctctctctacgtgttcttctatgtcttcagtgttgatttcgtgtatgtacatgtatcttggatggttatgatgggggatctcaggttgttcttggatggggatctcaaggatgtttttttggtttgagcagaagccgtcgtcgctcgacgcatttcccgtcagccgtgagctcggtgcctccgtgtacgtctaccgccttgcgagcgcgccgcctttttttattactagattctcattgcgcgccgccttttttgttactatactgttgatcagttttgaaatatgcatgatgatttcacaaacataacagtactatttcaagcaatctccaatttgaaaccatatagtatcacaatgtacttagcttacaacacattgatgaaacgtaccgactccgagtgacaaatctacatataagcacgctgtacaaagtggtacatctgagtttgaatatcttcaattctgtggagatcttgcctgggacaatccttgatcatcagttgcttgggtatttataatgcccatggagtagtcaaaaagagatggcactcgtgttgtagcctcaaaacaatctgcaaaaatattagttgtggaatatgctgaatggtctacttgatgtctaaccagattcatgttatatggtaggtgtgaaaaaaaaagaagatgatcctatggttcatatttgtgaaaaacacaatgaacaaggttgtttacaggaaaaagttgctttcatcaagatgttagcatgttctaaacctctaaatctctaattaaccattttaatgtacgtatataacatagccagcatccttaatgggtgttagtaatacgtagagataaaaaaatatgtattattattaatcgacagcgcattgcggcagcatttccaccataacatgtagaaaatgcatggcaataatcaacaacaccagataccaaacacaagatactaactggaactcttaaccatacaactgaaatttgtctaattgttttagagaaattagtggattcatcagataaacaaattataagaagcaaactctcatgtaagaagttttagatatgcagagatagaagttccaaaccccgacaggggtcgacgaaatcggatagacttttggcctgatgttcttgaagatcattagttttctatatacatttctgtggaaggaactggctgtgtatatctttcgtggatatagaggccggattaatgaaaatccattatctaaaaaattttctttggaaggaaagaaaaacaaaatgcaacagtatagaaagggaaaaaaaagggtaaatgaaggcacacaattgatagtgcatactcaggtatcttgttcttctgtagatggctagagctttgataggacaaagttttgtcatgtcaaagaactgcaataggtcaaaaatataatttgatcaaagaatctagtacagccatctatgattaaaaacagaaaagaaaattggtaaatgatagaaatgccatttccacgagattaatgatgcaatcattgaatgaacagtaaatcttgaaactttccttcagaaccagagtagccaaagttcagaaatcggaaccaaggtcagacatacaattaccagaggtaaggcatagcacatagtttccaaacgatgctccttgaggctgcacacacaattataacattagcaaatggcatgcacaattcaaaaccagtcaatttataataatttaacttatcttgcaaaataaattcaaatcaaccatcattatgttaacatattataattatacacatgcagaaaacctgtccttgtacattgtttgcatgacttctttgactatcttagtctgatgacatatgtatggatatcattctattctacaagtagtcattccaaggcatgaatgcatctttacacaaatgtgatgctaaaagcaagcagactatctcccttttcgtaccataaatccaaaacagtacacaaaagctaaaatgaagattgtgatataaagtatcctgtcatttacagatagaagatcaagatgacatggtgatcactatgagacatttataggccttgattggaacttgtaacttttttttgttgtttactatggtaattaaccaactcctgtatttcacattgcctctacccaggaataagaccatagattttgtgattggactgtccaagatatactgatcaaatattttcaggttgtaaagggatagaggaagaacagagacaaggagggtggttaggatctgttcatatggctaagtttttccttttttctatctctactaaattaaaaaggttcttaccttagtaattacaactaatgtctatgttcagaggttaaccttagcacttggacaaaacatcccccactacacaaccaaacctatagataaaattttctgcttggagttcagaccatcgatcaaccaacaaacatatcaacaagttctaatacgaagtaatatcacctgaccaaccctcaccttccagaatccatagccgattgttgtcctttcatcactaataagagaaggaaaaaattcatcgatcgttaggtattacttggacaaggggtcatctatgg

SEQ ID NO: 18131 - DNA, 2680 bp, Oryza sativa
gttgctgcgggatatttggataataccttcatattaacatttgtattggctgaaaaagaagaacaaaagtacaaagaaaatagaaaacgtgttataacttgacgactgactgaactaaaacaacagatctcacaaagcccttatccagttaaactgagaaaagctaactgggctggataataaggtttgtattcatgcaacgatcaggaaaaaccataggattagatcgaacggcttaaaagtgctgatgacgtggagcaatctttataagagtaaatgctctagtgggtaccaactgtataggaagaaaggataagcataaatgcctctaaattggtaccggttaaaaaaccgacatctatagtgggtatccaaccgacaccaatagggaactacttcctctgttttatattataagactttttagcattacccattttcatatatatgttaataaatctagatatatatgttcattaacatttatatgaatatggacaatgctagaaagtattataacctgaaacggaggtagtatgtactagtggacgacgagctcccatctcccggccgaggccaacgacggcggcgcggggacgacacgcgcctcccggccgtcatcccgtgaggcatagaagtagcagctctgctggccgtgttgccaccaagctcgccgaggaccgttgatgcctccacggctccaacgttgattccccagacgacaacgtcgtccccccaccacaagatttcgccatgtccaccgctcggccttgagcatcaccgtcctcagcatcctcgcgctgtcaaagatagtaaggcgaaaggaaggaatggcacactgacacgtagggccataatattttctcttttcccccaaatataacagtgccactttaaccaaaaaaaaaacgctttgaacgagtcgaggttttgcggcaaggcttaaggggctcaaaatagacttattccattcagagctgtttggggcacagggccggcggcccagagaggcggtggtgcccacgaagcctacacaagaccgatgccctatttaggtcaatcgtggactatggacaaccccacaccccaaaatccccaatcgccgcgccgcactgcgactgcgattctcccaatccccggtggatatcgatcggattcagatgaacactcgattccggcggccggaggtaaatccggagtcgattttttcgcaaatcgcaggtactctacgcaatttttgttcctaatccccaaatccccaattgccgcactgctactgcgccgcgtctcgccggccgatttggatggctgcgggtgggacgcaagcaatgaggcagttcgtctatctggtggtgaagggctgctacgatcgccgcctgcggtgttgtcgcgacagctacatggcggacaccttccacatgcgccgcatcaacgtgtcccgcttcttcttctaccccgaaccgccgccgccgccgccgctggcgatggtcgtcgacgctcggctgcctcgcccctgcatcaccttctgcgccccctgggtcatgcacttcatgctgctgggccgcaacagcgacaaggtgctcgccgtcgaccacaagggccgcaccaccatgtacgaccccgccgccaacaccatccgcgccgcgcccaccctcgcccaccccaagagactccccgccatctccctccccattggtgacgacctctacatcctcgacccgacctcctccgaccaccgctgcttcgaggccctcgtctacaagcccggcggccccgcccacgactgggtcaccacccgtggccccatcgaccggtacaacgactggcactgccaatctctcccgccgccgccctaccatccctactcctgcagcttcgtcggcgcaaacggagccatcggcggctatgcggtggtcggcggtggcggcgactcagcagagatctgggtgtcaaccaacgacggcagcggcagcggcaccttctctttcgacacggcgcggcgcgcctggaccaagcacggagactggacgctcccattccgtggcctcgccgagtacgtccccgagtacaacctctggttcgccctctcctccggctccaacaacaaccatctctgcgcattcgatctcgccggcgcagctgagccgccggcgacgcgcgatttctgccaagaactcaagccacccaaggactggaagctggtgtcatcccatctggtgcacctgggatccggcaggttctgcatcgcaagattcttcgaaaagccggtcaagattccagtgtgctgcgtctgcgacatggatacgcagacgtacggcgtcttcaccggcgtggaggtgaagaagccgggaagaggcctacggctacggatggtcaagcacagatcagaatgttatcgcttcgatgaccacattaaggaatgggtgctgtaatatttatctagtcttttttagaaagatttgtgcaaatagatgaactcagtagcattggatatgctggtgcttcaacaccttgaacactagcacaactttttatctctatcaagttttagaggagaactcatctgtaccttttcctgacaaacaagaagattttttattttattttggatgtctcctgatataggaggcaaagactgtttcagtgttcttttttctgggttcagaaaaatcagaggatt

SEQ ID NO: 18132 - DNA, 8153 bp, Oryza sativa
  unsure (1)..(8153): unsure at all n locations
actgatggttgttcttggattgtgttctgcaggaatttatcttcgaatagtctcagtggcaaactcccagattcgatggcgaagctgaactcgctttcgacactgtgagtattatcctccttaattgtgtgcagtaatgttctttgtttatctctgaatttgcaatgtgtccgcaacttgtaggcatgttcagaacaatcagctcactggcacacttgatgttctaggagatcttcccctgaaagacttgtaatcactacatcaattcacacatgctctgtccaggaaaaaaaatcacacatatttaccttgatgcatttctcacctgatcctctcatgatttactaatatttgcagggatatagagaacaatcttttctcaggaccaatcccagagaaactgatcaacatcccaaaatttctgtaaatctctcagccttcctcaagaacagtagaatttaatctagtggcatcccagtctgacacaacagttggttcttgattgtgtgcaggagaaacggcaaccatcttaccatccccacgatgcccggctcttctccaactccggataccatccccggctctcctccgactccggcggcagcggtggcggcgcctcgatcaggtgcttcacaccctcctatatatgtaattccggccactccacatggcgctgcacagggtgaccctccgagacacggcaagaaggtctcgccggcgaaagccgccggattcagcatcctcgccgccggctcactgaccattgccgtggtcctgatcgtcttcgccgtgtcgaaacggcggcgggagacgtctcttcatggaggatttctgagaggagttgagatgagcactccggattggagtgggaagccttcaggacaaagtgcagttgtcaaggtagacaaagaacaaagcacaggtatatacaccgactgaaaactggagtatttcctatcttgggcccacatgtcagtgacatattaagaggtcaatcttagaacaattattaatgctcaaaaaattcagtacataaaacgctagcttgtgcagtcatctcatctacattttaatcattttgtttgttgtgttgatcactgaagttgctgaagagaaggataccaagggtagcatttcttcatatcagaagaatgttcaggagagtttacaaaaccatcctttgcaattcaagttcacaatcttcacagttgcatccttgcaacagtataccaacagtttcagtgagcagaatctgatgaggcaaaccctgttcggaaaaatctacctagcagagcagcaagacatcaaggtatctaatcaactgtaccctgaaatctccattccattcctacatggattgaacaagtttatttcttgatcagttgtaatcaagatcttgtcatttcatctctgatctctctacaccttatactagtttgcagtactgaagcttgacgaagcgatggcgagaatgccggtggacgagttcttgaggatggttcagagaatctctgaactccagcatcccaacatcgaggagcttgcaggatgctgcgtcgagcacggacagaggctgctcgtctacaagcatttcagcgatgaaactctcgacgacatgatccatctgaagaaactggcatcatcagacgatcctgctgccaagatcactcttccatgggatgcccgggtagctgtcgcactcgaagctgcgaaagctctagagtacgccattgccatgatcatcttcaatttgctgaataattcgagtgtttgtcttgctggcttctgaatctgaagtgagtaatcggtaatcgcttctgccattgctgttcttgcgttaggtacctccacgaaggtggtcagagacaggttgtgcaccagcatttcaggcctgaacatgtgctcgtcgacggcgagatgcgtgtgcgcgtgtccggctgcggccttgctgcggctgtgaaatccggcttggatcttcaggtaatcgtttcgtagacaccgcttgatcgatcagcttgttcttggatgtgcatctgatcgatcggtgtcgatttgagcagtcggaatgctggctcgacgcgctgagctacgagccaccggaggcggcggcggcgccatggacggacaagggcgacgtgtacagcttcggggtggtgatgctgcagcttctgacggggcggaggccttacgacggcgcgcggccgcggggcgagaggcggctggtggcgtgggcgagctcgcggctgcacgacctgacggcgctggagaagatggccgacccgcgcctcgggacgccggcgacggtcaggtccatgtcgcggttcgccgacgtcatcagccggtgcacgcagcaggaagcggagttccggccggccatgtcgcaggtggtgcaggatctgcggcgcgcgctgcagcctgcacgcgatgcttgcggacagcagagctgcagcaactgattagtgacgaaaatttactaatcccgcagttccgaaaaaatatatataacaccatataagacatactctaatgccctatatttatgccactatcttgtgttaaatctattatattttggaacgaaggttgtagtaatatttgtcatcctcctgatttgcgtgggttcgatttaaagttttagacagcgaaataccatcagaaaatagatggaaaagtggaataccaacggaatacaaagggaggaaggggcagttcaaattgatgtcattttcaaccatatctttttttttgcaaagttgccaaatttgataaatacataagaaatcctgctaaaattttggcaatattaccatcttgctaaattttggtaaggtttannnnnnnnnnnnnnnnnnnnnnnnnnnnaagtctctcatgttcaacatacacatttttctcaagtgctaaatgatatgttttcataaaaatatgtatagagaaaagttgatttaaaaatcatattaatcacctttcccttccggtgatcattaaaaaaaatcatgttaatctattttttaaatttgaactaattaatactcgcgtaaccacgtgctattggattaactcattttacgtgtcttttaaaaaaattctttcacataccctcaaacatatcctaaagtaagtatcgctaggcaatattctcgcaatatcttcaacctcccatatgctaaaatcaccgcttgtcagatatacgctgatgatttgcaaccataatccacttatttctttcatttcaaatctccaaacaaccaaaatgaagagaggctccaggtccatgtagatttgtccacataagttgaaaaataatggtcaaagttttaacatctccatcacataaagttgcgaataaaaaggtgagttgggaggcgtcgtttttatatttttaaggatgcaacataagtaacaaggcatttatttgatgattgaaacagctcaacgatacattattttatttttgttgtttcacaggttttacatgcaagagacaaaatatattgcaaaacagtatagttatgatttcatctagatgaaattcatttcgtttctcacttcatttatctcttatcatatcataaaaatattggcacggcacccaatttaatgagaatgaaacttatattgaaactaactatcagaattatgaataccacatacctaatagtagttgactaaatctcggcaagacccaccacataccatgttttatacggaaacaacctgcggatatgggaggagttccggataaggaaagacaactagagttctacatggaaacgacaaggactacgcggattgtatccatattggtttccctagttctatttggacaaggggatacctatgggtataaatacaaggtcccctaggaggagaggggacaatcaacacacccaccatgaaaaagacccaccatagaagacacggaacaataaatcaagacagaagatcagcatagaagccagcatacgccaagacaagacgcaggatatcgacttcagagataagtacagttagtcccctacggtgtctccggatactgtcaagagagacgaaagcgctgtctctgatctcgtcgggcacgaactcgaggaagaagactaccctgttgtcgactacgagtcagacctttagaccgccatgtcgacaacagttagataggctaccccaaatattgtactggtgtgattatggtgaataagagcaataccggcttcggccaacaggatgtagggttattacctgacaattcaggggcccgaatctgtataaaaatccctgtctccatctattttatctcagtctcgcgtatatcctagtaccgacgatccccataccatgcaaataccggaatcgcgacatcaaacgtcgacactaacattacttagtaattcaattcatttcatttcttaaactagacaaatcttactgcatataattgtgtggttgattgcctatccaatcggtcggtcctggacaaacggaggaacggatagacacgggggcggttgttcccatgcacgaatctcaaagcactccatggttcggctaggacaagtcacaagccagatctcgtccacctccattcttcccttcccattttccgcttttccggtttcctcccacccaccccgcaccgtactcaatttctcgtcaatctcaggaaaaaaaatggtgcctcgccgcgacgagatctgagagcgcgcacgcgcgtcctcctcgccctcgccctcgcctccgccgcgcgcgcgcgcgatggcgtcatgcgcctcaccgtcgtcgcggttgcacggcaatgcggccggcggcggcgccggcggcagcgccaccgcgatgatgctcccggggccccccggccgcggcaacggcgggtgcatcgacctcagccccgcggggctcctcgcgcatggcgcggggagcagcgtcgtcatctccgacccgcgcaccatgcagctcctctgcgtcctccccatgccatcctcctccctcgcctccttcgtcaccgccgtccgctgggtgccacccagctcgcgcttccacgccgcggggatcgacgacgacgacgacgaacgccgcccgctccgcctcgccgccggcgaccgccacggccgcatcgccgtctgggacgcgcgcgcgcgcctcgtccttcactggcttaacctcgacgagacccgcggtgtcgcgccgggatccggcggcggcgtccaggacctctgctggatccaccatgcctccggttggctcctcgcctccatccatgggccctcgctgctctgcatctgggagacctccaacaaccctagtgtcctctggatgttcgacgcctcgcccgagtacctctcctgcctccgccgtgaccccttcgacgctaggcatctctgcgcgatcggcctccggggcttcctcctctccgccatcccgcggccggactctgatatctcgctccaggagcaccgggtgacctgcggcgccagtgacattacagagctgcagaggctggagaaggagatagcggcgcccccgccctccccggccctcgccgcgtttccagcattcacgccgaagctatgcttctccccgctgtggaggaacatcctatatgtcacgttcccgcgggagctcattgtctttgacctcaattacagtactgcgctctctgtcactccattgcccaggggatttggcaaattctctgatgtcatgtctgatcctgatttcgacctgctctactgcacgcacattgatggcaagctgagtatctggaagcgcaaggagtgagtttacagtcatacttttcatgtggatactgtagaattagaatatagaaaacatgtctattgaattgtgtccaaatgcccgaactcgtatgaactaaatttgcaataagactgtggtggtcaagtgcaatcaataggctacatagaaaatgcaggaacaaaacagaattcaaaatggtgcaagtacatagtaataaattctagataaacttggaaattccttacatccttgggagtgtgctgataaacacataattactatgaagccattggagtttcaattatgttgctgtgtaaaacgaatgaataatcagtatacacacctgttagtgaccgttgatctgtttattaatggacacaattttaatgaaatcgtacattatactatatatgttttacaatctgttcaggttattgacatatgggcttcacaattgtgaaccaatatatgcatgatcacattacgtttgtacataaatgatacacttctttccagtatattaagttcctctcgtaattcttttttcttttccggttctaggggtgaacatgtgcatttgttgtgtgcggtggaagatctcatgccttcaattggtacaattgttccacctccagctgttcttgctactacaatctggcagtcagaggctgttttccgtaacatagagaagcaatcacgggacttgggacaaatacaatctacacattctgtcatctctgatacaaatacaaaccaaaatatgtatcaagggaccatgacatatctaacctcgatctctgaagatggcaagatctggtcatggcatttaagttttgacaagtctgcatgtgctagaaaagataaactaggtgcgaaccagtggtcagttcagtgaaatagctatttctggctctcaactgtgtaatttactgatgattccatttctgtcactaatgttgggaagggaccaggtacatcgaatcatagtgatgctggaatttccaattcgcgctccaatggacttgattttaccgtaaaggttgtagtgtaaacttcttccttggtttctgttgttagggtatcaccatgattaagcaggaatagtggttctttggaatctgaattccctatacttctatacaaattccctatacttctatacacagctcgattatcctaaattaatgggattgagatgtactccctccgtttctattttaagtttgatcaagtttctagaaaaatttagcaatatctaaaatatcaaattagtttcattaaatctaacattgaatatattttgataatatgtttgttttgttttgaaaatattactgtattatattgttctataaacttggtcaaacttaaataagtttgactaggaaaaaagtcaaacggcttataatattaaatagagggagtacatgtttagtcatcaatcaatatcccctattcctggcgcttatgtacttcccttatgtggtttgctcatttgtgctatgctctgcagattaatttgatgggccagcttcatcttttgtcctccactgtgactacgctagctgtgccatccccttctttacttgccacagtagcccgtatgcccatgaccataacattgtaccgtgttctgaaattataggttttaaatttgttcaacattcccataacagaaaactttctttttttctatctgaaggtggtggaaacaatcctgctccagcagtaccacttgttgctgtaggaactcagaatgggactattgaaattgttgatgttttagctaatgcaatatctgttagctttgctgtccatagcagcactgtcagaggattaagatggcttggaaattcacggcttgtttcattctcatatagtcaggtactcaggtgcttccatgttacttctgataaatcttgtcttttataaaccaagtacctacatattttgataatgtgaccaattaacattgtggcaatcaaaggtgcttcattactggaatctctgatactattctgtttcttatagtgccctacgttaatattatcattgatttgactacaggccaatgacaaaactggaggatacaataataagcttattattacatgccttagaagtggacttaatcgctcattccgtgtacttcaaaagcctgaacgtgcaccaataagggcattgagggcttcctcatctggaaggtggttctatctctcttacctagaccaatctctgtttgtgcccatacctttttcaagttttaaccttttacatttcaatatgcatggatttggcacatttatcacagctatatttttcatctcaagcatagttttactttcttaggtacctcttgatactgttccgtgatgctcctgttgaagtatgggctatga

SEQ ID NO: 18133 - DNA, 661 bp, Oryza sativa
cagaattgtggacaactaagttcaatggcatttaggcaagagcaactatggttcaatgcaaatgaaagaataccttggcatgagaagcttgatggtgaagaggctttgcaaaagcgtgtccatgagtaagaaccaatcatgccaccttttattttatgaaattttaacacatctggcctatttgtttgtgccacatgtttttcacaatctttgtactcaggcttgtctctcttggaaacttggaaactgcggtgtccttgttactgtcaacacctcctgaaggctcaaatttttacccaaatgcattaagagcagttgtattgtcatctgcggtatcacgatctttacatgaacttgcagtcaaggtgaacagccttagacatcgatatgatgttcttcactttggtacacagcatgtttagaaatgacacagtattaagtcatgaaatcttgtaggttgtcgcagccaatatggttagaacggacaaatcactatctggcacgcatcttctctgtgctgtgggaagatatcaggaagcatgttctcaggttttacttaacatctcagctgctacagcataaactcttattctcttttgcttaacttaattttacataagcctggtctataacctacaagctggttatgtttcagcttcaa

SEQ ID NO: 18134 - DNA, 3647 bp, Oryza sativa
acttgtttggtttagttgttgtaatatccagttagtgtatgtgcagtagttatgctttatctgaaaaatgttgatgctaatttggtgatatcaggttaatgagcagacattccttttctgcagcccaaagtgaacataaatgtcttgcctgaagcacttaaaagtgacactattttgttctcctttctcttgatgtgctatggtaattctaacttgctgtgcgtaacccatgcagggtactccagaggtggggtgattatattcttcgcagtgaacataatatgtggaggtatgttgatcccttacagctacaggatttaaacaaattcatcactcctgctctaccaacacatcgtttgtccttccacagagctctgatactatatgtagctgctggagcactacctgaggctttagaaacgcttcgcaaaaaccaacgaccagacatcgcggcgctgttcttgcttgcgtgccatgagatctattcccagatcaccacagaatcagagtcatcagatgacacgccagggtctggatcgccgacatcggaacagagccccaagctccggttcccttccaagaatgtggacgacgaggacctgatcgcggtcagcgaggtcttcgggcattaccagcagaaattgattcatgtttgcatggatgctgaaccaaatgtggattgagccctcttggcgccatgccatgccatttgccaattgccatgtgggagggaggccctctcctggatggacaatatccgaagctgaaagagaccgagtgcccccactggtctctactactctttgtagatgtcaacgtctagcttttgcttctccatttttgtctggtgtgaagcttttttttttctttctacaggatgtatgctgcctgcatttttgtctggtgtgtaatctttttctacgggatgtatgtcgcctgcaaatcttgatgctggacagagccgcgttgcgccgtatcctacaaaagacgccgatgattagcattgctgatgtggcatctgtacggagaacctgataatactacttgaaagggataggcattgcggtgttgtattgtactagtaggtgaggacgcttggcactggcaatacttttctgtaagaatatatatatctgtacattttttattgctctttctcgctcaggctgcaaaaacagaaatttggaagttgtagcacatatgtatcgacttaaaacatatttaggtttggttttgaggaatcaaaccatccagaatgagaaaaatccctactttctcatctagaattggtgatccatcggtggacaattcctcaattctttttttgacaggacaattcctcaaatttggtagaatgtctccattgctcatttcttttctactggtacttgtgagttgtgagtgactggggatcatgggatgatggataaacctattcaatttctcaaaccaacaccccccccccccaaaaaaaaaaagaagattaaccgatcaattgaccaacccaatcctcaaatatcctccatgttactattaggccatgtttagatgggactaaaacttttaagtccctatcacatcggatgtttgaatattaattataaatattaaacgtagactattaataaacccatccataatcttagactaattcgcgagacgaatctattgagcctaactaatccatgattagcctatgtgatgctacagtaaacattctctaattatggattaattaggcttaaaaaaattgtctcgtgaattagctttcatttatgtaattagttttataagtagtctatatttaatactctaaattagtgtctaaagacagggactaaagttaagtccctggatccaaacaccaccttagacgcttgacgcattgagtcgtcgccatcaatcaatcatgccctattaaaatcttgtagccactgctatggagtttgatgaaagcaacctttttctgtcctagatgcctaaaatcatccatgaacctctgtaattaactactccctctgtctcataatatagcaacctacaagacgagacatttcatattacaacgaatctagatagatgcatgactagattcattgtactataaaatatcacatctgatcctagattgttatattatgagacggagggagtactgtagtattactttcacgcaggttcatttcaggtccaactttcttggccacatgacatcttaagataacatatttggcatagttaatcatcctcagacaaccaatcaaggaagcatgataagcaaccactaccataacaagtagcagcaactttctatccaaattacattactggcccgaaacaaaattccattttggctctgccaagtgccagccaaccaaccaaccccacgtttccatccaaattaatcaccaaacttatccaaatcacttaattaactatattagaccgtttgacacgactccgaaccggagctctacctttttccgaagtttgagcctaacgaaacggtttcaaaatacaagcaagatcaatagtgcagcccactattagctctaaatcatctatagtcaatataatagccaattcatataatagttgcttactatactattaatatttggtcccacctgtcatacatacattatatcttggagcccgtgctgcagctgactacagatatgtagcccgctgctcttctctcttcctttatctctttaaaatatgtttatagctggcttatagcctgctctaaggaaatagtactaactataatactatcacaaaataaactgtagaaatgaagttgggtttagacagctctacaaaccctattttagatctaactcataaaattaaatttaatagtttaagccctaccaaacaaattgcagttacacaaaaagaattttagaagcgatcgctacctaaatagcctgcgacctcatgaggccgacaaactgagcacaggtgacaacaatctatgactagtggaaaaaactagcaacacaccataacgttcccaacaaagagattcgaccctaattctcctaatctcttaggaaatatggaagaagcgggaccaaagaatcttccaaaacaaggagctatccctataaatcttattatgaaaattaaggagaagccaaatcttgggtattggcgggagccaaacaactaactaagatgttaccatagacgtctgccttatttgtaaatatttctttgttttctattttacatgtaaataacactcctatattcaatgaacaggcacgctgtgtctttcgtttttcttttttaaaaaaacacatgctaaacgacccataacgacggcattttttgcgagagtgggaggtggtcccacctcgagcgggcaagcaaagcagcaacgagaaaaggaatctggacgccaccccaccacaccaccactaccccccacttgcaatctcccctctctctccctttttaaaataaatccggataacgcatcggtgaaccctgcggattaacagagtaaactgcaacaaaccacgcgacccccaaacctctctctctctcctcgcctccgccgtcgccgtcgccgtcctcgactgctcctccggtgtgatccgatcacgcgcggcctctccgcctcccgctcgcccttc

SEQ ID NO: 18135 - DNA, 1868 bp, Oryza sativa
tacagctcgtgagcaccacaggaaccctgatccctaaccttttctctccccctcaattttttttgagcctaccttggttgtgcatgcgctgtgctgtttgtcccccttcttcacgacgattttcaagttatacgttatcattcagatgcaaggaataaccgaaacgcgtgttgtcgtagctaccatgttatcattcagatgcaaggaataaccgaaacgcatgttgtcatagctaccatgctatcattcagatgcaaggaataacagaaacgcatgttgtcgtagctaccatgctatcattcagatgcaaggaataaccgaaacgcatgttgtcgtagctacaatgctatcattcagatgcaaggaataaccgaaacgcatgttgtcgtatctaccatgttattaatcagatgcaaggaacaaccgaaatgcatgttgtcgttgctaccatgttgtcattcagatccaaggaataaccgaaacgcatgttgtcgtagctaccatgtttcctttatatgtatatttattagtaccttttatgcctttcataattgaatggattgacatggctggcaaatgtctgtgttgctttaatatgccctcatttgggcttttatgtactagggttagttcgttatttcagtatatgcgcgatcccgtgttggactttagttaaagatcatgtgctggagtcactgcaggacaaggttgtcggaaggagagagaaaggagagcaaaagagtttggggatgaagggaaaaggggaaagaaatttaaggaaaaacacgtggcccaatttattatttgaagctgaaaatctcataaagcagaattatgatgtctaacggcataattgaaaatttgaaactctttatgtgcgtttctttccttttcttcaagtcaaatgctgaataggcaaccgctcttgcttcaatatccaatgcttaaaaaagaacttctgaaaaaaaatcattgtagtgttcccttacctttccttttttaatatgcaagatatgctctcttttttttgtcggatgtcctttatcatttcttgtactttctcatttattttgactctgttaacacttttgtgtgaacatattggaaactctgtagttgtacttctctctgcatacttgaagcaataagtcctcatacaaaaattgttttacaggtccagaatcttattgaacgatgtcttcagctttatatgaaccagaaagaagtggttgagaccctatcattccaggcgaaaattgaacctagttttactgagcttggtaatacccttatacagattttctttttcttgttgtgcactgaatgtagcataactataacttggttgacttcccattgcatattgacatagcaatatagcattcatggtgcaccaagcctttgaatttttatgagccaatggttaatatcggacaggaatatgtgtgctttctaatacaatttggagggcattaatttcattccgtcgtaattcataaacaattggttctccgattgctgtttttaatggtaaaacacaaacacgtttgcctctatttctcactgttgtttttctccagtctggcagaaacttgaggaagagaatcgtgagttctttaaagcatattatgtgagacttatgcttaagaatcaaataatggtcttcaacaagctccttgaggatcagtatcggcttatgtgtaaagagcagccttctggagtaccttctatgcctcctactactaatggctccaacatgggcacatgtaagtatatgttgttttttttttcatcagctgtctatacaatgatgttaccttgcttactgttcaacaaatccctctaaactatttcattctaaattgatg

SEQ ID NO: 18136 - DNA, 1222 bp, Oryza sativa
gttcttggggatgttcttgccgacgatcttggcaggagcgatgcggaggaggttcccgggcttccctggaacggcgcccttgatcatgacaactttcaggtcgttgtcgatcttgacgatcttgagcttcctgatcttggtcttggttcctcccatcctcccgggcatcttcttccccttgtacacccgacccggcgtcgtcccggcaccgatcgatcccagagctctgtggctcttggagccgtgggtcatcagccctcgcttgaagttgtgcctcttgatgccacctgtgtcgatgtccaagaaccgtcagtcgcaaattgagagcatagttgcacaattatgccatattgccattagatgatcaggaactaaaagagatattggtgctcttgacttcatgagaatgctataaacgattatgttgtttggggagaaacacccaggggtcttccaactagctccacaaggtggtaggctagatgacctgggttcgaagcctcacccattctgattatttgatattaggtccttctctaatatttgtgtcttttttattatgttgtttgggaagaatatacatgaaatggataatgtttgcggtattggcaaatcgttggtcgcagcaaatcaagagcgcaattgcaacgggtttacgatgttatattcacttcatgaaaattatacaagtgatgctgatggttgcaataaattgtgaactataacgaatgtgttgacatggtacaggtctgcaactccaagaacagcattgacattgccatattggcaatgccattgtgcaagtctaggacgctaatcaagagaagaggctaaatgattcttcccaagaacaattctgtacactaacattggtgagcatatggtaaatttgatacagcaaaatttcaagcttgttctcaagtcttcctcacaatgtaaagcattgttcaaattcagacagggcgaaatggtagtcacattgtgaaaagggagtaaaaaaaaataatcaagtttactgaccttggaaccccttgccgatggacttgccggagatgtcgacgaggtcgccctccttgaacatgtcggcgaagtcgagcggctggccggggtcgtacccgtcgacggactggaggcggaactcctgcaggtggcggagcggcggcgcccctgccttgccgaggtggccgagctccgggcgggtgagcttctcctcgcggacgcc

SEQ ID NO: 18137 - DNA, 1631 bp, Oryza sativa
gttgctactattctccattgatagcacatgtaaaaatttagggagtaactatatatatatttatagcgccgtatttttcaccaaaaaaatagtcggcatgtatttacattgcaagtccctaaattacatatataattttagtgtatttacaatgtaaattccaaaattacatatgtaagtactaaaattacatatgcaattctcaaaattacatgtgtaagttgatgtaattcccaaaactataaatttgtgatgacacggatatttagtttttaagactaattagtaatcctaattagcaaataacattaaaacaacagaagagatcagaagagaacagaatcggagggatatgcgtacactgcgatgatttctgcatccgcatctgacggttgaaacaaccgactgaaatccatcgtaatttgtagcgacatatttttagcaataccgaaaatttatggatcactagtaaacgttccttgtctcccaggtttaagtatgctgctagctttgccattgagaccatataactttaccgagttttattttagataacgtgctatccagtgtccttacttaaagtcaagtgtttttacctagatcaattgtaccttagcacggtgcccctgtgcaccaggtgggaagatatcaatgggaactgagtttggtacagatggtttgttttagtatataagtgggtttttgtaggttagccacttgcactctcgatgaccttcattgcactaacacagttcagaatagctcactacaaaatagtgattgaacacttcaaattctatcgaaccaataacgttgttcaagaattgaaagcaacgagagaaatccattgccttctacgcgagtgagattcaaaaacacaaatcttgcgctccatcactagtattttcacaattcacattttgctatatctttattgttttctatgcccttcgctctacctgatcacttatatataacaaaatattgctttacttagcatatgttcttctggagggattgaaaacccccttcgcatgcaaaacgaagcaacatactaacactgtcggagcttggggctcctcaccgggagaccgcgcaggcccccctttgccggttcggccgggggcgctaagtgaggttcttcaccctcgatctgtggaatattcgcgagagagcaaatgcacgagacacgggcgatgtagacaggttcgggccgctgaaaagcgtaataccctactcctgtgttctggtggatctgtgtgtgaaggagttacagagagctggagagcaagagagttcaggctctagaacccccttcctctttctctcctctacaagctcaagtattttcagagtcgtctcccctcctctctcttgcttcggtgggcaaggtcctccttttatatctcaaggggatcccacatgcaccacttctacctactcttcttttgggtggggacccaccctatcctgaccaaaacttggctcgcgtcttcgcctggaagctaaatcacagcttgtccttgagtgaggcccagcgccgtcactcgcctgacacaggggatacccctgtcatttcttcattaatgggtggagatttgcaatggatgctgtccgaatgaccctccgat

SEQ ID NO: 18138 - DNA, 4838 bp, Oryza sativa
ttagcatgccgcacgtctgcccttcttcatacaatgacttcctcgccatggttgcgatgaagcctggaatgaatctggccgggactgacataccaactctaggagttagcacgccggctccggctagggacgagtgcctggaggctctcattattccgacgggacggggcgaggcgtgtgacaggccgcctgttgccacctaacccgcaatctaaccggtctgtgaccggtcacacactgcgaccggtcacggaccggataagcgtgcgatgcgctgcattgaatgcggcgtggtgcgctcgtctaacccgctataaatgcggttaggtgagcgccgctgtgctcacctaacccatacacgtggcgccaacaccacaggaggtcggggcgccccagccctcggggccgaaacgggagcggcccgacccctcgaggagacagagggaggggtggccacgtcatcctcgggcccgacccccccgagggggtcaggccacgtggatgaccgcggctgcccaagcctctagtcacgatacccccggtcccatgtcaccgacaaacacctaattaaatattagcttaaacttaaaaaataaattaatataaattttacaggaacattttttatagaaaaatatttgcaaacacacactatttattagttcggaaaccgtacgcaaaagaaaggagcgagtgaaggttaggaccacagacttattctacgcttttaaaaggcatcttctatctttttatttttgcttgcttctgaagagggggaatttctagaactgttcggctgcactcattcaacgaagctgcaacacagtggttgcaccttgcagccgaacaggccctctaattatatataataagcttgtaaacttctcaaatacagccatacacaactactcaagccgagagagaatccaaaaattgctcaaatttgaaaattttggtcgtcagccatcaggctcgagccagactgcgaccctaagccgacctattagagcatctctaatagtctctccatcctactctctaagataaattttagccattctagccaaaaaaacgtgctccaacagcctctccaaccggatggctaagccatatggctggctaaaacccttcctccactagccaaatttggccactctatttggctggccaatggtgggccctacgtggctaatcaactccatccccacgcggcaacagagagacacgggaggagcacgacgacgagcacgctaccgacggcctccgctcgccaccgcaccaaacccgcacggcactgcccgccgcctccgctcgccgcgtctgccggcctccgcgcgatgaggctcggcgccgccgccgctcgctgttctccgccagtccgcagtagtccagtaggaggaagggaggaagaagtagtagtagaaaatgggttggaagaggaggaagaagagtaggagagactgacatatgggtcccatttgtaatggacttgtaatagagagggtagatgaagaggctgttgaagtaaacaaatagtattactagccaaatcagattgagagttggctatagaaatgtttagagaggctgttagagatgctcttatgccgcaaccgcaccaagccgcaaacgctccggttgagttggactcgtccgagccggatctgataacccacccgcgactcctaccccattcgagcaccacccgccccgccaccgcctccaatctaaaaccctagatctctctctctccccacttctctctcttctccccccgagtcttcctcacccgccgccgccgccgccgccggaggaggaggaggaggaggattccggtgcggccatgtacctctacagcctgacgctgcagcgggcgacgggcgcggtgtgcgccgtcatcggcagcttcagcgggcgcgactcgaagaagtcggcggcgtccgggtcgtcgtcgtcgtcgtcgtccacgcaggagatcgccgtggcccgtggcaccactctcgagctcctccgccccgacccggagaccggccgcctccgcacgctcctctccgtcgacgtcttcggcgccatccgctcgctcgcccagttccgcctcaccggcgccaccaaggactacctcgtcgtcggctccgactccggccgcctcgtcatcctcgagtactcccccgaccgcaaccgcctcgacaaggtccaccaggagaccttcggcaagtccggctgccgccgcatcgtccccggccagctcctcgccgtcgaccccaagggccgcgccctctgcatcgccgccctcgagaagcagaagctcgtctacgtcctcaaccgtgacgccgccgcgcgcctcaccatctcgtctcctctcgaggcgcacaagtccaacacgctcaccttctccctcactgccctcgactgcgggttcgacaaccctgtcttcgccgccattgagcttgagtacgccgagtccgaccgcgaccccaccgggcaggctgccgagcaggcgcagaagcacctcacattctatgagctagacctggggctcaatcatgtctcgcgcaaggcctccgagccgatagataacggtgctaatctactggtgactgtgcctggtggtggtgatgggccaagcgggctcctcgtgtgctgcgacaactttgtgctttaccggaaccaggggcacccggaagtgcgggctgtcattccacgccgcgctgatctcccggctgagcggggtgtcctcatagtcgcagccgccacgcacaggcagaagagcttgttcttcttcttactacagactgagtacggcgatatcttcaaggttgacctcgaacacagtaatgacactgttactgagctcaggatcaagtactttgacaccatacctgtgacatctgctatctgtgtgctgcgctcaggttttctctttgctgcttctgagtttggcaaccatgcactttatcagttccgtgatattgggcgggatgtggatgttgagtcgtcttcagctacactgatggagacagatgaggggttccagcccgtattctttcagccaagagcactcaagaacctgtaccggatcgatgaaattgaaagtctcatgccaatcatggacatgcgtgttgcaaatctatttgatgaggaaacaccacaggtattcacagcctgcggccgtggtcctcggtccaccttgcgcatcctgaggcctgggcttgccattagtgagatggctcgatcgatgttgccggctgagcctattgctgtctggactgtaaagaagaatatcaatgacatgtttgatgcctacattgtcgtgtcctttgccaatgttacacttgtgctctccatcggtgagactattgaggaagtcagcgacagccagtttctggataccactcactccctggcagtttctctccttggcgaggactctctcatgcaggtccacccgaacggcatcaggcacatcagggaagatggccgtgtgaatgagtggaggacacctgggaagaaaactatcactaaggttggatcaaaccggctccaggtggtaatcgccctcagtggtggagagcttatctactttgagatggacatgacaggtcagcttatggaagtcgagaagcaggacatgtctggtgatgttgcatgcctggccattgcgccagttccagaggggagacagaggtcccgattccttgcagttggttcctttgataacaccatccgaatactctccgtggaccctgatgactgcttgcagcctctgagtgtccaaagtgtctcttcagccccagagtccctcatgtttctagaagttcaggcatcagttggcggtgaggacggtgcggaccatccagccaaccttttcctcaatgctggcctgcaaaatggtgtcctgttccgcaccaatgttgacatggtcactggtcagttatctgacacacgatctcggttccttggcctgagacctccaaaactgtttccgtgcatagttagccaccggcaagcaatgctttgcctgtccagccgtccctggcttggctacatacatcaaggtcacttcctattgactccactgtcctgtgatacacttgaatctgctgcatccttctcttctgatcagtgctcagaaggtgttgttgccgttgctggtgatgccctacgaattttcaccattgaacacctgggggagactttcaatgaaacagccatccctctgcgctacaccccaagaaaatttgtgattcttccaaaaaagaaataccttgctgtcattgagagtgataaaggtgcgctcagcgcagaagagcgagaagcggctaagaaggagtgccttgaggctgctggtgttacagaaaatggtaatgcaaataatggggatcagatggagaatggtgatggtcaagaagatggtgctgaggacagaaacacacttccagatgaacagtatggttatccaaaggcggaatcagaaaggtgggtttcttgcatcaggattcttgatccaaagagcagagacacgacttgtctgcttgaattgcaagacaatgaagcagctgttagcatttgcactgtgaactttcatgataaggagcatggtactctcttggctgttggtactgccaagggattgcaattctggccaaagaggaacctttcagctgggttcatccacatatacaagtttgtagatgaagggaggtcacttgaactgcttcacaagacacaggtggaggaagtacctcttgccttgtgccagttccaaggacggttgcttgctggtgttggttcagtcctcaggttatatgatcttgggaagaggaagttgctcaggaagt

SEQ ID NO: 18139 - DNA, 1980 bp, Oryza sativa
tgatattgatctaaccataggctacagacatgtttttggtgtctacactgggtgagaaggaaattttaaattttattagttactcacatttactggttcagattgaaatatgtggtttgagagcaagtaataggagacaaattacccagcatattttctagatcatgttttcatcatccatctccttttttctttgtttcatcttaaagttttttgtggatatatgaaatttagatatttttgcctgtcctatgaatagtactccaaaataacaataataatgggttttacagttagattgtcccttccaaaataacaacaataatgggttttacctacttctggttgaaacatctctaatttatgaattctctgacagttatgttgcagtttcatatttttaaatatagtatagtatacatataatattcaccatatttcatataccttttttgtttgacaaatttctaacatttctttgtggtgccatctcctgcagtcatttcattattgcaagtacagaagggatgaaaaccaactgtacatcttcgctgatgatagtgttcccaggtggctcacagcagcaaatcacatagattttgatactatggcaggggcagataagtttgggaacatatattttgctcgccttcctcaggatctctcagatgagattgaagaagacccaactggggggaagattaaatgggagcaagggaagttgaatggggccccaaacaaagtagaggagattgttcagtttcatgttggtgatgttgtcacatgtttgcagaaagcctctttaataccgggaggcggcgaatgtcttatttatgggactgtgatgggcagtgttggggcactgcttgcattcacctccagggaagatgttgacttcttttctcacttggagatgcatctccgccaggagcatccaccattatgtggaagagatcacatggcctacagatctgcttattttccagtgaaggtgatatattattttttttgtttagattagctagtatgtcaaccaacacagatattatcacaaatgcatatatttataacttttttaccactttgtcggatagaatatccaggtgtaaaggcagttggcagtatctgttttatgtttgatgatggagtttcgttttggtttgtttcaggatgtgattgatggtgacctctgtgagcagtttccatccctcccagctgatatgcaaaggaagattgccgatgaactcgacagaactcctggtgaaatcctgaagaagctggaggacattaggaacaaaattatctgaaagatcattgcgcatagcgaaagaactagacaaactgttgggctctcaatggctgtaaaaacagaatctcctttcctgtccgagacctagcagcttcagatccgtggcacattcaagaaataagaaaacactagggccaatcgagtggagaggtggtaaagtccttaatggtctgatttgtagaattcttggtgctaatgacctggtgtctggaattcgttgttaatggtctgatttgtatatttcttagttaacaatggctaagttgacctttcagatcgaagcgagaataggtcacataactgcatcagcatcagagtgttcttctgtaactcttagagcatgctttagcctttgtgttagtatttgctgtgatgtagttggacaagttctttgttttgatggttgactcatctgtaggctgctgctactttcatgatgtacgatagaaccttttcattttttcaggtgatactgaagcagatgtattggtgctatccaatttgattttcctgtgataatattacacttttgatgatgaaatattctactgctagtagttcaatggcatataaacaatttcatccatagattttattggctggtaaaccatatataagtgcgtctatgtacgaaaagcttaaccccccctattttcaccaatgggaacggg

SEQ ID NO: 18140 - DNA, 3124 bp, Oryza sativa
ttgtatgtcctttttatatgtgtaaataaagggacccataattataggtggttagaaaagggaacaaaatattatacttcctccgttttatattataagactttctagcattgcccatattcatatatatgttaataaatctagacatatatttgtgcctagattcattaacacctatataaatatgggcaatggtaaaaaatcttataacttgaagcggagggagaaggcctttagtgcgtgagaaacatatgttcgtactaaagaaagatactccgtatgaatgcgtttttgatacgtgtgaaagtgcatggatccatgattctactcaagatacgtgtgatacattctataatcgtaacgtcaccaatgcgtggagctggatgtgaataatctctcaagctggataaacattctataactaattacgtttaaatatcattaacataccacaggcaagcggaatctttaaccataatatcactaattagtggtaaacacatgaaaccaaagacatcctacaacatatctaaccaatacgtgcgacaaatgaaatattcaccaaaaatattctcccccctttccatcctgaattcctgatttcacgtaagtttgccactgctttataaggccatttacactacactaatgtggcattcagcccaagccgaccagttcaaagattctatgtcacatatacttctcttgtaaccaaaataggttacccattcctcgtcagagattgtcagggaggggagaggaaatcctcgctcggctaccttctcgagctagttcgttgcctccaacacggagttgggagagacgacgaccatagttgggagggacataccgggaggtcatcgtcaccgcccaatatgcatcgtcgagctccgccgccaccgctcagacccccaccaaccatcgccctcgctgccggcagatccattgagaagagggaggggagcggctcctgccaaatctactccgccggtgggagaagaagagcaaggggggttcgccgccatcccctccccgcaaaattcggtgccaccccgctaatgtcctgatcagttactactattaaactttaaagtctgcccattatttcccaaaatggaattgctgccgaaccccctggccggcaggcatgacgttttaaagtactacactctctccgtagtagcagcatatagcatctcttcttcacttcacagacatgcgaccctgcgggtgttacgctcctcgctcgcacaccacgaccaccgttcacaccacacgtgcgaaaaaaaaaggaacccgaccccgagtccctctccccaaatcctagccgttggatccccatcgcacgcgcgaaactccccccgcggctgatttttcaccgtcttccacagcggcggggcccgcggccgccacgccccccgggcccacacgtcagcgacacgcggcctcgcgttccacacacacccccggatccgcgccgatccgcgattggtcgacgacgtcttcccctcccctcctctccttccttcctccctctctctctctctctctctctctcttcaccgcgtcgctaatccccacctcgtttccacccccaaatcacaccgccgccgctgcagccgccgtcgccgcagcagctgctgtctctcccccgtgctagtgggggggcgcctcaccccgcgggtgtacggacgtgcccggagtgggggggaacgggagggggggtggggaggcttggtggtatcgggtggggcccgctcggtttctagggtttcggccgcgctgacacctcggggcctccaattcggcggcggggctccgcggtggggtggcttgctgctcccgattgccgcccgccggttctgatcgctgtgggtgttgctcttgctgctgctggtggtgctggtgctggtgctggtgttgtgctgtttatgctgaattgggttgggttcgcggtcggattcgtggaggggtagtttgcctctactgttgctgcgctctggggttggggttggagagagaggctgcttcttttggaggtgctgtaaggcgagtggcggtgcgctcgcttgctgtcgctgcgtcatccagccgtgctgcacggcgatgatttttatgctctgaggctcggctggcggcaaatatgaatgtgggacaagcggcgcacctgtccgggcagatgtcggggcaggcgccgcagactaatcaggttggtggcagtggcgtcggtggcgctgacggactgccacagcagatgcaggacgtggtgggacttgggggccttgatacccagtttttgttaatgcgcaacactatgcgcgataggatgtaagcattctattactgcggcttctttgtcgggggactatttattagtcagggtgttaattgtacggagttaatgtcgccactcttactggctgatccactgcatatctacaaaattaatgcaaggatgacgacttgctaaaattgcgctggacctatattacctgtactgccttttacgctgctgtagttatttgcttctcaaactgtaaagtggaggataattataggactactgttatcgcttttgcgtcgcggatacatgggggctctgggtttagtttgatccccatccatattaccacaatttaggccttctgctgatggtttgagtgcaataggaggtgaagatagattttttgatctgatacttgtttgtaaactggcagattcgaatatataggaaggaagcaatcatcgactgattggcggcgacggctgccagaacttgctaaacggctcgaggagatcttgtatagaaaattcttaaacaaggtattgctctctgtccccataatacttttgtgcctttggtttaaattctgtttcggggcaaaagtagatctaactgttatgttattctatctgtttgattctttttgttgttgttggagcaggccgattacctcaatatgatgaggggaccagttgagccacaattgcagtttgctattaagactttgagtgctcagaaccaacaaaatcaacaaaaccaacaaatgccaaggcaaatggcatcttcctctggctatggcacgatgattccaacaccgggcatcacacaaagtgcaactgg

SEQ ID NO: 18141 - DNA, 605 bp, Oryza sativa
tgcttcattcttaacttcaggggcagtctcacttgtctctttgtcaattggcatgatttcttgcttgacatgagtcttgatctcatttgagcctccaggtgccacattatgtctcgctgtgggcacatttccatcagtaccataaccaatctttgcaggcttctgcagtggtcgtgggtcaatcttcacatccattttcagttgtcccaccttgttattctggtcaggcagttcagaatgtgtttcctgcaatataagccctgcattggagggcatagaaacttcacgctctgcagtactgggtgatacaggctgcatctttaagcgttttggaacagaaggctgactatcaaagatttcatctgacactaggtcgatgtccattatgtcaccctctaccccattcatgattctttgagccgtattctgttgagcaatttttctaggctcagggggcttttgcttgcttgctagttcagctgaacgctgcagaagtttctttgcattactgcatacaggacactgcaaatcgacacaagccttataatgttcagtaaccattcttgacctcctgcaatccctgtatgaacaatctttccttttac

SEQ ID NO: 18142 - DNA, 744 bp, Oryza sativa
gaaaagttatctcaatcgggcaaacggccatcacggatgaacctctctcaatcgggccttaattaaagcccgtcaccgatagctttgactcagacaaccagtcaaactatagcccatcacggatgacctatctcgatcaggccacaactagcgcccgtcacatatgactactcatctcaatcgggcattaactatagcccgtcatagatgaccttcatctcaatcgggcattaactataacccgtcatagatgaccctcatctcaatcgggcactaagttaatgcccgtcacagatgagtataataaaaaaaactaaattttattttttggctagccttatgtaacgtaccacctctccccgtcacagatgagtataatccaaaaaaaaattattttttggctagcctcatgtaatgtcccacctctcccttcactcgtgtgcacccaggaagaatttcccgatcggtcacccatcccaaaattgcttcaggtcaagcacatttaacctcatagttctttggagatcggtttccggagaagttgtaacttgttgatatctaatagtggcgggactttgaaaaattttcgatcggatctgagaaaccttactcatattatagtcaaacatacatctcaatcgggtataagtatagagcccgtcactgatgactcatccgtgacgggcattaagtcatctcaatcgggcattagtatagtgcccgtcacagatgagtcattggtga

SEQ ID NO: 18143 - DNA, 6778 bp, Oryza sativa
aactatcaccggccggcaagataatcgtgtgatgatttcgtgtcgatctctgaatttctcgtgtagcctaattagtgtacggtgtatggccgtagttcttctactagctgccatgtacttaattaacaaactagcttcggaaacttaattcacgcgtctacacataaatatattttgtacttattccctccgtttcctactccatcggttccaaaatactcaatccgttccaaaatataagagattcatagcactttctaaaatatgaggaattttatgtggatgatatgtgttactacgaatttcctatattttgggacggaacgagtataagaccttagggcgtgtttagatctaagggtgtaaagttttggcgtgtcacatcgaatattaattatatagggtatcaaatcgggtgtttgggcactaaaaaaactaattacagaatccctcaataaaccacgagacgaatttattaagcctaattaatccgccattagcaaatgtttactgtagcacaacattatcaaatcatagagcaattattaggcttaaaagattcgtctcacaaattagtcgtaatctgtgcaattagttatttttttagcatatatttaatacttcatgtaggtgttcagacgttcgatgtgacagggtgaaaattttagggtgggatctaaacagggccttagtttaaagacaaaaaataattattatcatcttcttgtttacatcgccccaataaatacaatacatgcacccaatataattagagatcttgaaggtaaaggacttaaataataataatttagttgaatgatgtgcttgttaattatatccatgggacatccatgtatgcacgttttatattatgaaatatatagaaaaagtagttgtggtcttatattttggattggagggagtattatatatatttataagatgttttaatttatttttgaacagtcaaactattttaattttatctaattttatagaaaaatatagtaatatttttaacataaaataaatataatattaaaatatattgaatgttaaatttaatgaagctaatttagtattgtagatgttgctattttttaataactatatatgaaagtttgtcttaaaagatttaaaatgttttataattaatatgaaacaaagagagtatcaactttgctgattttaagtttttatttatgttgtcatttttattttattttttcctgtataataacactttatctcacatgatattccatgttttgggaaaaaaaatagcttcgtgattctgaagcgtggacagagcatatcatgatatgatgacagtagttacagcctgtacggatcgcgacccgcatgttttcccacatacggcttaataattaattaacagatgttacacatgttttaaagccaacttgagtgtttctcacacggtctctttctgctggtttgatttttgacgttttttttcctaaagatgtgagaggtttattcctccgtaatcaggtacagcgcatatagtatgtataaacaagtacaatgtacacatatcattgatatatgcactcctgtcctgaaattaataaatcgtacggatatgacatatcataatattataatcagattcacaatactacaatatataaaatcctatattaagtttgtttgtttcaatacagaggaagtacaaataattgatattaactgtcgagtatgatgaggtgatctacaatatatcgtaagttatttagacatgtagagtgtatgacaacttgacaaggagatgatgtataacacatttttcttaagcgcaccgtagaaacatgattgtttcattccaagccaacaagctcgaagttccaaataacccacctacgtaaagttcccttctaaccctgactaatataactcaaaggttctcctaaataacccataatatttatgtgttcctttatctctcagaatttcaattgcgatggagaccgggaccacgtctaaatcgcactaaaattcagccttcttacgaccgaatttgactaaaaaccgaaaaccgaaaaccgagaccggaattttcggtctgaccgaatgcactccgcagtgtgtgtgtcctatcgagaagaacggatggtttgggctaactgtttgatgcgaggatggtccaactaaatggaaggacggtactatccagggcactaaagagatggtccgttttgtgagccggtatgtcctatatatatatattctcactacaccacaggatcgaacattcaggccgtgctccagatcacgcacaaatacatgtgaccgtccgggcttttgtgctggacggacgtacgtctagacctacgggaaccaatccaaatcgtgcccgaccaggccagccatttggagcccgtatgaatgatcgtcgctgtcgcgccttggcatccacatccactttgacatttgatttggtagaaatcacatatatggctcatacattccacgaaataattgttattaatgcatgatctaaaacccatatacatatatactcccgtcgtttcagcttataatacgttttgactctgctttaagtttgaccgagtttatagaaaaaattagtaacatttttaacccaagacaaatttattatgaaaatatattcaattattgattttgatgaaactaatttagtattataaatattactatatttgtttataaacttagttaaacttagaacagtttgactttaaccaaaatcaaaacgtcttataacctgaaacgtagggagtagttgttaatttagagattaaagtcaaaatcaaaagcagaagggtgcatgattcaaacacagagttttccaacaaatagaaggtgaatataacctttgtgagatccaaagaatgaagggaatggcttaattcctagattatggaatctgcgttcctcacgctactgcactactacagaaataggctagcccccctctagccatcatgcagaccgtgacatcgtccgagcacctctaccgtactcaccctaacttttaaaacctaactagcaaaatacaaatactctatgggtaaaaaaaataatatgtcaaagataaaatatattattttattaaatatgttagtatcacttgtttgcttatttacatatattgtattcacctgtttcaaacaaatactgaactactctataatatttaaaaaatatcagggctaatttataaaactgcaaagggaatggtaagatggtaccataatgtattttgaaggagcatagataaataatgctctacagtctacccatatcacacattacttgtgaagttgtgatcaatttgacagtggttttgctgccatgaacgtcaatcagctaagtttgtagtgtatgtacctaactaaggctgtgtttggaggaaccctcctcccggcacgtaaaacgaagcacatattattgcacgattaattaagtattaacttttttttgaaaaatagattaatatgattttttaaaacaactttcgtatagaatttttttttttgcaaaaaacacacggtttaacagtttaaaaagcatgcacgcggaaaatgagatagatgagttggtaaactgggataagaactcagccgaagtgaagtctacattaaaaaaatatgcgttatgagagtatacactgttggaattaatgaatgggccttagcccactcgaagattaattctttggaaaatcacaaaagcccacctcatgggatggcatgcatgtggagtttagtaccaccttgcttattctaggagagggggacctccttaaaagggaggatgccctcctagccacttgaagcatgtgtggtggagagaagaggggaaacacacgcgcgcgctcgctcgcctcgccgggcagggcaggcggcgcgcgtgcacgacgtacgcgtcgaatggtccgaaaaattggctcctcacccttgcgcagatgcagcctccttttgcagttttgttttgctgcaaattcggattcgttttgttttggaaacgttccgaaaaatccggtgcgtgcaaacggcgtggagtccggataagttacgcgcgacttatccggttcggttacgcacagtagagatcgtgcgggcgccctgatcaagcgacccttctctatataaaccgacccgccgtcttcacgcaatatatgcgaaaatcaatctagggtttgcctcctactctgtactgcgccatcgctcgtagactactccatcccgctcgccggcgtgcaccagcgatcgggagagcaggtctccggaacctctgcctttgacgtcctgcaccgggagaaggcggcaataaggtttttgggaagcgcttcgcgcgactgctccctgttcgttcgcgacggctcgccttcctcttcgctcgcgtgtttcgtgccttcgtagacacctgcgaaaagtttcgaccaagcagccggtcttttcgtcacctcggtacgtgttcaatatgttgcgcatatttgatctgttcatgttattctgcgtagtttacatgtgtagatctaatgatgcgttcatgctagttttcatctgtaatgtcatgatttatttatggaataaattaaatcattatatgcccataatctcaacaatccaaaaaccttattataggcactgtgattttactatggctggttttgccgatgcactgaggccggataaattcaccggtgtgcattttaagagatggcagatcagggtcactctgtggctgacagctatgaaatgcttctgggtgagtactggtaaacctgaaggagttcttactgctgaacagcagaagcaattcgaggaagccactactctctttgtgggatgcattcttagcggtcttggcgatcgtctggtcgaggtgtatatgcatatgaccgacgctaaggagttgtgggatgcactgaatactaaattcggtgctactgatgctagcaatgatctgtatatcatggagcagtttcatgactacaaaatggctgacaaccgttctgtagtcgaacaggctcatgagatacaaaccatggctaaggaactcgaactccttaagtgtgtcttacccgacaaatttgtggccgggtgcattattgcaaaactacctccatcttggaggagtttcggtactgcactcaaacacaagagacaggaatactccgttgaggggttgattgcgtctcttgatgttgaggagaaagctcgggaaaaagatgccgcgtctaagggcgatggtgggcagtccagtgccaatgttgtgcacaaggcccagaacaagagcaaggggaaatacaaagctcagcagaccaccacttcaagaagcagaagaagaataacaacaatcctaatcaggatgagaggacttgctttgtgtgtggccaagttggtcatctggctaggaagtgtccacaacgcaaggggatgaaggcacctgcagggcagacttctaagtctgctaatgtgaccattggcaacactggagatggaagcgggtatggtaatttacctactgttttttcagttaatcaatctactaattggtgggttgatactggggccaatgtacatgtttgtgctgacatctcattgttttcttcttatcaggtcgcacggggttccaccgtcctaatggggaatgggtcacatgcttctgttcatggtgttggcacggtagatctgaagtttacttcggaaaagatcgtgcagctgaagaacgtgcagcatgtcccttctatcgacaggaatcttgttagtggctcccgtctgactagagacggatttaagttggtttttgagtctaataaagtagtcgtgtctaaacatggatattttattggtaaaggttatgagtgcggaggcctgttccgcttttccctttctgatttctgcaataagtctgtgaaccatatttgtggcagtgtggatgatgaggctaatgtttggcattcacgtttatgtcatattaattttggcttgatgtctcggctttccagcatgtgtttaattcctaagttttccattgtcaaaggttctaagtgccatagttgtgtgcaatcgaagcaacctcgcaagcctcacaaggctgccgaggagagaaacttggcaccactagaactcctacattcagatctttgtgaaatgaatggggtgttgacgaagggtggaaaacgatatttcatgacattgattgatgatgctactagattttgctatgtgtacttgttgaaaacgaaagacgaggctctagactattttaaaatttataaggcagaagttgaaaatcaacttgacagaaagataaaaaggcttaggtctgatcgtggtggagagtttttctcgaacgagtttgacttattctgtgaggaacatggcatcatacatgagaggacgcctccctattctcccgagtctaatgggattgctgaaaggaagaaccgcacactgactgacttggtgaatgccatgttggacaccgcgggactgcctaaggcatggtggggggaggcattgttgacctcaaatcatgtgttaaacagagttcctaacagaaataaggacaaaacaccatatgagatatggattggtagaaaaccatcactttcttatttgcgcacatgggggtgcttggcgaaagtcaatgtaccaataacgaagaagcgcaaacttggacctaagactgtggactgtgtttttctgggatatgctcatcatagcattgcctatagatttttaatagttaaatccgaggt

SEQ ID NO: 18144 - DNA, 2353 bp, Oryza sativa
ggtgtaaacctgtggggtgcaagtgggtgttcaagaagaagcttaggcctgacggtactattgaaaagtacaaggctcggcttgttgctaagggctatactcagaaagaaggcgaagatttctttgacacttactcacctgttgctagattgaccacaattcgtgtgctactttccctagcagcctcacatggtcttctcgttcatcaaatggacgttaagacagcttttcttaatggagagctggatgaggagatctatatggatcaacctgatgggtttgtagttgaaggtcaagaaggcaaagtgtgcaaattgttgaagtctttgtatggtctgaaacaagctcctaagcaatggcatgagaaatttgacaaaacattgacatctgcaggctttgcagtcaatgaggtagataaatgtgtgtactatcgccatggtgggggtgagggagttattttgtgcttgtatgttgacgacatactgatatttgggacaaaccttgaggtgataaatgaggttaaatcattcttgtctcaaaattttgatatgaaagatttgggagtagctgatgttatcttaaacattaagctaattagaggtgagaatgggattactctcttgcagtcccattatgtggagaagatcttgaatcgctttggctacattgatagtaagccttctccaacaccttatgatcctagcttgttgcttcgcaagaacaagagaattgctaggaatcaactggaatactcccaaatcattggctcgttgatgtacctggctagtgcaactaggcctgatatctcctttgctgtgagcaagttgagccgatttacttctaatccgggagatgatcactggcgtgcgcttgagcgagtaatgcgctatctgaaaggtactgtggaattggggcttcactatactgggtatcctgcggtactggagggttatagtgattctaactggatctctgatgtggatgagatcaaagccactagtggatatgttttcacactgggtggtggtgctgtttcatggaggtcttgcaaacagacaattttgacgaggtcaaccatggaagcagagctaacggcactggatactgctactgttgaggcagaatggctgcgtgatctattaatggatctgcctgttgttgaaaaaccggtgccggctatccttatgaactgtgacaatcaaacggtaattgtcaaagtgaatagttctaaggataatatgaaatcgtctagacatgtgaaaagacgattgaagtctgtcaggaaattaagaaactccggagttataacgttggattacatccaaacagcgagaaacctggcagatcccttcacgaagggactatcacgaaatgtgatagacaatgcatcgaaggagatgggtttgagacccatgtgagttatactatggtggtaacccagtctatgtgatcggagatcccgtgaattagatcctgggaagaacaaaccattaataaactagaggagagtaccaatatatataccctatccaagtgaagatgcatatactctcgtgagttgcaaggcaggttggctatgccttaatgagttctgttggctttaattagcaaagatgttgtcctgcagagcattcttgaaggaactcacctttgtgagcttgactgttggtcgcagtctatgaagattttgggtgaatcttctaggaagcttactaaagacctaggagtatgacttatacgctccacccgaggggtagtctacagacggtctagtaccagataagactttgagtgaaacttgcttgcacaagacttgcaattcaaggcgtagtccattgttcaagttgtgagtaagtgtagcttggagttctaggtggatgttcaaccttaattggtctccatcgaaccgctgatatataaacagtacattggaaaaggcaaatctcagtgggattttgagatttggtgggggattgttggaattaatgaatgggccttagcccactcgaagattaattctttggaaaatcacaaaagcccacctcatgggatggcatgcatgtggagtttagtaccaccttacttattctaggagagggggacctccttaaaagggaggatgccctcctagccacttgaagcatgtgtggtggagagaagaggggaaacacacgcgcgcgctcgctcgcctcgcctcgcctggcctggcagggcagggcagggcaggcggcgcgcgtgcacgacgtacgcgtcgaatggtccgaaaaattggctcctcacccttgcgcagatgcagcctccttttgcagttttgttttgctgcaaattcggattcgttttgttttggaaacgt

SEQ ID NO: 18145 - DNA, 2560 bp, Oryza sativa
gctcgccggcgtgcaccagcgatcgggagagcaggtctccggaacctctgcctttgacgtcctgcaccgggagaaggcggcaataaggtttttgggaagcgcttcgcgcgactgctccctgttcgttcgcgacggctcgccttcctcttcgctcgcgtgtttcgtgccttcgtagacacctgcgaaaagtttcgaccaagcagccggtcttttcgtcacctcggtacgtgttcaatatgttgcgcatatttgatctgttcatgttattctgcgtagtttacatgtgtagatctaatgatgcgttcatgctagttttcatctgtaatgtcatgatttatttatggaataaattaaatcattatatgcccataatctcaacatacactaaggaaaattgttcaaaggaaacaacaaaaataatgtttcagtgtgtgtattcgtcccattttagacgttggctatgaaaaacaattttatagttcactccaaaaaaagtaaattttaaggatacaattaaatagacttaatattcaccgatctgaatgtcgacgtcttccgtttaattttggttgttgatatactcccccgtcttaaaatataagagattttgaacagatgagacactttttattactacgaatctagatagagtagtactatgaagcgtcccatccatgtaaaatccattttattttgggacagatggaatactatgaatctgaacagagagtctgtccagatttgtaatttgtagtacttgaaagcatgtcatccatttaaaattttttatattttagccggagggagtatgttttttgctttcacaaaaatgtacggcaccaaccccttgccgacacgaggtacgtaccccatggtactagatactagctagctatttatagtctctatagaccccaacaaacacttcatgactttgtctaaaataaatctaacacgccatattccatctagaaatatgtttggcatctgttcttctcaactccaccttgaaatatgttaggagtttgttttcaatacatagaagagtacgtgtgtacaatttaaataaaggttttcttgtggttactccagatgaacagactaaacacgagagagatatgatgtcgcagcgaagacaggtcaattttcagagtgggataagttgtgtaatgtgcagccatacagtgccagaagattttattttctcgtgcccattttgctcaacaatgttggcacttttttggaatccagtggaacatcaattttgaattcatgcacatgattctcacaacacgactgtacaaccgattttttgtggaggtcattggattagtatatgctagctggaatttttggacgagaagaaattatctcatattcaaccacattaaagtatccttcctttcttggaagaatggattcaaggaggattttattctacaggtatgtttggggagcttaagattctaataagcaattgattggtagccagcttctgagaatctgaaaaagctgatttttcagcttctagcttctagttcattttctggattctataactatagcttcttagaatctagatcaaaagctggattgtttgggggagcttctgattctaggagaagctgcagcagttagaagctcccccaatcaggccctacgtatacatggagtaaagtgtgggaataaccactttggcgatcatggatggattctcttacataatttctttcttaaaaaccttttttccttgtacatacaaccagtgtactgtaaattatcctaatattaatatagtacaataggagcatgtcctactgttttacataaaaaaagtaaccatgaaataaaagtcacaaggatatacagctatacgtacgtctgtcgattttatttgtaaagcacacttcaaatatagacgctaatatgtacatgtgcatacttgtcctgtaatcatcctcgtctccctcatataacacggaataacttgatattgatgaaagtaattcgccacaaacatctccctcatatagctatagctaggttcgtgtacctagctctatatatatgcccatgcttgtgtggtgcatgtacgactgtacgtgctatacatacgcttgctaggtgcagatatgcatgcatgcagccgtccaacgatcgccgtctaatgaatgggacgagattctacgatctccggatcataacatagcaaccgaatattattatatagtacaacgaatttggatatgagctataaaatatcccattttaaccctatgcatgacagatagaagaaagtgttaacactttatttttttcacaattgttttttcaccagataacactagagttgatgtactacttataggacccaccccctccattttataaattcaaattcaagcatttttttgtcaaactattccgacgtcgtttaccctaccggaccctacaataactgcagttacggcgcgaaggaagtttcatcggctatgtgcctgcccaaactaattaaacagaaaaatgtgatttcgatcaatgaaattacacccatgtgtgt

SEQ ID NO: 18146 - DNA, 9594 bp, Oryza sativa
ttgcttctgcagtgccattcgttcgtttttgtggaatgaaaatggacaccaaggcaccaagctactattacaatggatatatggtacattcggtattgtagtcattgttccacactccatctacaaacagagtttgacgttccatatggtttatatgtacatgaatttgtgggggtggcaattgatatgacaacattgatggcactcaactaattatgctaaacatgtggttagtataattttttaccgaaacatcatcacatatattaaatggagtatcaattaattgaaaggttaatcagaaaaatattaatcagtttatacgggcataaatatgaattaattaaaaccctagaaatttaggcttcagctaaacctcttaatgtacaaatattatttgttcagctaaaccctagatctaccgagacatgtccaatactccctccatcgcaagaagaatcaacctaggagaggatgaccctcctaggttgatgtatgtggacataggggtgtctacatacattgtcctaggaggggttcctttctaggttgattctttttaggacggagggagtattggacatgtctcgatagatcagtagagcgcaagattgagcaggttagtcattattattccacaaattgagtaacatttataacagtttttcttactttatctaggaactgtggacggaatgaatttgaacttctgtcatttattttatttgtaaaaatctcaaaaataaacttcatggcaactaaaattcctcttcatctcacttacatatgctatctccatatctatagaaacagtgctttcccccagtgcatgttcaacgtccataaggataacttgtctgtacttctctatgtaggatgatctcatgattgattgaggaattctaatgttgtcatctactgataaaaagcttggagaaagcccttgggttgtttgaaatcattaagcctcatcatttctatcctgatgtctcctactcttgaggcgctaccttctttagtcccggttggtggactaaagatttccctctttagtatttgaaccgagactaagatagcgatctttagttctggatttatagtcccggttgaaaaatcgggactacaagaggttctaaaccgagagtaaagagcatttctccatcagtaatctattgcacgcgtttctccctcctaattaaggttgggcttggtaaaccggcgatgcgaggtttctgggtgatgggcagcgttgaggacacatgcaatttgcctagtgtccagtatctgcgaccgcgtgtgagcagttaaaatttgcatgcaagccacatccaacctctgtgttttttcacactcttgatactctgaaaaatagttcagggataggagtgtcaatgagagcacttcaagagtgcaactattgaacctatagaatttttgtcaacatgatgattttacatctttgtccacaattctggcttcttgatctatctactcttacaagcttgttcttaggagcatttctactggtcaaaaatgcaaatttatcaccatcatttgccacaacatgatattgggcatcattttctctgtcttctgggctggtaccctggtacacaaaaagatcgaccaatgataatgccattatctacgagaccatgacatgataacaattggttggttagtttgtcatctgcgctaggatcttccttcatttcttgtttatccaacataaatggctattttgcaagatcgcattgctcttgtttgttttttctcatctaaggtattaggtttacttcgaaggtataatcatatgtatatatatatatatatacgtatatatatatatatatatatatatatatacgtatatatatatatatatatacgtatatatatatacgtatacgtatatatatatatacgtatacgtatatatatatatacgtatacgtatatatatatacgtatacgtatatatatacgtatacgtatatatatacgtatacgtatattagatatacgtatacgtatatacgtgtatacgtatacgtgtatacgtgtatacgtatacgtgtatacgtgtatacgtatacgtgtatacgtgtatacgtatatacgtgtatacgtgtatacgtatacgtatatacgtgtatacgtatacgtatatacgtgtatacgtatacgtatatacgtgtatacgtatacgtatatacgtgtatatatatatatacgtgtatatatatatatacgtgtatatatatatatatatatatacacacgtctatatatatatataagaaatttgtgtgatgttataattattggatttaatagttaaaaacaacttattgttataaaaatacccatatgatatctgaaatacgtaatttagttcgtaaaaaaatatgcgttatcttagggagtattgattcggcgttaaatgaaaaaacggctagatgagcttttttcgtgcgataattactcttaataaaactggcggctatgtttttattagaaaccctttttcatatacatcatatgcttggtatccttactaattaaaaaattaacttggtatgacaacaaaattttgactcaacaaatacatcctcacagtctatatcatatgttaattttttgttagcgcttgctccggacatcgattgcggcgtgtcgtgggggtggccgccgctgttcctccatatccatccgagtccgagcttgccgccgcagaggtcgcgccgtgcgcgtacgggcggaacggcggccagattcgccgccgccttgcctcctgcccgcagttgcccgtcacagccgcacccaccgtcacccgtgcaatatccacgccagatccacgcgcgtggggcgcggagcggcagccagatgcgccgcctcctcaccccctacacgtagtcaccagttgccgccgcgctggcagccgtgccgtgccggatccgccgacgtcgtgcccgcctctgattagcgatggaggtagagctgccgcgcctccagcccgcatcagcccgtcgttgccacgcccgcaaccatgccgtgccgaaaccgctgacgttgcgcccgccgcagctcggcggttcaggtggagccgccgcgcctcccgcccgccaacgctgcacccgcagtcgcccgtcgccaccgcgcacgctgccgatgccgtgccggatccgcctcgtcactcctcatcatccccgaaccaccaccgccgctcctcctcgacgccagttctccgcgtccctgaaccgttgccgccgccgctcctcctcgacgccaagacgtctgttagacaacaaatttgcaatataaagaagatgcaatttttttcggtaatacaccacaaaatgtaaacaaaacaaaaatccatgaaatcagtacttattttgtactattgcacgcttatttacttcaaaatgcttccagtaattaaactatcgaagaattaacatatggttttgcatctttactggaaagcatatagacaagattacctagagccttgttcatcaggtgcttggacaagtcacattgcaggtagatgcgatggagatgacaattttcttgtgaaaagggcgatatttcctccagcctattgttctcagtgttgaaggcaaagatccaaccgtctggatcatcagccttgatcttggtcatcatgtaaacaacatcgtcacagtatagatccaatgtgggaaatgagctcacaacattgttcagggctagcttgtgctcgttgcagtcaaagatctcaggaaacaaacaagcaacacatgagtcggcaggcaaaaggctagcagagtcaacagtgccgcacggctcccattgccaataattatctgaacggatcttcctcttgaacatggtggcctcccatccacggtttaactgtgcatcattaggatccaagtacggaaatcccatctcgatgaacttgaaccagccatctctacaggtgacatcccggaccagatccacgcaaggtccatcgggactgcctccggagtcaacgttgttgatgggcatcaatgggggcagacggatcaggctcacctcggggcagttcccggggaccgagtcgagcagtaggatgctgttccggaaatcaacccaggccattgatcctcctcggacgacacacaacaccttggtgggtaggaagaaagggttgaacgcctccatgccacgacccagctttgcgaccttgttgctccaccgcttggtcttgctcgagaagatatggaggtggaacttcatccagtcgtcgtcatggaatcgccattcggggtcgacgaccagacagtggtcgccacaggataagacgccggcgcgtctggatacaacgtcaagcgggttggggcgctggatcaggagctcgagagatggcgtcccggggcccgacttgtagacgaaccagtcggtgaccatgcatcggtcagagcggtgggggaagatgacacgtaggaggaggaaggcgccgtccgcgccggtgatggagggcggcgacatggagaactcacctgccgtcaggccggcggggcagtgaacaaagcagcgggtgagggcgggtggatcggcgaacacgaaggacacctcgatggggtagccatcgctcgacttcgcccgagcggtggtcgcgttgtcgtggcagcggccggtgtgcgcaacagtgtcgaggaagacccagtcagggaagtcgccggagcgccgggaggaggtagcgggttggggcatggcgaatcggcgagaggcagaggcggcggcgaaagacatactgtatcggatcgggacaggggagaagattggatttggggattagggttcctctctcacgactcgctctcggggtgggctcgggggtgtttgcgccccgctgctggattcgtgtcggttgtcaagccctgcccaactacggcccaaatactactccttcttcttcttcttcttcttcttcttcttctttttttccttttctttcttaaaaaaaaggaataagttcactttacgtcccttaatttgccgccgagtctgaaattcgtccctgaaccgcaatatcagacatgacctcaactccttaaaccagtgcaaataatgtctcaaggtggttcggacggcggtttcggcctacatggcgctgacttggcacttaaagtccaaaaaaagaaagttataaaactggccctgatagcacatcgaaaaccaagcgtggaagatacgccataggagatccaaacacgataaagacaccaaggcacgatatttgttaacaaggttcagccgtagcctacatctccagggcactgatcacaggcgcccctccccgatccagcatatcacatcgtatcagagttacaactactcaccacccgatgccgccggcaaccgctccctctcgctatgtgtcgaccgtattccgattgtattggggtacgccgttactaggatctacacgaaaatgcattaagcacacaaaagtcaatgattatactggttcggacccctcgaaaggtaatagccatgtgctcaaggcctctggaggattcttttgtacttcccctctcggatgatgcatatggtggattcttatagttggaggagttgagtcaggaagatatgatgcttggattttcatttggggaaccgacacatatacaaccaagaggttttataagcttaatttctctgccgtgcaacctcctagactcatgatctggctgtggaaaaccaaatgtgtcatgaagataaaagtttttgcatggtttttgttctgtgacaggtttaatacaagagatatgcttgacagaagacactatgccaaagaggatgatgatctcacatgtgctttatgtaatacacatcagagagaaacaagactccatctctttttcacatgtcctttcagtgctcgatgctggcagcacctaggaattcaatggaatcacaacttggaattctttcagatgattgttctggcaagactcaggtttgcttagagaggcttccttgaggttttctttttggtatcatggcatatttcgaagcaacgtaacggatttatctttcagaacattcagccatcatttcaatcctggaagtcactttttttgttaaagaagttcttctgcatatgtgcataatgaaagatcccctcaagcaatctatttctgattggttacaaaccttgtagctttgttgcttttctttttttttctttctccctaaccttgtaaatactttttgtgttttataaaatttacactactgggcaaagccttggcagtattcctagttaaaaaaaaggtaatagccatactccagtttatacgagtatatggacaaacaccatagagattacaatagaggaataatagaagctatctagattaccgactataacccgtcgagaatggcccggcgagagccgtactactaagagaatctccaacaccctctccatcccactcaacaagccattcggctgggcaaactccttccctcaatgaccaaactttgtcagcctactctacttgccatccgtgggtctcacggcatatcgttgccgcacacctccacacccacggtggcctcctgctcaccgttgcgctaatgaagtcaccgctgtcgtcgtcatcatcatcgtcgtctgccgccgctgttatcagcgccacatcctgcgctcctccctctactccgtcgttgtggcctccgagggccttctcgccgtcgtggcctcccgctcgacgtcacccccaacgaggctgccaccgccgtcgttgtctactgcttcgtcgtcagggccacatcccacgcatctccctcgattctggcacagcagcctctgagcgcctcctcaccgatgtggcctccatcaccccacccctatgcggcctccacctcctccgctcagcgcggatttggctagcagtgtggacttggggaccgccgcctccgcatcctctgacgtcgaggaagcccgtggcaacaacggggttgggggtagatgggagggcggcgagctcgagcgccactgtgaccaagggatcaaaacacgtgtatacggtaggctcatggcttatgatacacggtgggttcaagaactcccatctgtcttatgggccatacgcactacactgacttcatccaacaaagagattgtcatggttacggataaggcatactgtcacgcccagaaatccggcaacctgaatctcaagcagattgtgtattaaatccctatccaggactagccagggtacacaaatggcaatttgatacagttccacgacttacaaaaataacaaaataaaacttatacgcagcggaaaaactaaagaactgaacttaatcttcacgtccaaagcgaagcttcctccatagaccacacaggcaaccctcgacaaccggaacaagctcaatcctcagagaactcatgatctgaaccaacttctgcttctggggtgggggaaaaataaagcaagactgagtaccaaccaccatactcaacaagtcataccaaggggaaggtatgatgcaaggataatcaaggaaatggctcattggatactttgcaataaaagcagcatttataaagaataatttgaaagaagtaaaaacaatataagtaattaagcagtattaacatcattattgtccaacgctaaatccacgttgcaacaattaatttggaatagtcttttctttaataggtttaattagaattaaattttgtaaaattcgtgactaattcatatgaagttagagtgaggccgttcaagtctataaattcatccaaaatcacgatctacatgtttgtttactttttatgtactgtttatttggagtttcttagtctttttcctcgttttacgtattagctatcgttcctgtcgttttggaggttcacaagtgtgtcggaagtgttccagaagattaattgaagatcgattattgcaaggcaagtcacacagatccgaaacacaattcctttgagaatattgatcctatatttaaattctctatttatttcaattgtgcatttattttcgaatgtcatcgggtggtgtgaacctaatctttgctgtggccaatttgcattaattaccctattccttgataccttgggttataatttgactagttggacttatatattggttcagctagatattagtataattccttagccatgcttagaaacattagcacatgattgggataactaatgtttcactattacttaatgatggatatttaatggtagctcacaatggctaatcgtgattgatcaattaattaatatgacaattaaaacttgataatagtgggttgtgagcacatggttttgatggtcgtgctcatgacagttaaggaccggttcgcgagcatcggttgtgaaacattaaccatgtcaaccacaagccagtatgggcaacggctttaccttttgtatagcatggttcattgtggggcaccagactgagaagtggcggagataagcccacgggggtcgctggggagtccatgccttgctttataagggggtgattatgatccaggaacggtgcactgctgtgaattgtgttatgcggagggtattgtcacagcctctactcgagtactttccagtaaggcggcgcatggtagacatgatgttgagactgtgtcttgtgggtacagtggtacccctctagccagagtaaaactattcgaatagccgtgcacgcggttatgggtgggtctatgttggtatttcttaacctcacatatagaatccgcaagtgcacggaaaataccgatgtagcacttcacccgggagtattctcatgtatcgatttccatagggaacgtgtgtgctaactctggatcagattcatccaaggacacgaagctatagataggcaaaggatagagaggtttcactcgtgaaaaacaatgtatacggaaagcttaactttaatcctaatgaggtacttcaggcactggctagctcgctgctcttagatatcgctctactgcgcacccggacaggaaggacttcagtatcttgagggctgtcttcagtgtcttgagggctgtcaccacctctacacccacctcacacctactgtgggatgcggagcaaacaccggaaatcaactacctatacaccacatctacgcagttaattagatgatgtttcggacgactaatttacaaagaaaacaagccaaaacttttgtctgaaacgacaaatagaagtgaccggaggtagtatatttccagcaatttggaactacaaaaggtgagaactcaccaccccacttagccttcctaatcttcaaactcctctaaagaaatagcgcgaatgaagagattagacaggagagaaggaagctcagtaaaagtgaatatggatccactaatatcaagatcattcgagtccacttcctttgcagtcaagtctgaaaacatttcttttccagatgcctcatattcataaacgttctccaatttgcaagccctgtgccttcctctgtttatcttttttttttaacctcgcggggtgtatttgtattagagtagggggaaaagctatacaatagc

SEQ ID NO: 18147 - DNA, 16164 bp, Oryza sativa
gctatatatgaaagttaaggtaaatatgatgaaatcaatgagtattttatggccttaatgatgcacaataagaggaaaattaatgtttctccattcttgccttgatgaattgtaagcatctgtaggctcatttaaaagcacctggcatagaacatccaacacatgagctcttgtcggctctgagatctaatttagactcttataataattattgctgcccctacgtaataaacagagtgtatttataatagtccttaactcataccagatagagatatttggtcaaataagttcaatctgaaatgatggggttgctttgctcactactctcagcaagattgtgattccactagacgccaccatgatacacgttgagaagcatgttgtcctgatacaaaaaatatgacctacaagttgtatgttaaaaatgttctggggattattttgtatattattgtaaaactggtagtatagaaaaagtaagcaatattatgcttactttttctaaactacccattttataatactaaaataaatccccgacccattttttcaagtcatttgttcgtgtatggggcaattatgctttgtgtcatataacaaggtggtgtctagaagagtcacaatgttgctgcctagcagctacatttgtgagagttggcagcatggcctgtaacccatacactattttcaattgaacttctttgaatgcgatatctctattttggcaagggtaagaattattatggattcatccatgtttattaagtaggggcagtatctattttggcgaggataagggttattatggacttaccctgtttattgagtaggggaagtaaaatctagtttaagttctttgaaatgagcttttagacttagtgattcattaaagcaaatatagcatggagaaacgtcaaactttcccttattgcgcatcatcaaggcgatggacacaccttggtttcacccttttttacctttcatatataacccctgaatatttccggtattttagtttcctatatgtcaattttgattctctgatcaattttttttattttaaagcagtggtaattgtatgatgactccctatatttgtatgatctccggtttatatatgatttaatcttcaatttgtctgatgttttttaatacttgtactgttattttgatttttgtaattaataattttatttgagaaaaaccgtactctaaaaaattatctctttaattttgtccatgtaggtaactggctgtgatgaaaatggaaaccacaggtggttaatggctatcaaaatcgtatagccattggtacactaataataacctaaatgacggatgctaacatcctatttctatccagcataaatggtatccattattttatttagatattgaatgccaaatgtgcaagacagggacatgttcttacttcattaataaggagatcaggagaatccattttaaggtcttccaccatcggatggcatttgacacagaaaagattaagacagagaaatctgagctgaagaacctcattttcgcatcattcagaccattttatctgatgatccccgttggtgatggatatcatgaatccccctgctaggacagccgtgatacatagcaactaagcaagtgataaaagggatcatttaagctgtttagtgttaacaaaacgaagtgctaaagcctaaaaggtgccctgctgctgcttgtggcaatgctaacacttgttggagcaagagagccatttgttaaagcacagaccaacctccctgctacaatgcagctgaagtttcctactagaacccaaggtgattcatacggagcactgatacctggtttgccagaagacttagcgaaagtatgccttgcccttgtccctcggagctacttccctgtcatgggtgcagtgtccaagagttggatgtcattcattgggagcaaggagttcattgctgttaggaaggaggtcgggaggcttgaagagcggatttatgccctgatcactggagatggaggaaagggaccctattgggaggtgctggggagcctggagcagcagaataggatgcttcctcctatgcctggactgactaaagctggatttagtgtggttgttcttgatggaaagctgcttgtcatggctggctatggtgttgattatggaaaagaatgtgtttctgatgaagtttatcagtatgatgctcgtctgaacaggtatgctcgagtcattacaagcatttattacagtgctcctttgtcttcttttcttacatcagatgaatacttcaaattctcatagtagcaatagtttcccaaaaaaccttgtacaggtaatccattagtgccatgagttttctaaatacagagtaaaaaaatttaaataggaacttgatcattgtaagttaaaatacaaaattaacaaaactaattcattctgcttaaaatactcaggtgggctgcactggccaagatgaacgtggcccgtcgtgacttcgcatgtgcagaggtcaatggtgcagtatatgttgctggtggatttggttctgatggcgatggcttgtcaagtgttgaagtatatgatccacaaagaaacaaatggacaataatagagagccttcgcagaccaaggtggggctcctttgcctgcagcttcaacggcaagctctacatcatgggtggccggtcaagcttcaccattggcaattcccgtttcattgacgtgtatgatcccattctccattcctggaccgagatcaagaagggttgtgtcatggtcacctctcatgctgtcatcaacaaaaggctgttctgcatcgagtggaagaaccagcggtcactcgcgatcttcaacccttcagacagttcatggcagaagatcccggtgccgcttaccggtagctcagccactctgttcagccttggggtgcttgatgggaagctgctgctgttttcccaggaggaagagcctgggtatcagactctgatgtatgatccgaccgcgcctgcgggatctgaatggcacacgtcgacgctcaagccatcagggctgtgcttatgcagtgtgaccattgaaagttgatgtcatcagtaggcatagattgtacttcctccgtcccataaaaaacaaatctagaattatatgtgacatattctagtacaacgaacctggacggagtcacgtccaatctaggtttgttttctgtgggacagagggagtatatatttcttgcattctagtgtctatatgttcttctggaactctgtttatatgtgattctctgttcagattattcctagccacaagcatgcactcaattcgtcagctagcttgtgtgttggaccaaacattttgtgtaaagatgcagacatttcacttcctgaataatgtcagatttctcttgctcctttatttcactttgcagtgaactgacttgtgggtgtacttgcacacttcactgttctgatgatacaagattccatttgctacccagtgctactctacactagaggacctacatcaacaaatgctgtcaggaaaaagttgccgcaaatgcttcaaagctctcaaaggtaaaagaggcatgtctttgaagcaaactaaaagttttgatttgcaattaccagccccagcttagctatcattgagttttactgtaaaggatacagtaaaatgtactacatctaagaacctataaggacgctgggttcagacttcagagacaacaaagataaccaattatcaaattgaccatagtcgcattaactgaaagttgacaacagctattttgcaaattgatcaagagcttttaagagtggagcagttgacagcagctcccttttttatgtaaaaacagtaaacccaagaaacaaatagcaaaaattctgagcataattttggagcttctctgctagtactcagtacagtactaacaatactgctccagcatttgtctgtttcctgcattagcaataggagcagcattattgccagccaacgcctgccatgagtagaataatttgcctagttggtgatggatccccacaaactagtataccatcatccagattgaccatgatgcatggcttctaaggatgatttaattaattgagcataaccaactaccttactggagtactactctggtgctgaattgtaatgtaataatgggaatgaacaaatgcacgttgcaaggacacctatttttttaaaaaaaacattccattctattttatgataaaagaaatttcaactcctttgtggtttggccggaatgaagaatattcttactcacatgtccgtcaaatcttagtgactatcctgtatggatttggtggtaatcatggaacttctttttcaagaatgttttgtgctgtttaaggtggaaatacaccaatttctcattacagaagctcattcatatcaacttttattccatcctaaatttgcaagaagtaaataaattttggaccttgagcagattatctctagggagtcaaaacaagaggaaccttaggtgaccaggcatgtcaataataataataatgcaggcaaagaggggcccaagaaaggttccttgcttgtacaaaaagaatcaactggacatggcaacagtgttacatgttgatggtccagcaaatatagtcatatatcaacacatgccaacaaaatcatcaatgacaattaacaagtaaacatgtatactttttccctacattatatttgcattgcttgtttttttacagcacaataagcggccacttcaaaacttctttttgtcgtttccagctgaagcatttcaggggtaaaaagtatatatattcccctcgctgtcgtaaaaagcaattttcacaggaagtagaaaaacaaaattcaacatcacaatgctgctaaaattcagctaatcattctgctcttttctcttcttcctgcagctcctgaatttgatcttccaaaaagagcttgggaagcagcctcccctggacttggatgccctgttcgcctttgcgcctttcctcgatgatttcagatactcttcagcatggacagcgccgttctcgatctcgctaccgacatcagcgacgctgtcatcgtcgtactgctgcttctcctggagaagttcgaggagcctctgcttcttctcgatcagagaaggctccgatctgtccaccgatattcgccccgcgaatggtgactgtctctgatgatctggggtggtgcctcttgatggagtgaaatctgtagagttcagataaacagaaggcagtaatgttaatgctttggtaacaaactccagtgatacagcagcataattttgttcactttttttttgaggaattttttttggtacctcctctcacactgtggaaatcatcttcactgtcggagtctaaccagggtcttgcctcgaagaacgattcatctttgcttcctgggacagtcgatcaattcaatagtgaggtaaatgtttcagcattagaataccataatgcatggtcttgtttgctgtcatagctgaatgcattatcaaacaaaagagcattgcaattgaatatggcacaaaatattgcctgcattcccctagagatcaattgaactcttaactttaatagtcctcaaagaactgtgacttcagtttattgcaaagaatcttcgaagaagaaacgcgtaaacagagtaaaatgaagaaacattgaacaacagagcctatcagatgtaatcagataaaaagcacttttcttctatactgtcccttgccagttatttgtcaggaatctgtacgagtgatgcaaaattccacgaacacagacaagttttccaacatgtacgaaagagaaaataaatccattcttaatcacccctgttagtatcaacaatccataatgtccaaatgacacgatcctgttgttaactccacatgtcctaatttccaggccgtcgtctttgaaaacccaatcccaccacacaagacacattaaaatccgcaagaaattaagcacatccaaggggttagaaaatcactgtcctgacactaacatcaagactagtactactacacataccacctcatcccaaaacaagagagcaatcaagatcaaaagaaggagcaaggaataaggtgaacaatcccagcaaggacattgacatttcacatttgcaatcaggtcggggcccccacggctcgtcgtgtcggactcgaagctgccaatctaatctaatctaccacatggttggcagagtggtgagtacttggcctgacgaacagaggcagagaggcacgcggtggacgccacgatgatgataattgacaagaaaagttagcaagaagattttgcagctgcacagcactgccccctgattggtatcgcaccaaaacaaaatcaattcgatgatgaattgaaacgggattaatcaattgcaagagggggggataaaagtattcgttgcctcgagacgactcaactaaccccactagtggtggtgaaggaactgaattattttgccatgtcggtgcggatgagatgagaattttcaactaaaataactaatccgggtttatctttatcacggggatgcgagattgcaagaacaagaactcaaggagcaagaaattccgcggtgaatttcgtgatgccgtggttaattaattaattaattaattgataacaacaagaacaacaataacataaggaatcatcaagaactcaagatcgtgcagcggaaggaaggggagaagagatcgaagggtgttttacgtgacgcaccattccttgtgctgtcctgatccgggctctcgccggcgacgtccgccgcccctccgccgccggcaacaggcgccgcgaacttgccggcgttaggaggagaagaggccggccggctgccgtctcccgccgccgcagccttgttgcggaacctgaacctcatgtgggcgcccgcaccgcgagatcggaaagcgagaacgcgttgcggcggcggcggtggcggtggcggtggcggtggagtggagaggagaggagaggatgagcaggggaggcgaacgcgtagcggcggaagcggaaggcggagcgaaacaccaaaaccgttgttgggttggggggaagaagaagatggtggaatgcggatgcgatgcgtgcgcgtgcatgcagcgaccgtactaggcgcggtacgtaccacggtggaagcgggacgacgcgcaccccatgtccccatggatgaactgcacgttttgtttgggagagcttctgtttctaaagctgtgtttagttcacaccaaaattacaagttttggttgaaattggaacgatgtgacggaaaagttagaagtttatgtgtgtaggaaagttttgatgcgatgaaaagttggaagtttgaagaattattttagaactaaacatggcgtaattagatagaagctcttctgaacggttttttttcgttcagattgtgagatgttatagcggtacaatttagaaaataaactagaaattaaaattaaaaaactcgttttttttcatgttctcataagctgattatcaactactccctccgtcccaagatataagggcatgcacaatggttatcaatagtggtctcttagtgttgctaattaggaatacttgttgacatggaagaaagagaaagaggagcgataaaacatcgttgttatactacctccgttttttaatagatgacatcgttgactttttctcatatgtttgaccattcgtcttattcaaaaaaaaatatataattataatttattttgttatgagttgttttatcactcatagtactttaagtatgatttatatcttatatatttgcataaaatttttgaataagacgaatggtcaaacatgtgagaaaaaatcaacggcgtcatttattaaaaaatggagggagtacataacaacggcttaacaatgactcttaatcactataatatggaaatatggttgcatgagggtaaaaaattggaaagaatattaacaaaaggaatattttctgagttaatgattagagtatttgttgtctcaactactgtaaatacgcggtctataaataatcttgtactattgtttaacagaccaatactcgtctctaccattgaacatgccttataagaacttttcggatacataatagtactatgatacattatagtacaacgaatctggacgtatcacatccaataaaaacgcttatatttagagacgaagatagttgtttctttaattttaagctcatccaaacaaccctatgtataccgtcatctccttaggtggtgtttggatccagggttaactttagtccctgtctttacacactaatttagagtattaaatatagactacttacaaaactaattacataaataaaagttaattcgcgagacaaattttttaagcctaattaatccataattagagaatgtttactgtagcatcacataggctaatcatggattaattaggctcaatagattcgtctcgtgaattagtccaagattatggatgagttttattaatagtctacgtttaatatttataattagtattcaaacatccgatgtgatagggacttaaaagttttagtcccatctaaacagggccttaggctgtgtttagttgagtccaaagtttggattttggttgaaattggagatgatgtgactgaaaagttgtgtgtgtatgacaggttgatgtgatggaaaaggactgaagtttggatccgtgcgggtataaactgtgtaactgtgaaacggtgagatctggaatctggatgatgctccctacatatcaaataagtttaatttcacttgtcccgtaaatactaataaaataaaaaactaaaatacccttattttatcaaatcaaatgattcttaattttatttactcccaatataataattctctactttcacaaactccgatgcaatgattagttgaaaataaaattattttgggacaaatgtgaggagccaaaaatgaattattattgagacggaggagtacaaatgtccatagctcccgatctaagatttttatgtttttcattacacggcacatcactacatatggaataccatgctcacatcccccgctaatacgtcccataacttataatttatgctctaatagacgaaaatcagaggtacatttttcttaatacttatggaaaatctcatttacatgtgtgtaatatttttgggtgccataatttgtattctgatggagggagtcatgcacctatgaatctatggagaggggcctacaattacactgaaaacatttggataaattattttgttattaatttttatgattatacgaaacaagcgcgcgcgcacaccactacacacgcaacactacactttatcaaacttttttttgaaagggaactgtgtcactattttagaggaaacataaaactttaaaccactataatttaacaatttaacagtaaaatttcatttggatcgggatctgaagctgtgtttttttgtataatacacaagttatataagttttatgtgtcaaatcagggagttagttacgtactatctccagtttttttttataacgtagttgattttttttctaatttgtttgactactcgttttctctacaaatattcgtgtaaatagttaaatatattatgtgtgtttaaagtaaagtatttaaatgacagagtaataactaagtaattgaatatgaataaatattgttgttaaaatttaagaaaataaatcaaatgtttattatatttgaaaatggagggagtggtacggttgctaagataaaaaaaaaagagagacaaatatacagaacacatttaaagtggataactgatgaggtgtcctgccataatattagaaactattaagagcggcgggctgggcgagcgctgggcgatgccacgtcggataggaacagtgcgctgggtggaattttttccaaaaaagccctccgattttctataattacgtatatgccccacacgaacagtatttatggaggagaattcccggatagggacttatatgtaaaaagttaaagcgtagggactttttcgcaaaataacgcccactacttaactccccaaacccgtcgccgcacccttctccctctcgtctctccctccccctctctctctctcttccgccgcctccgccttgcgccgtctccgcctcccgctcacgccgccgcatccgccttccgctcgcgccgccgctgccgccgtcgtcgcatcggcgtccccgaacgcctcccccaaccctagccgcctccgccgctcacgccctctcctccctgtccctctcccaccgccaccgctccgcgccgccgtccccgcctccgcctcgcgccgccgccgtcgtcatctccgcctccgccgtgcgccgacgtctccgcctccatgtcgcgccgtcgccgtcgtcatctccgtctgcgcgtcgcgccgccgtcgtcgtcatctccacctccgccgtcacatccattgcgtccccgtcgccgcctccacctccgttgcgctccggttcggtcaccgccatcgccgcattgccggatctggcggggggtggtcaaatccgtgtcccccgaccatggaaggggcggcctcgggtggagcaggtcgacgctggccacgaaggtgcaaagcttggatggagcagttcgtgcagccgtcgccatcctcctcctcatccctcgaagccaaggtaataaaatcgttggatccggcaatgtagtggcccgagaaggaaggagatggcgcctaggtggcccattgttttgtgtcagatagttttatgtttgccggtttagtgaaaattgagatgattcaccattggctatgtcatgaaaagagtgtttgtctgtaccaagccatcatttttactaccataatttgtaataattccgttcatatgatcagggaccatatcggttatgttgatgtccataaataaatttcaaattgatcaaattttaggttagacattaggttgaatagaaactattccgcctaaataagctattacgtgcgtgtcgttgatttgatttgttttgtctggtgtttttggctgattggtttgtgattgttgttttttaagatcggcattattggtgagtgttcgtgagcatacgattggatctggttttgttcttgttatgtggattgggcgtggatttgtgatacggcttttggtttggatgctgcagggttcggcaagcatcggcgttgcagagtgaggatgtcgagttggtcgccatcaacgactccttcatcaccgctgagtacatggtactgccttcttccctcaccaccttattaattacttgttagttgctttgagcgtgtaaaattgtatgctcattccatgggaatgatttgtacaaattagatgttatatgaagtggcttactatgctcatcaattgggattgatacttagtagatttgtctaaattttttaagactatggatttgtgatctgcactattgtagattgcactgttgttctgttctgatggaacacggtgcactctatttatagtatggattcataaatgcaattcttatatgctttgaatatctgactaaatattttggttgatccatatagttggggtaatctattttttatctggccatgctatggatacgttgcttgtattgaaaatgaaatttattagattgccatttatatatacagttgtaatatccatatctaagttctcttgtaatcagttaattcatttgcattgacgcacagacaagaacaagacgcagcaccgcggagcaagcagagcaagtgttagtagcaagaagcagtgacaattcggaggccatcgttgggagcaggagggaaagagagagagagagagagagagagagagagagagttgttgtggaggagagagaatccaggtgcagggaagggaagggtgggcaggccaagatggcaagaagaggaggaggaggaggaggaggttggtgggggtgggggggggatcaatggagatggagagcccgcggagcccggaggcggagatcgggcacagggtggaggacctgtgggaggtggcggagccgcagctgtcaccgtccgagaagctcaactcctgcttcgaggacatcaccgtcgcctccttccaccgcccgcttggctcgcaaggtatgtaactaacgcctctccctgcttctctgtgaacgaacatgtttgtgcgtattctctgatttgattagatgattttggttcttcatgtgaaagctgacatgaagcatttctgtgttgatttggagtcacctgtttagttcagttgggtgatgaaatttgctgatggagatggtgaaacaaattaaaacattcggtgttccttgttggaattgatacagccagccagttagttaattcattgattgaagaatgtgtttgctgtttctcctgattggattaaactggtggcattagtaccttgtcactgttgtgggtctcctgtcctatatatatacatttttttcagcttcttgatggaatggaggtggccactactttatattagtattttcatttcctttgtgtggttgctggggccatatttgcattcttttctgaagcaaatgcgcattgccacttcgtgcatgtcagtgctgatggcctacatcctacctccagtctgtccaatttttgttcttgacaggttgaaaagggtggcattgttttatgcaaccagtgactatgcaataggggattgtaggatttcagccttatctatatgatgaagttttgttttagacaaagacctgtatgaggagtcaggggggagcatggtgattgctcttgttgaagggtccttttcatttcttagacgcgctaaagaagaacctttctcctgtcagaaaaagaagaacctttctggacttccttattctttatgccaatatgtcgtatgttattaatatagatatgtgcttactgacaagtgacttcgctctcatgattccaagatatgttctagaacggtgagggtccatattaccgtctgatttcttaatagtgatctttgctatagaacctgtttaaacttgtccttggctctcatcttgttagtatctgtgttaaataatgttcttttcgttggtagtttctggtggttgatacagattgtatagataggtgtagcttttaccaatagtcagcattttgcgtatcttggctcacacctatttttctatgcccgcatgatgttaacatggcaacctcaacttcaaaatcttaagttggacatctggtgataacaaaatcatatcttcaaaattgttaactgaactgctttgttgtaccaatgccacattgagcgtgcttttattaaactcatttatactatacagatatgaagttttatacctgaaaattgactttaagatttttgtaccacagtttaattcgactatgttgttccatgtatatatatttttttacttgtttgagggtcggtagtttcagtcaatccacatgtccacacatcaggccgccacacctgttcattgatattttttgcctgcctgtagaaccaaattggtaattgggcggtaatttctaaatgttctaggcaaaaatgtatttctactaaccttaatatttgctgtggatgtcattccctttttttttgttttgacatgaacggtgaccatgcatctccagaaagttcaaatctttcattcttcttttagactaaacaacaggttttgtagtttatcattctcatcatagttcatgctaatgttacttttggttatgaaaagctcctttatgttatttttctgggtggggtgatggcaacacatgatgaagaaactagaaaaagttctttaagaattcttcagtcatttgtgttatttcacaacggtatgccagcatttgaatttcttatctaaatctattattatatcaatgctcagttgatataaatgaatgccagggaaataacacaaattctattatctaaatctattattatataaatgaatataatctattattatatcaatgctcagttgtgcttttggacttttggtcgttataccttttcttgtttcagtgctaagctaggattatatctgaatgtgaaaagtgacaagtattttttatcttgattaggcagagtctgacacagagttatctgaatcttttctgaacctgtgtgttgtggcacgcaatatggcaggctggctggcatacatggtgatatatacgcctctcccagggaccatatatgtgcttctctgcataactgggctctgccaatagctgacccactattcaagacaaggtataaagccagtccctacacaagaaccaatgccaagtaaatacatatgcctgctgtaatttttcccaacagattttactcctttgtttgccaaccgtgcttgcagtttgcagttgcagaggatgcatatgctttggttttgcaatggcgatgcatgcacaaatgggcatgcaggtcagagattggagttggtctcttttcaagtgactttgatgagtctgatgacccagggcaggttcacttcagtccacccttttctttttatgagattgactctctgttgctgacattggattaatgaatagcatatttggaataggaaaaaaaaaggagatttggagggagagacatccctctaaacacttgtttaggaagaaattgtgagcgtgttgagtattgaacacaggacctcggggttgaaaccacacacccccgaggataattcttgagatacacttgatagtgcagtgataagggtgtgtttagaaggacgtctctcccttcaaaattcaaatcttgttttttatttggataaaaaaatggaccagtcggcagaacataaggtggtgttcttttttaattaagacagattctaccttgatttttattaccatccttttcaaactgtcaaatggtatattccatgcgaaaactttctatatagaagttgctttaaaatattaaataaatccatttatcaagtttgtcataattaaaactcaattaatcatgatctaatggctttcttgcgctctcaagttgttgtatgactctgtttttctttcaaaggctatattatatttactctctatcacgccgtaggcttgtggagcacatgaatgatgagtgatgaattcatgaatatatataatcatatacaagcagtatatatatctcagtcctgaatacatgcatgctctctttgtgtattatgcaatatattcatatcgatttttgctggaacatgatcccaactgcctttctagctgatgtttgatcatgtatatctttgagttactttacaaaaggcattagcattatgcttatagggatttagggaggtgatcatcgttttaatcttctacttggaattcttttacaagtatctctttaaattgaaagattttgataaagggtgaagaaagggtagaaaccagaaagcactgttgaattgtcttgtattgaaaatgctttgcaatgatagatctactagctattgtactgggtgtaaataaaggtcctgtatattgtatagatccagtggaaagttacacgtagtctagctgtacttgcgaccatatggcattgactaatatttgatgcattttgtttatgtaggtcttacaacaaagatatgatctggtggtctactgaaggaaccattattcagtgttgcctacaaactgtaagtttggatgtgatcaatactgaggattcctttgacaaggttttccaaaaagaatttcttcaatggaactccttgatttgatggacactatgtttcttctgttcttgtgtcctttgatcttctttgtagtttcattacttgctcttcttgtttgtttgttatattatgtgataataaaaaaagaagaattagtaatagttataaattgatcaggaaactgttcttgtgtcctttgatcttctctgtagtttcattacttgctcttcttgtttgtttgttatattatgtgataataaaaaaaataaattagtaatagttataaattgatcaggaaactgggcagcattaggaaaggaatcaaacatgagaaggcggctctattttttgacataatagttttcagtgaggtag

SEQ ID NO: 18148 - DNA, 5903 bp, Oryza sativa
tgtggatactaaaggtctgtttgggggagtttctagctgctgcagcttctcccaaaatcagaagctccccaaacaattcagcttttggttccgattctgagaaattgtagttatagaatccagaaaatgaactacaagccagaagctgggaaacccagctttttcatattctcagaagctggctaccaactaactacttctcaaaatcttaagctacccaaacagacccaaattattgcgggcaggctctaaacggtgtagtttttatagaacttttcatataaaagtttttaaataatcaaacaaatccattcttttaatgtataataattaataattaatatattaattatacgctaattaagtgtcttctccggccagcaaaatagctactcgatcggccaaaccacagagacaaaggtgatcacgcattgtcgatctagcatatagttcaatttagtttttggattattcataataggttctctgaaatatttatatatatgaacagaaattatctcaatattcttaccatttaagaaggtggttctgtcccctcaccttcccttgtctggagagcacgctacttttatattttgcaaatgtgtcagtttggtcaaaatgttcaatgaacgccaacaaaagaggttggaaaaaagatatccttatgcaggcacaatgaaaaaaaaatctcaaattaattattagtacccatccgtctcaaaataaacaaatctaatacgaaatgctacagaatctctatctagattcgtagcatgatgatacatcacatcccgtataagagttttttttttcttaatagagaacgctgttgacttttggctaatattttgagcaacatgaataaccaaacgttatttcaaaagttagacatcatcgattaaaaaacggaggtgatatatattttttattttcttgttttagctatcaaattagtagtgctctctcctccttttattttctttatgcattagcgaagggcataatagtctttcaatctcatgtttagcatgaatttgattagtaaaaaggacaatttttaagtgagaatatgtgtgaacacacgccgagtatctatatctatacttgtttaaaagcatctagtattgtgaaatagtctaacatttggttcaaataagtgaataccaaataatcgagcaaccaagatatttgataaagaaaatatattttgcttatagtgtttttttctcttcgggcatttttgctaatacagtatgccatccgtcttaaaatataaataattttagactccgacacggtctccgagatactactttgttcaacaatatctataaaagtaagatgttttaaataaaaagagttacatattatgatagtttgtttaataataagtctagcaacattaattttgcatgatcgatattttttattcttttttatattaatagttaaagttaaaaatgtttgacttgtcactatgtttaaaatgcttatattttagggcggagggagtaaaaaaaaaagaaaaaacaaaacaaatatactttttttttaaaaaaaagaactcaacatatctccatcattctcccattctctctctccccccctctcattgtgctattaatagcccatcttctttcttacacaaaccccttctctaaccccctgctgttgctagcagaagtccaggtggacaagaacgcgaggaggggaagaatcatccccgagatctcgctgccgctgctcatggcgttcgcggcgtcccacaccgcatcgccgtcctcctgcggcggtgtggcgcagaggaggagcaatgggatgtcgccggtggtggccatggcctccaccatcaacaggtgaccggatccctctagtccctcctccctccctccctccctccccgtcgcgcgcgtgatcttggtttggtagggtgggttcttgcgcgcttcggggttcttcttggttcttgcttctctggggttggtgagatttgtgatctggcggtggatcaagtcaaatcgttggggggtgaaaaatgcatgttctgcgtgctccgtggtgtgttgtgggggattcatctcccacctcctcatcgagatcctgggggtcagaggtgttccaagattgatttgagcttgggttggtttgggttctctctgggggatgcttgattccagatttcctggcctctgatccgacccgagggtttcctccctgctcgtgatctcgatgggttcgtccgtgatccgctccggatttgatgatctgtccatttttttttctttttgcagctttgtgatatttggtttctgcatgtgccaccataagttgattatgttgatgattttgctgaaactattgcctgaaattgaccatggatgattatctaaagctttgatgcgatcttacccatttagatgtaaattattcctgtgcagttgcttctagcaattaaaaacttgtagtttagggcgattagggacttgttcgttcaaaaattggtccgttcaatttgtgtatcttcgacgcttttaaacaaaatcggtctgttgacctgaaattttcctggtgaatgatggctatgtgatggtgttgaactcttgaaactgggactgaatattaataacctgtcaatatcctctgcgagtaatcctttcgtcaggctaatccgctggttaaatagataagttatagagaattagagatgcatgtactgttgaattgttgagttgaaagcactgcttcttatggaaccaccatcaaccaactgagataggtgaaatggtaaaattaaagtgggttggtgatccagaatttttttttctccatgcttttcgcttagggtggatgcggggagaaagctgaaaactagtcgaatagctgttgagatctgaacatgttcaaatctgttgatggtgatagactgattctgaacatttaaggcctgctttgcaaccacctgtgtactccaccgctaacagtactgctttaggatttgtgtagcctcttctttctagagagcacagaagcaccttctatattcaatttgaattatgaatttaagaaattttcattttttttctgctgtttttaggtctgtgctgtagttttcttctactttactaataatttagaattatcaacaagaaagtaacgctagtgtaacaaaagggcagaaagaggatctgcgtcattgcctcccatgatttgataacagttatacatatgcggttcatgattatataccatgccaattatggagtgaattttgcattacgtttactgtttttgtttggtttatcaatcaatcaacactggatattatcatgtagagctcagagaacatggtagtttcaagcttgtcaatgtacctatcttggaaaatctcgaaatcgtagttactactaatgatattacttttgtccatctatcctgtcctaggcttttacctaggttgaaaaaatatttttgataaacactggtttgattaaactgtctatacaaacatcagacctttcttttcacatgaagatgaagatgaagttttttacgcaaaacgaggtggtattaacgtatgatcgattgagttttaattatgacaaactttaagaatagatttatatgatattttaaagcaactttcatatagaaagttttcataagaaacgtaccgtttagcagtttgaaaagcgtgccacgaaaattttaatcttcatccaactcttgttggagaaaagaacaggtgttaggtgtattttttgattttcttttcttggacaccgtaaaaaaattgcttcaaggactgaaaggattcccagcctagagatttggtggcagatggtttattatgagctggatacatcactctacctttctataagctttaattaaactactttcatatctattatgcgatatttcttctccattcttctaatttacttcaattttttgtagggtcaagactgctaagaagccctacactcctccacgtgaagttcatctccaagtcaagcattcactgccaccccaaaagcgggagattttcgattcgcttcaaccttgggccaaagagaaccttttgaacctcctgaagccagttgagaagtcatggcagccacaggacttcctgccagacccttcttccgatgggttttatgatgaagtaaaagagctgcgggagagggctaaggagatccctgatgactactttgtttgcttagttggagacatggttactgaggaagctcttcctacctatcaaacaatgcttaacacccttgatggtgtccgagatgaaactggcgcaagcccaaccacctgggctgtttggacaagagcatggactgctgaagagaacaggcatggtgatcttcttaataagtacatgtaccttactggacgtgttgacatgaaacaaattgagaagacaatacaatacctgattgggtctgggatggtaagagctaatatctatttaggcatgatgatattattttcctttttacttaagtttacaatgctattgtggataaccttgttatcaatagccatgtctccaatattcttaaaataatattttgagaactgagcgctattcattttattaaagcattggacaacataacctttcatgtacagttttacttctaaagcaagtaaaaacattgacttatatttacgtgcctacttgataaattgcttgcaccatgtcagtccatagaaaatgtgcttcattttttgtttttgaaggaaacatggttagatgattcactgcattttagaatcaaccgtggtatggttattcataaattaatttcattgttagccacgaatctaatttcacctcttgtacctaccttctgcaggatccaggaactgagaataatccctacttgggtttcctttacacatcatttcaagaaagagctacatttatatcccatggcaatactgcaaggcacgccaaggagtacggggaccttaagctggctcagatatgtgggacaatagcagctgatgagaagcgccatgagacagcttacaccaagatagtggagaagctcttcgagattgatcctgactacacagttcttgcatttgctgacatgatgaggaagaagatctcaatgcctgctcatctgatgtatgacggcaaggacgacaacttgttcgagcatttcagcgctgtggcacagcggctgggtgtctacactgcaagagactatgccgacatcctggagttcttggtccagaggtggaaagtcgcagatctcaccgggctgtccggagaagggagaagggctcaggatttcgtctgcacgttggcgccgagaatcaggcggctggatgaaagagcccaagcaagagctaagcaagcgcctgttattcctttcagctgggtttatgaccgcaaagtgcagctttgatcatgatcagtgagcaaccgagactgcatcctatatattggttctaagatatgaggttctctatatggaaaaaaatctaggttatctagctggggtagaatgcaattacctgtccatctgccctcacaaaatctgttgtcttttaagttgataacagtgtcgatgagtctggtgagaagctgatgtgagatgcaacagagtgaacttatgttgtattgatgtgagatgagtatggtgacatttatgtgtacttgcaggttttacatgacttgtataagttttaaagtaataatggagatttgtatacagacaagcgtgtgcactgtcgcatgattaagtagtctaaaatccagactatcttttgtgctctgaatttagcagtaataagattgatcggcttgttcgttttgagctctgaatccatattgaaatgtctgtgctgttcatcagctgatatccggaaccaaccag

SEQ ID NO: 18149 - DNA, 6114 bp, Oryza sativa
agaacacggaatccttgcaactactaatttcaactttcaagtttcatcaacaaataaaaaaattactagcaaaatgcaaaggaatggtgaatcatgttacctggaattattagcatctttcaccaaggaacgcctcaaagtgttgattataatgtggtgttgaaattgccgaataatccatcccagtgatgtagtagaaatggtctctctacaaaaagagttcatttgagtgtaagaatgcataaagaagaaagaaacattggtcagtagaataacagagaaattgacattattgctaacatgagaaacgaaaccgtgttgaatctacatcatcaccttaaacattaattgatcacattgtttcaacaagctagctttttatttggaagaatatcaagcaagctttgtgaaagagaaggtaacaaatgcagaatacctggaggccttgagcttatcaagaagtatatctacacaggtatcatcaggaaatatctgaaaaaacataaaacaaactcagaatatacataaccagtacaaattcctaaaaaggcaaattcctgttgtgtcattattaataaacatggcatggtttggacagtgaaactgaactaagcttgcttttcttgcccacggttatgcaagagtgaaacaaaaaatcatcattatctcctaagcaatggtcacatggactcacgttattattcacatcttgttctgtgatttcaattgtgacaaccagtaatccgcaggcaatgcataaggcattacattttgctttctcaaatatgcaggaggactgcgcatcattgcatttaggacagaaaaatatatacaagcataaggcattgcatgcaaaatcaatggtagatgcataatgcaaaatgattagatcccagagataatttattttaaaatgtgaagacaaattcagttatgagattacctgcactttctttggttccatgttttctccaacttctatcagcaattcatggtctgaaacgaatgaattaacagaacaatctgactctttcccgtacattaaacattcaggcgtgagtacagcttccttcaggaataccctgagacaattgtctttaaagtctaaaacatttgcttctgataacatagattcaagttcccacattgcttcagcactggatatggtacatatgtcagcagaaaattcaaatcttcaaaccagaggaaacataaacactaaatgtaggtcagatgcaattaaacctcaaatgactataataacacatcttaacaggatggaatgatgcatgaaacctacaggtaatcatggttcaacatttagaagttaacaaacttaatgatgcaagggtaagaatatgtattctgcagttataaactttaaatctttaagtataaagccaagcaggagaccgaccaaagagttcatggctgaaaataatgaagatatgtacagcagcagaatcaccagctcaaaaccagaccaagaaatggatagctaaaacatttatgtcctcaagttaacaatataggcaaataagaatagtgctgggatttgggatgagaaggtcttctagaagattgaaatgctgaaactgaggaagataaaaaatggataaatgggtgctacaatatagtcaagtagtgcacatcacatggcttaatctccacgcatcattagataacagtaaaccaagcttaggtccattctgttcttaaagaattacaaataaaatgtgaagcaacagatttattatttccagggaatttcaaaaaagaaacatggcagagttcaaattcatgaaaacatcacaataaatgttttactcaaactgacaatcagataaagtccatgtggaatctgagaaacttcatctgtaagataaattaaattactcattattgaaaacaaatggtattaagttttgaaaatcatacagaatatgacaagctagattattattatgataaatcataatgtcatattgttcaaaatatgataaatgagtagaactagaattggcaatgctaagatgctgtaaactaattccattacaagattaagatgtcatatcattctgaacataaacaagcagtactaccttttttggttttctaacagcttcaggtcattctcatatttttccagctgttggttaagttccagtacctaggaaatcataaaacaggtatattaaaaggcaaattgcaaaaatggaaaatctcaatacaaaaaggctattaccgcatatgcattatatccatatgcttgattgtcatcgatattcgatactactctgtgtgaaagcatatgtatgactgcatgtgtttttgtttgaggaatacagtttttatataaagaggtgggaaatgctgtctatgttactatgtaggagaactgcattgagaaatgtacagtgactaccagattgtatgacacaatgttcaacagagaacaaaatctgcattcgagaaattatattgtgaagacattgcattgattcatctcatatttagctcattaaagttgtctaatataatcagcactttagcatagacagcatgatacatggaatctgtcaactattagaccatataaccacacctcatacttgtagtccttgtcaaatttaatttggtctctgcatgaatcagttgaaactgataactcagcgatgtggcttgcctccaagtgtttcaaaccctgcataaagaaagggcacagcattgcttgagaaaaaagaactaatgtaggtttcaaaagagtaaaatatttggcaatactacaaaattacatccaaccaacccaagtgataggtaaacactaacactagaatgtcattatggcaatcaaagccctgtactacttgttattaaattgtgcagctaaccagctacaaatgagattcaatggaagtgagtgaagcaagaaagtaacacaattatatgacaggagtcaaacagttgacgtgtacattccatctagggaacaatcctgtacttcccattcatttgggtgaagcaacttaaaaaatatttagcaagctcagaagtgatagagataagaaaataatgaggattacagggttaagcattcaagaacaacctgtgaatcaattttcttcaatgaagactccaattcggcaatatcagcatccaactgaatcgaatctagataacaaagtgttaggtgttgaagggagaactgcgaggagcatgctgttgtcaattaacaggaccttaaataacagagactcaagagaagcaaacctttgagagttgtctctgcaacgctgctaatttcaacagatagtttgcggttctcctcctcagccaagcttacctccttactcaaccattccatgaacgcatctagcagtatgaaaatccaattttacgagtagatttgcacaggatatgtggactaagctcaagctggtatgattatgccactgataaccaacaccacaacaattaaaatggaatcagacagctaaccaaagtcgctctccatcggcgcggcgctcgaggcccatgcgtcgaattccaacccctgcaaaggttcctacaaacacagaacccagaaacacaaaatgatttagcatgcctcgattttctcaaggaaaacaaaattaaaattaaaagcgcacccatttttctctcccctcatagtaataaaattcaaattaaccaaaccctcgacgttcacagccagtccacttaccacgtcctccacggagggaaggcggcgcaccgcgtccgccgccgccgccgccgccgaagcaacctcctcctcccctcgccgcgacagcgcgagccgctccaaccggctgacccaaaaacgaaaacaaaacgaaaaaaaaactgagatgaacgaacacctgatccgcgcgggcgaatcggaggaggacggcggagggtttagccacctaccttcgaatggccgccgcgtcgagcggcgcgtcggcggcgtcctcggctagggtttccgccattagcagcagcagcaatggcaatcccctcccctctcccgcccaagaaaaatttcccccgacttcgaaaaaaatgggtggcgattttgagaaatcccccctccaaaaactccgaactgcgatctagtccgcggccacgtcgggccaaacgggcggcccggcccagcaggcacggctcctgttgcgggccgtgccgtgctggcccacgtgctaaggcctcggaccaagcacggcccagtaaggccacgggccgtgccgtgccggcacgggcccaaatatagcacgtgggccggtgtaggcccattagcacgtttggcccacaaaattgaatatgaggccgaaaaataaagaaaaaatgtgaaaagaagatgaaaaaggaaaatttgtgaaaatattataaaaaatgacgaaaattagtgggaaatagaaaacaacatatggaaaaatcgggggaaaacgagagaaatgagagaaaataaacaaaaatatatgaaaagaaaagggaaaacaggaaaaatttggtgggccaacgggccgtgccgtgccgtgccggcccatggtctcatacgtcggcccaagcacggcacggcccacaagcgggcgtgcctgggccggctacagtggttaccgaggccttggcccggcccatttggccagcactcgccccttgcggcatcgcctcctccccgccacacaaacaagaaggcgagccaagccaagccaagcccctccgcggcgcgcgcgttatccatctccccctcgccgccgccctatcgccgctgctcgagctctcgatcccctcctcctcgctccgccggccgccgcggccgcaacccaggtcagaggaactcaggattccttgtcagttcttgcccgggctcgcatttttccttgctgggtcttgaatctttctttctcttcttgttttgtgtttcttggtcagatgatgccgcggcagtgcgggaatcgcgcgttgctagcggagggatcgagcacggtggtggtcgtccatggccgcaagaccagaggtggtatcagcactgtcacctccagcaggaggaggagccatggcggtgtcaggtaccaccggtgctgccccccgagggctcacctatggaggaagggcgatcatcttcctctccatcatgccaagatctctgctcgttgttccgaggtgattgaccgagtcctcattttcttgtgattgcacactcccaattttgctttcttattgacaaggaaaaaaaggggattgggttttgggtgatttgtttgatagatcaaggcccacacggtgctgcaaggttcagatgctctaagcagcatcagggagtggagcaggtcgcatttggtcaccatgacagggctggtggcgtgtgctgttcttgtagtcccttctgccgatgctgtggatgctctcaagacatgcacttgccttctcaaggagtgcaggtgagtgggattccctttttttgcatttgttccaagcatgattccaaaccgtgtgcattcgccttgtcgaacatcgatactgtaatttttaggaaacattactttgttttgcttaactgaagtccagcaacaccacatgccattgttcaaaacaatgatacaccagcatctactgaatctatgcaattgtcattttgtcaatacagatacagttgatcctgtttaaggcagtacatttttacaatgtttaatcagtcatacaagtgagttctgcggatcttgtgtgttcatatgtttcttataccaatgtaatggaatcaatttcagaatagagctggccaaatgcatagcaaacccatcctgtgcagcgaatgtagcatgcttaaatacatgcaacaatcgccctgacgagactgaatgccaggtggttccatttcccagaaaccaatcagttcagatcatttcctcagaagaataacctgtgctgtatcttgtcatattgtagatcaaatgtggagatctgtttgagaacactgtggtcgatgagttcaacgagtgtgctgtttcgcgcaagaaatgcgtcccacaaaagtccgacgttggcgagttcccagtccctgatccatccgcccttgtcaagaacttcaacatggctgatttcaacggcaag

SEQ ID NO: 18150 - DNA, 1450 bp, Oryza sativa
tcccactttcgacacattcgattgccaacttcacgagttccgtgtcgagggagacaaacttatagcgaacttgacatggagaattcgcacccccgactctggcttcttcaccagaacagccatacagcggtttgtgcaggacccagcacaacccgcgatcctctataaccatgacaacgagttcctgcactatcaagatgactggtatgtcccttagatagcaccttctgacgctgtacttcagatttattactaagattttctgaaatgtaggtacattatctcatccaaagtagagaacaaggaagatgactacattttcgtgtactaccgcggcagaaatgatgcgtgggatggatatggaggtgctgttctgtacaccagaagcaaagttgtgcctgaatcaatagtacctgagctagaaagggcggcaaaaagcgtaggtcgtgacttctccacattcatcagaaccgacaacacctgcggtcctgagccacctcttgtggagagaatagagaagaccgtcgagcaaggagagaagaccatcatcagggaagtgcaggagatcgagggcgagatcgagggagaggtgaaggagctggaggaggaggaggtcacattgttcaagaggttgacagatggcctcatggaggtgaaacaggacttgatgaacttctttcaggggctaagcaaggaggagatggagcttttggatcagatgaacatggaagcaactgaggttgagaaggtcttcagccgcgccctgccaataaggaaactaaggtagcttctagttgccactccagcaagtacaaggcaacaagtaatgctcaaaatatattctattcaccaaggcaataccaatagtaacagattattctacagagaacaaagaatttttgaatctgctaatgcatccccattattacaatacatttccagcttagagatatgtaaagtatcagtaactatgtaacttccattaaaaaaaggtatatagtgaactttgtacaactgttccaaatatgatatggattatgtccttttgatgacgatagtttgaatgctgttaattttcttcggtactttatggcaatttaggttatgtcaaatgcaaataatattgaattgtagtttcataatttcatgaacctttcttttactaagaggctctctagaaactttcctattcatcgttaacaatcactgttcagtgggagcttaaaaggagcttgtattttattagtatgaacttctcaagcagcagcctgaaatggttagatggagggtgagagcatatgagatttaactggttgttttcataatcttagcttactctttatgttcttgattcaaacaaggaatcatatggtagctgcaaaatacccctataatcatccaggaagacacagaagcaattctggaaacattttattatcagcaaggaaaa

SEQ ID NO: 18151 - DNA, 3390 bp, Oryza sativa
gtgccttttaagtaaaatgctgtgatgtagcagtagcattgacatatcagtaagaaggttatgctcaaactccatactgggttgtgtctgtaaatgaaattaactggatctaattgcagtatgtgtaggcgtgtatcttgttcttgagcaaggtttaacatttcattttgttcttcatgttttccccattagaagtgctatgagaaattgtgatataggagcagtaaaatatatgaatagctagtataacaagcacagaaggattatctgccgatggtcatataaccctataatccaagggaatatttctattttgtttgatatgcatcatttttctatggtagtaaagctaccaattccgcaacgaaaattggcaataatatttacagtttctgtaagtggtatccagtaggaattcaaaatcaaactaaggcataaaaatttttgttcatatcagagcctgaaaaataaatgttttttttgtgtatatatacctgtttcactttgttttcctggctgcgattagtgtccggttgcctggtagaagtgtttggcgataatttatcatccctcaccctgttgaagataccagtaaatttttcgcctgatgctgcattaccctcatcccactcaccaaacggtggaacagctacatcatcttcaggctggattggaaaaaaaaaacgcaaaagcaacatcacattactccataggcaaaattctctggattaacaagaaacaaaaagggatttagaatgtactgcatcatagcctcggccaccctgcttgtccctgctcctcctaggagtatgctggccatgtccctccgatgaagccctcctctctggagtctgcattccagatgacctgtgcttcggcttcgatgggttgttcggctgcgctggtgaagcggagccatgaaccatcctgtatgggcttctcggtgcgctaccgatgccaccgcctacctctcgctgctgagaaagcgaatgccgtcgatggggatcagcttcctgccttcttccatgctgtggattcattggactctgcccctgagcatcaggtgtgtatgctggatgcaaaggtgacttggatggaggttcagggtgcctccttggatcgttgggatgggaagaaatgcccgctttcttgtttttgcgggcattctcaaacttctgtgtgtatggtgtgttgccagtggtgtcccagttcccaaatgctggaatgtcaggttgctgtccaaagaaaaataggttggtaaatcttgtcaagccttaagccgatttatgatgattgacagagcaaataaaatgtccatatgaaatcagggaatttataatttaccattttggggaaatgaaactagcaaagatagaaaggttttccatttctctaacatgcaaaactatgttgggcactaagctaagggtactagtttttttttttccaaataactatgaactggaaccccgtaaacagtggaatatctcacgaacattgcagattgacaggtagctacacaaaagaagaatccaaatcatatgataaattctaatgaaaactatgagatggtcaaacgcacataagaaaaggatcttcagtgtagctgctagatacaagtaggttatccaagttcagcaaacgaacttcattggaaaaacaaatgaaatcaacaatgaaccatgtcctctttgcaaaatctcttactgtacatcaatgtgaaaaacaatcacctacaacatatagcggcctcgtgcatagcagaataattaccacaaaacgcaaaaagcatacattatctaactaccagtaaagtagatatctatatcatcagtacatcatatgtgtattcccgaaaaaaaatcagtacattatatgcccgtatgactctgcagctcccatacagaaatgctgcagatcaaaattgttgcaaaagcttctcccaagcacgaaacgacaaaaattacttaaacctgaacgaaacaaaggtgcacaaaaataatttactaaattggttagtctgaaaccagtggcttctcccaaacattaatatattgtccaatatgcaatttactctataatataataaaacaataaaactatatagaagtaccatatgccctaaatgaaatcaatacgcattaatgcattatgaagtaccaagatttccagcaccagctcagtaagatgaaatgcaagataaatcagagatggattattcaatcttcagaagtaagaaaagaattactcactgccattagcgacttccaatcctgtagaaagtgccgccttcttccccctcaaattcttggatgaacagacttaattctccaaaagaaagcactgaaggaccaaatatttttctcccaaatactaaactggactatttcactccaaatcctcccaagaaaggatcaaatccaactctaagtttgtggtttgtctacaaaggagaatcaaatgtgtcccctatcacctccaaccatcaaaacaagtagaggattgaaggaagctctctcaccaaatttcaaaaggaaaaaccaaatcaaatcaaaacctcctgggaaatcaagaaccaaaggcgcctaatttgacctgaattcctcataaaagcacctaaattctccccataaagccactctcccaactactcgaacaaaacaaacacaagaatccaaccaccaaccaacactcccaggagacaaccaaattgcttcaagaaagctgtaaaaaaaaatccacacaccaagaacagtcaaaggcggagtctttaacgccaaccctccaaaaaatcagccccagctcatcaacaaaatggaaaatgaaaaaagggtgatttccttcacacagcaaatcctccaagaaaacacatgaaaacaagcctctctcccaagaacatgtatctatccaagaacacaatcactcgaatcctccctcgtttttgctcgaatttcctcgagaaagaactcacccaagatcaaccccaagaaagaaagaaaccaagccaaaggcggcgcctttgcccccctctgattccgaagcttctgaattgcagaagcgaaggaggaggagcgatgaattcagaggtggggaggaagggaggaggaggctgtggggaggtgaggagaagaaaaggagaagggaggaagaagaagacaaaaccgttgacgtgggagcgccactatttttcagttcgaagcacctctctctgatctctctctctctctctcttgattttagtttagcttatcatttttttttcaagataaaattctggttctgagatattaacgccagagatgggcacggcataaaccttgaattttgaccgtagatggttttagataagttcacaaatctttttaaagcaatatactatatgaaatgcag

SEQ ID NO: 18152 - DNA, 3594 bp, Oryza sativa
cctttccacgatttttcctcttcaaacacacacaggacgtgaggggcacatacctgattacgaaaaattggagggctttttccgcaaaaatccgacctccgcctcccttccttatccgtcccgtctcctcgcgctgctagcagagcagaggtagcggcggcgttctcctgctcccgccgcattcgctcaccgacaccggtgagggtgaatccatcccatccggcctccagtttcgtctcctcgatcgccccgccgcttgcttgcgccgatccccatcctgcgcccggcgtcctcctgcttcccaccgcatcgtcgctcgccggtgagcatccctccctacccacacggccacacctcatcatcagctattctgcgttatccctcagaaaagtttagtttgggggttcaaccgaaactgggttagatctgcctctgcccagctccacctactttcaacttgttaattttgattttttgtttttagcagatgtaatttggttattgaatctcatccaaacactcttagaatagttgtacagaaaataatttgtactcatccaaactcacataaatttcttcagaagaatccataccacaagctactcataacacacaaaatatcttttttattaaggtatattcttataagaagttttcattccacaatattttctaaaagataacacttggtattaatctaatttaacattttttttctttattaggttataaattttctaaaatatatattgtgccacttggcatgaatctaatttagcattctttttttatcaggttataaattgaaaccatcgaacttactttatcttcccgtctctaaaacattgtgatatatctataatattttaatattttaatattaaaaataatttagactaataatatatatatttaaattaggtaattaataaattcaaatcagttatagtttagaataaaaaacaaaatgatatatgccaagtacaatctaataacaatagaatgttagaaacaatgtgaattcaatatttttataaagtttaagtacgattttcaaaaaaaattaaaaatagattaatatgatttatattaaaacaattttcgatttttttccaaaaaaacgcagctgataaacgtacacacggaaaacgagaattcttttctatttgtccgtttcaacgcaacctcaagtgatttagaaattgaaggggtaattaaatttatcttttttaaaaaaattaagtacacctacggtatggatacagatgtacacgtgtactgtgtacagctgctccgtacaaaatcctcaagtccgtataaaatcatcaagtctcacttctttgtgttgtgtcttgtgtgaacgccaagctccccatcccaccactaatggtctctctccggctcatcgccgcattcgcgcccgctccgccaccgccaccgccaccgcggccccgacgagcgccgccgtccgcggcgcgcctggcgagcaacggcatagcctttgtcactgtggcagccgtagccgctgcctcgccgccagcgatcgccgcgctggccgccgagccggccaacgcgctctcgctgcccacttgggccgtccacgtctccagcgtcgccgagtggtacgatctacaatacctacctgcctagctcttgcttccacggctgcaaaagatgaggggattatcgcctgttctgtccggattgcagggtgacggctatggcgctggtttgggactacggtgagaggacggggctcaagggttggaaaggcctctcttggggaatggtgagtgtaaatttggataaaatgatgatttatttgctgatgaaatttgtgttggataatgttaatttccgtactccctccgtccccccaataaaagggattttgatattttgcttgcactgtttgaccactcgtcttattcaaaaaatttgtgcaaatataaaaaacgaaaagttgcgcttaaggtactttggataataaagtaagtcacaaataaaataaataataattccaaatttttttgaataagacgaatggtcaaacagtataagtaaaatatcaaaatcccttatattaggggacggagggagtacaacatagtagcttcatgtactcctatgtattacttcctccgtttcataatgtaagattttttagcattgcccacattcatataaatgttaatgaatttaaacacacatatatgcctagattaattaacatccatatgaatatgggcaatgctagaaagtcttacattatgaaacggagggagtagtagtaagattcagagattgggaggagaatgtctcatatttatgagtatgttttcatcagaagaaatcttgtgttgttttcagtgaatctaatctgcaagtacccctctttacttatgtgtgacttctattatctatactgctcctatatagtacgacctccgtcccgatatatagtacgacttctattcatgttttatcatctaataacaataaaaatactaatcatatatttttttcaaataagatggacggtcaaacgaaacccacaactgcacttgtattgggacggaggtagtaaagtctttgctgatggtagttgcagttgttcacaagttttcgattgaatttttaacagcttgctttatgattgttgactatccagatttgcattttcttttctttgtataataggttccacttcttggtggagcgatgtgcgcttgcacgtggcatttcttctataattcggagtctcttgaagtaagatatatcccttgagttggaacactagtgcttcctttttttccgttcatcaaaattatcatcatttgcttccccgtggtttgtaactgttcacacttgtcaaatatcctaacatttcaattggtctagtgcctatttgcctttaaataaatgcacatgaaacacagatgattagacagtggaaccgttctccacttcttttgtgcaagtcgtatgcttgcgatttttttgtagtattatcaagatactctcttattgtaaaaacatacaataatataattcaactagtgtttttcataattcttctgctcacgttatttctcttcatggttcttttttttttgtttgaaaactatctgcaggtgcttgtagcgctccaaggtgctctaacagtgattggtaacattacaatgtgcatagctgcatttcgcatcttcaaagcatcccaggaaagctcaaaaagttcatagaggtacctgtatgcatatatacactaatgtactagtaactgattgtggtaaaatataccatctatctattaagtggaatcttcttgataatggcagttacacctgacatgaaatggcaaacggcagatgctgcgaaggaagaagataaaagctgctgatggcttgcagctacttcagaaagatgtttgtatgtatcaattctacaaatgccagctaaagccaccctgaaatttgtgtattgacttggtttttttctagacaatgagtgtatttactcagataagaagaaaaattacctcacctgctatagcctatgcctcaactcatcttcaactgttttgaacaactgttg

SEQ ID NO: 18153 - DNA, 3777 bp, Oryza sativa
ctctctctcaagaaaaagttaatcgccggctaaatttattaagatttgcaaggccgtgtggagcaaggcacaaggccgtcactcttcacatgctttcatcaaaacaccaagattacatcacctgcttcatggcgtcgcctgccgtttacggtgtgcacccttgtcatcggtttccatgatcatctcatatattctctcatctactggctgcttgatttcgattatattgagttgcttcctcttgtttgatttttgcattgatcgatcggtggtccctgcagtgattgccacgatcatcttcgttgtggcgttcgcggcgttgctggtcaaggtgtaccggggcgccgagagctgcggcgccgcggtggccgccgagatgaaggcgacggcgcactacgccgtggtgcccgacgccgcgatgcggagcgcgacggtggagaggttcctgtgggagatggcgcacgagaagcccatccggttcacgccgcggcagctcgccgggttcacgcgcggctactcggcgcggctcggcgccggcgtcttcgggacggtgtacggcggcgcgctccccaacggcctcgccgtggccgtcaaggtgctccgcggcggcatggacaggaggaggtccgaggagcagttcatggcggaggtgggcaccatcgggaggacgcaccacatcaacctcgtcaggctgttcggcttctgctacgacgccgccgtgcgcgcgctggtgtacgagtacatgggcaacggcgcgctcgacgcctacctgttcgacctgagccgcgacgtcggcgtcccggcgcggcgcgccatcgccatcggcgtcgcgcgggggctccgctacctccacgaggagtgcgagcacaagatcgtgcactacgacatcaagcccggcaacgtcctgctcgacggcggcatgacgcccaaggtggccgacttcgggctggcccggctggtgaaccgcggcgacacgcacgtctccgtgtccggcatgcgcggcacccccggctacgccgcgccggagacgttgatgcagtccggcgtgacggagaagtgcgacgtgtacagcttcggcatgctcctcctcaagatcgtcggccggaggaggaacttcgacgaggccgcgccggagagccagcagtggtggccgatggaggcgtgggccaggtacgagcgcggcgagttgatgatggtcgacgacgccgccgccgccatcaatcatccgagcgacgagatctgtagtggcagcgacggcgaggccgtggtgaccgtggccgaggccgacgacgagcggcggtgcaaggaggcggtggtgaggatgtaccaggtggcgttctggtgcgtgcagcagcggccggaggcgcggccgccgatgggcgcggtggtgaagatgctggagggcgagatggacgtcgcgcctccggtgaacccgttcctgcatctcatggcggctccggcgccggtgccgaatccatgggcgacgacgacggcgagcagcggaaacgccgtctcagaaaacgtcgttgtttctcacggaagtgacggaatcgtctcgctttgactactgaaatcttttgtctgtgcgtgtgggtcgccacgacctcgtttctttgcattctacaagtagattgtttatcactacatcataatacttcctccatctcaaaatatttgacgccgttaacttttttaaaaatgtttaaccgttcgtcttattaaaaaaaaatatttgacgccgttaacttttttaaaaatgtttgaccgttcgtcttattaaaaaaattaagtaattattaattctttgatttattgttaaatattcttttatgtatacatatagttttacacattgcacaaaagttttttttaataagacgaacggtcaaacatgtttaaaaaggtcaacggcgttaaatatttagggatggagggagtactcattagatttggaccaacaaatcttacaaaactttcaaccagtgaatactacgttttcaacaaaaaaaaaagaacaaacatgttaaaaatagtaattctagagacaaaagcagttgtaaaatcaatttttttataatataactgagtgcagatacactgtaactatttgtaagtgttctatagtatatataagcgttttgtaaatgagtgtaattgtaagttgggtctacataaatataaatctttgtgcagatcttacagacaaaaaataaagaggctgctatataatggaatcccgttttcgaacggaatgatcccgagtaggtaacaggtgtgatacctatcaagtatcagacgattctacacaacatgatgatcccgagtaggtatcaggtgtgatacctataaggtatcagacgattctacacacatttcaggtgacacttgcaagtatcatgtgatatttatcaggtatcatgcgatttctaccacgtatcgcgtgatactcgcgaggtatcatgtgaaacctgtcaggtatcagacgatttcaaccacgtatcgtatgatactcacgaggtatcatgcgatacctgtcatgtattagacgatttctaacacgtatcgcgtgatactcgcgaggtatcatatgatacttgtcaggtataagacaatttctaccatgtatcgcgtgatacttacgaagtatcggatgatacctaccaggtatcaggtgattcctactatatatagctgggcatcccgttgggggaggagcaccccgacacgtgcggtcggccccctgcagatgtcccttgtagatgaggacggcgacggcggcggtaggggacgagcgcggcggcggcgggggattgcgacggcggcggtggggcatggacgcggcggcggcggcgtcgtcgacgggggacgggtgcggcggcggtgggggatgggcacggcggcggcggaggcgacaggggacgggcgcagcagcgacgggggacagcgacggcggcgagtgagcaggcctggtgcgtgtatggataagaatcacgttatggaggaggagctatcccgttgggggacgatatcccgtcccctagcattcccgaaaatagaaaagggagccaaaaattccatcgcaaaggcttgaagggcgccgatggactaaaacggatggcgcggaatcaggtgatcgatcggacaaagacgacgtacaaaaatctcttcacaaaaacatcttcaattttaataatagtagtagaagtagagatagagactatgggcccacatgtctgtaagacaaatgataaaaaatagcgggacccacatgtcagtgggccccaccctcctccctatctccagcaactcctcattcggtcattccccttctcccccttcttgccggtagcttcctcctctggctacttcttctcgccagcggtggcaccggctgctgtgaggaggcggcggcagcgtcggctgctgcaaggaggaggcggcgtcgaaggcctcgatagcctggttggaagccttcacgccctcgaagtctgctgccatggcacgctaggcgctgaggatgggttcggcggcggtggccggttagcaagggaactcaaagagggagtaaggagggccgggaggaagctcgaggagggagcggggcagctgtgtcaggagccttgatggcctcgaggtcggcggtcattgagcgctcgccgctgaggatggggttcgcagcagtgactatggcgcgctcggcctccatgctcggccgctattgtcctcgttggcggcagccggttggcgagggaacccgaggaggaaggaggaagggcc

SEQ ID NO: 18154 - DNA, 3209 bp, Oryza sativa
accgccgccaccgcccatgcttttgcacggagtagagggtggagaggggggtttggagtcagctataacttaaaagagtgaattttatggtccatatagaaaaatgaaagctcggtgttgtgaaaaaatcattttaatattattcttctccaaataaatttataattgacttataattatgattatccttgctctgtgggagaacctatggactcggtctctaccctctctgtttatattatataagtcgctttgaatttttttaagtcagacttatttatgtttaactatatttatagaattttttaaatatatactgatctgcgataacaaattagtttcattaatattgaacatattttgatgatattttgtttgaaatgttacaataattttctataaacttgattaaacttaaaatagaaaaacaaataacttataatatgaaatggagacggagggagcaccacaaaattaacagctagtagctagcaaaatacaactcggtcgacagcttcggactcggtaattcatacgtatatataatcaatgtatacgatcgagccagctatagagatcccaagcacgtacgtacgcacagatcttagacgtacgcgatgcctgctgcatccgatcttgggcgggacgtcgttgttgtacctccagccggcatcatggacgacgatgatgaaagcacctggtcaccatggccggatctccagccggagctggcaggcatggtgttctgccggctgctgtcccacggcgaccgcctccgcttccgagccgtgtgccgccggtggcgcctcgccgcgtggcagcagcaccctctgccgccggcgctcccctggcttaacttggacggccgcatcacctaccagagtctccccgacggcgaggtgcaccgcatccccgtccccgacgagctccaagctggaggcacggtcgtctgccgcggctcgttcgatggctggctcctctacgaccgcagcgagcagctggagtgcttcctgatgaacccaatctccaaggccaggattgatctgccctaccactggcactgcgacgacgacgacgacgccatcctccccgactacggggaggagaaagagggacaacgaaccatgtgcttcggcgagaacgccgtgcggaagatcgccgtgtgctcgcctgatctcgtcgccgccgtcatcgccggctctggcgttttcttctaccggccgggaatgcactcaacctggctgtttgcctccggcggcccctgcttcgcgcgcgacatagcctactacaatggcaagctctactccattagcagtgacggggagcttttcgttcacgagttcagcgatagcatcagtgcagatatcgtgatcggcatagctcctcaagcctagagttgtcaaggctacagttggcggagcactttttacctcgtcatatcgtgcgctactggaaggctgatgatggttcgatggcggtggcatctccccatattttacaatgtacgccgttggggcgtcgacgagctgaggaaggagatcaagctggacgtgttcgaggcagatctggagaagcgcaggtggttggaggtgaaggaactaggtgaccaagctctcttcctcggcacctcctgctccagggcaattctttcatcggattatggcagctgtatattcttttcgagcttaaacataaccagattatgctctgatgggatcatcaatggcattggtgactgcgcctactgtgtgtatgacatgaagaacgacacattcagatttgataatccggtgtccataaaaagggaggggttgtcttatgggtcggatggaagatggagagctgactggttcttcccatgtgagtgaccttttttttttttaaagatgcgcgtgagtacatgcttgtattgtatatatcttggcccgtggcatctttaaaatttgtatgacaaaatatagcacatctattatgtaccccctccacataataaatattatgcaccccttccttccacgtcaatcaaagcgttcgcacgtcgggcagactccgatcaattgatcaaatccacctgctgacttcccccatgctatctctttttaggtccttctcgtagaaatggcgtaataacatgatgaccaaagtacacctgctgacttcccccatgctatctctttttaggtccgtctcgtagaaatggcgtaataacatgatgaccaaagtaggaacataactgctttatcatagtaacaatgttaaaatatagtcacgatatcatggttattgcaagaaaacacccgcccaaaagttgaaatactgcaaaatctgaaggatcgtaaagggcctttcccaccccaaaagctagccgttgaggtgaggggttcctccactaatatcttaggtcatttgcccttccacaaccaatgtggaactattcaacaaaatctagatttaaaattgaatcaggaatttttgaggttttcggggaggggattttgagaccttggcacatagatcgaccttaaagccacaccaagaacaaaagtttttgaagtggtccagccgctgccggaagtagcgcgtttcgtagtcgtaccctctcaccgcttcttcggcccccaccaccccacgtcgtagccgcgcgtggggcaccgggaagcggggcggctccctcgccatggccgacgcggtagccgcgcgcgacgacacgagcgcgcccacgtcggccgagcaggacaaggaggcggaaaaatcggagaagtcgccgcgctcgcacgctgcctccgccggcggccatcgcggcgccgccctcccgcctcgcctcggccagctgcagagaagtgagagagagagagagagagtgagagagagatgaggaagggagagaagaggggaaagagagggtgacgtggacacctggcatgtggggtccacgtgggtcccacgctgactcagcgccacgtagaccaaaaccggggtcaaaaccaccgaaggatctcgggtgaccggttttgtatagttaagagaccccacatatctggttttgaggttcgaggatgttttttaatcccgacgacaaggtgagggaccttcggtgtactttttccgttccaatgggttgtctgggaacacccaagaatttggcccatcccggcgacggacggcccaacgagaaaaaaacagcccagtcgccctaggggagtcagggt

SEQ ID NO: 18155 - DNA, 2998 bp, Oryza sativa
atagttgaacacaacgacgatgtagtgatgggacaaggaagcatgacagtagaaatttcaatatgccaagttgtccgataatagctaacccctacgtgaggatccctttcctctctcaaaccgcgctttagtaaccctgtattgctctggtagttcaagctgtacaacacggctaggtggagttagaacctttctggtgtctatccattctctgtattgacatctccttggtggttcctgggaggaaagaatagatgtaaagcaagcaaagttagtaaatgttgtgagaaaataaggattcatgtaatcaaaatattcttaacatatatgtagagttcaataatataacataacattacgtgtcgaagtccgacatacatcagcatacctaaagacgttaggcgccttagtccgacgttacatcacgagacctaaagacacgacatgccgaagtctgacattacacgacgaaacataaacacatcgataagttcgaaacgaattacaagcaaatccacatgccgacatagaacataagaactacaccacatagccagacgtggcacgacgacgcctaggacgtggtcgagtggaggtagtgccttcacccgtagggcgagctccatctgctgctgatcctgatagtcctgcctccgccgcacttggtttctccttgtctttaggataatgcttgtaggtgtgcccatgttcatcgcatttgctgcaacgcttcaccctgccagcctccgactcgtccatatcgttgcggatgcgacgagtcctcctccttccagccttgcctcggagcttcgatgggtcaggaatattgagtacttcatcgttagtctctgtgaactccccagctatgccgaacccataaatctcgccgctccatgtatgatatattgcttgcttactgaagtactgtgacacatatactgcatctggtatgccacactccgctgcggcagcaatgacatggctgcatggcctgtggagcagcttcggctttgcacaagagcaatgacatgtgccgtcggctttgagaacacactcctgcttcactctcttgcggtagatacccctgcctgccttatcttgacatagtatctcaaacctgtgctgttgggtaccttacactagagctcgatgtttcatggcctttttacgcaactcctctagctttttctgcatgaaagctccaaacaaaatgctttgttcggcatagagggaagaactgcctggaaccgatccctaaaatacctgcatgtcccatgtaaaatgaactccactatgccaactagtggcagtccacggacaccgcgcatcacctagttgtaaacttatgccaaatttgttgtcattattccatatctagcaccacctgtgtcatacgccttggcccatttctcttttggttcatgcagaatccactgagaaaatttccgaatctccaatacagttcttctaaccaatgttggactatccgttgggagaggtccaagagcttgaggagggtcagcaacggcggtcgatggagccgctgcacgctgatcactacatttggctgtcaactcatctaatctcttccaaagctcattgaattttttctcctggttctgattgcacagcctcttgaacatgttcatgagctccttgttcttgaattgcttgaagaaattagctcccatatgacgcatgcaccacctactctgtacatcttcccaaacaccggggtatcctcgttccatactcccaaactgcaactcttctatcgctcgcagaatgccagcgtgcctatcatgtatcaggcacacatttggcctcataccaacaacttttgttttaaccaatttcaggaaccagtaccagctgtcggtattctcactctcaacaaaagcaaatgccaagggcaatacctgattgttcccatctacccctattgctgttagtatctgccccgatactttcctgtcaagaatgtcccatcaatgcagagaacaggacgacagttcacgaatgccatcttgcatgcatgtagagctaagaacgccctttgcagcacactcttgctaggatgttcaattgaggggaatttcttcaattcgtaagagctcccagggtttctttcctcgataacaccaagcaggcgtggcaaattgtcatacgaggcttcgtaagttccaaatctcatctctattattttctgtttggccctccaagccttggcatagctaatagtatacttgtatgtctcttcgatgtgtcggattattgaccttggttcatatgtgagattgtcgatgacatgcgcatacatctcagatgcaacaaatgcacaagtaatgttcctgtggtatttctgaacaccagatagaaaacatgtatgcttggtaacgactgacactgtccaataatccttccatttccccttatacgcgtgcactctccagggacaaccatctttttccttaatacactgaacttcatattgcgaccggttcgacttggcaacccaaaactctctatgaagtgacactgcaaaatgttttaccgcctccttcatatcttctgctctactataaatcgctccctgaataacctcattttctttgtactcccatctcacactatcctcttcagagacgatcagcccagaaaaatcctcactagcccattctgctggattaatatccgtctcatcatctgacgaatcaccttcctctacacgctcattgtcagaatcctccctctccatttcatccacaatggcaccgacagtctccccctcgtcggccactccacctggttgaatgcccactggagctactacgcccccgtcctcttgtgcgttgacctcctccacagaagtctcgtttacttcagcacttggtccctcgccatcatccatattcatctgcacacctggatccttcgggtgaacaaacggaaccaaagctagaggccacccgcgttacaatgcattttccaaatacca

SEQ ID NO: 18156 - DNA, 21602 bp, Oryza sativa
cttctagattagtataactaaaaccctaaaaatataatgcatttattcaaacaaatttttaaaaatacacactatttaactcaatagtcacatataggatttatgaatattacctgaaatcggcgtctgaatccggcagggcttcgccccttcttctcttctcctcccctttcttctttttttttcactgaaattgaggagagaagaatgagggctgggggctgggcagcaggccttttataggcagcgaggcctgccgcccggccagagggcggcaaggggccgcctgcaaaatagccggccccgactggcttttttgcattcgggccccttgcagccccaccagagggcggcaagggttttcctgcaaaaaaaccctccctccgtcaccgcccgttcctcccccgtttgccacgtcagcttgccgccccagaggtgggcggcagggtctatttttgtaatttttttggccgatagattatttctgtaaatatttttttaaaaaaatctaaaaccgaaaaaaattctgcaggcgatggccaccacgcatcggcatcgacgcatcgcgccgcctcgcgtctcgggctctcggcgtcgtcgctgcgcgcgaccgcgccggctcgccgcctcccgcccctgagagtggagacaggggcaggcgacgcgacgcgacgcgacgccgccattctgcccccgccaccccgcgcgccggcgccgggtcccctgggctctccgcctcaggcctcagcgcctcgctcgccttcgactccctgtccctctccagctctcttgctgccctgagtgcaacggtatagctctactgctctagtctctactctagagtttagtctttagtttttcatttcttgctgccctgtgcactagtgcgtagtcagtacagtagtgctagtgcttccctgttcttctagttagcgaagaagatattataaaaaaaatgaggactcagagagtacataagaagaaatagtgtattgtaatcttctacatatctatgtaagatgtttgaattatttatgttgtaaactttcgttacttcaaacttaaatgttggttttaagcaatttgtgatgctgtgagatttactgctatatttgaattgaatttgtgacaatgtggtaatttggagcgtcaagtaggaccacccaacaaattgttcgtggagccgccactgccaagcacccaccttttcatcccaacctagtttccaccgtggggctgggcacccagctggggcgccaaattggagttttgacatgccttaaatcgtgtaagggttcagaattcggatctggaaaacgtcagtgtttggctgtttgcaacacgcaacgcagggttcttgctgtagtacagagtaacgaacttagtttttttaatctaatctgtgttcttccccctgaagagagacaagtgaacgattgtcggaagactttgtaccagaaccactacactaaaaaggactgattgtgactatgttcacaggctttagtgtacagctaatgaaataattgtaccttgtacggtatcaagctaagagcaagtttaatagtatagccaattacgggctccaaatcatctatagctaatctaatagccattcatacaatagttaactataaaaatatattacaccattaatacccggtcccacctctcatacaaacataacgtcttggagtctgtgttgcagctagctacaaatctatagcccgctttcttctctctcttctcttttcttctcgatatgtggttatagctggcttatagcctgctattgtacctgctctaatgtgtttacggaatcatgcaacattgtgatatcttctgcctctagcagcaaacaacctgcacaatgtttttaagcatccttttaattcatagcaaacaacctgcacaagtttctcggcatccttcaattcagggaagcagcattgaaaaaattggtttgatccgttaattcatgaacagcagggcacattctagtttcgtatgaaaatggtagttttttctttcgtctgctttgcgtttctgcttctcttagaattcttttacttttgtattatgcctccgaatatcatttagaaatgatttctgatgttgatgtttgtcatgcctattgttacttattgagttaactaattgctcgaatgagtttatacatcagcattttttatttatttatgcagctctaaccacaagtctggaacatttctccaggtgacctctgtgagtctgggagcaggtaaattaagtaaacatgatatatttgttctctaaaactgttctctgatacaggtatactgcttggatattcttggcagcaatatcaccatctccccagttttcagtcaatggggttggatttacggatgagcctttctcttttcctcaacatttatatctcctctctaattttcttgatcgtattccatgtcatattttttggcccgtggtatcctggccttgtttctcgtatggcagaggaaaagtcagatatgcttattataatccaagattgtgcagtaagtttcttggtatcaataattatatgagtgttctgtattttcacctaatcttgtttagttaccttttcagctgtcccttatccatgtttctgcattttgtgccttgttgcaggttaaagtatagcttgctctgtactttacagccactgacccgctgtggtaacaagacgtcgtctcaagagataaatctattaatcgtagaactgctagctggattgtgttctctctgtgggaaaaaaaaacatgaggacaattcacttatttcaaagctatcacgtatgcataagtttaaagagcagatttgttcatcctggtttgtctctgctagtgattaccctcttctatctgaacgggcaatttatggagaagttagtacgcttcaccttttgcgtttctattgctgttttttttaaagttaattcctatcttttatgtttgatccagttagcttctaatggatcctgatgttccaatgatatttcacgtgtctactcattatgggctacatgcattggtctttacatagccagttgtggagcggtccatcgggtgtgccaaccatctgaacacatccacctgataattctctattggtgtgtgttatgagaattcagaagtcaaagatatgggttctgtcataatgagaaagcaacacctgatattggaaaagggaactaaattcaccatttgtttatctaactgggcactatatatacgaactaaaaggaaatcccatgttcacatggtgtaattgtattacatccaaaaaatagtagaaactaaaagtctccttggtttgttcagattttttttaaactcagttttcgtatcttttgtttcatttgagttgcttatagatgggctctaacggtgggtatgaaaaaatgaagaaacagctgaaaccagattttgagggtactctgggtatgctgatgaaactctaccttttgctatcgcacttgatgcaatgtacttatacggttttggagtttccgtattgatattagtgtactccacaaagatggtgatttttttccttttcccgcagacatccaaatccgtcctcgttttcatatgaacggcatcttttcttccctttctagtatgccttccagccacctgcttggtataaacttgaacatgtagcattggtgaaacccgagtttctgagctcaggaaatatcatggacgacagtgtcttattgttcttggaaaccatgataagtgttactcattgctaattttgtgcagtcccatcatggtttacaacgttttcttaccatgtattccttgccatttgctgacatgttttatttgttatgctaatgatgttttggcatggaatttcccacgatatttcaaagacactactgcgggttgatctatcaaaaaataggactgataaaatcataattgttttgagcagattggttcactgcacacattcatgaggtatatatgtcataaaagttggctgggtgagtgatttctacctcagaagatcatgaattatttagccttaaagcttcctgattggtggtgggtttttggccttgatcaagcacttcatgttgacattgatatctggagttcaagtctttttcagagcgtcagaagaaggtaattacattgtgccatcttttaaggtgttagcaaattaattttgtggcctatgctatggtgtacatttctgaatttgatgattcagttcttctggagaaaatgtaatttgattccagtacaccagcaacattactctacacattgttgtcatgagcaaaaagttgtgcaaaattccatgtgaagtttgctgcgtggggatttttcttagtgactgatactagtgagttttgcaggttgaacaacaagaagtgaagaggtttgtcactacgatggtgctgttctgcccttttggcaagaagttggaagagtggtgtcttcaggacatcctttgttgcttttttggtgttccttctgcagtcctggaactgatatttatatgtgcccacaattggtgataaatgacactacttatctagataaagagtcctgttgttagctccacaatctctttagctaaagagacaagaatgctatagtagtatgaaactgtcaagtttctcgctttactgttgttttgtggctgtaccacgaagactcttgtgtacaagcagaaactccaaaagtttcttgcactagaacatctgggagaacaagaacacccaaagggagaaggctttaaactgagaagtagccaaacctctactcgcactccggaaggctacatccagtcaccattttgcagcctcagaaatggcatccatcaaagtcgaaaccgcagaagaagctatggtacgggacaacggacttgatgtcgttcaaggcattggtgctgaaaccacgggccctgaacaactcttgcatctttctcgaacctggctgaaggcagaacatccgaccaaccctggccatatggagaaaaatggcgccgccatggtgagcgaagccgacgaggcgaggtggactgaaaagctgaatcgacgcgcgtagcgtccatgccatggcaccggcaccggcacctgccgtctccctcacccacacgttcagcacgaggtcatcagtagatgcgaatcctagcccacccccctccgccgccatcagcagcgcggcgcgtcgagcgtatctccgggctcggtgcggcggcggcggcgactccagcacagtcaacttctcctcgtccatgtcatactctagtggggaggaaaagcttccttcccacaaggacgcaggccttggtatcaatctgatccttctccttgtgcagaatctcatcgctccagccatcggtgtaggaagagtacatcctgagagagctgtaggagtccatcgtgcgagtgcatgcggcgacgaccagaaatggtcccccgtggcagtgaagatgatcgttatggcactccaaaaggccacacatcacggccgccgtccagtactgcgtctcgacggggaagggaaatccatcgatccactgctcctcttcttcttcttcttccaccattggatcccagactacgaatcgctcctcctcgtcggagcaaaccctcacgtagaagaggaccaggccgtgtcggctgtcaaccgctgatgcgaggtcgtatatgtcgggactcgccctgaatgttgtcgtcatgtggacgaatcttgcgatctccattggctttccgggttcatcctcgttgatgaagtagccaagcataggaggtggatcatggaacttgcggaggaggcggatgaagcaggggtcgccgaggatcgcatgccattgcttgcaaaccagctggagtcgggcgaacagggctgggtcctccggtggggggcgaaggagaatctcggtcaccatatcttcattgagcacatcgacgagtccgcagcggctgcttgaggccgtggtgttgatgatggcgtcgccggcggagctcaagttgaggccgtcacttgggagctcatcatgagcattgccgaccggagagaggtcgacgatgtccttgtcgccaccgccggccacggcgtctgacccgaacctccacccgccgaacaagctggggctctcaatccacggaatccacgacggcggcggctcgtatggcgtcgccttgccggtgaggccatcgtgatcgaggacgccgtggccgttggggaaggggacgatgtagctgccgcctaaaacactagatcaccggcatacctagcgtttaagatttgtaaacaaagataataggagccgaagtcaatcccttaaaacactcctccccgaacctcctcctgtatctactattggttgactgaaaataaaccaaaagcaagggtggttgcacatcttctgaaaagaaaagggctcggtatcgagtcatctactaaaaaggaccctccccgctgtgcgcccctccttgaattattcggtcatgcaatactttttttaatacaaagaacaaaatgcatttcgacctggagccggcctcctcctgatcctggacgaggcggccaccgatcccgctgctctcggcgagggaggtggaggtcgtcgtcgtccccgccgccgccagcaccagcgccgcgccgggaccggtggtcatcatgttgccgacaatggcggtgcccccgctgtcggagtcggcggtgtcgccgccgattaggccatcgatgggccgtggctcgaacggggtggggaggtggcgggggccgttgggatcagccatcgtcgcgaggcgtgatttgaaaggggcgaggcgtggtttggtggtgggggagagaaggtctcagagagagcaaggggcccgtcttaaatagacgggaggtaacttgctcggtaagccagcctccaccgccgttgctggctgccgtgctcggcctcggcgatgagaagcttgaagctttttctcgccgatgccaacggccatgtggcgattaaacaggaaggtgactcgccgagtgctcttctcggtttattgggccagaggcttttcggcccaacagaagtgtggaccttttgtacttgtgaaaaagtttaccctttgatccttatcccttaaccgtaaaaccatgcaggttttaaggacgattttcgctgacatggcatccatgcagcaatctaattatcagataattaagaaaatagagtggacctgtttgtaagtgactcccctcttctctcatctatcctctccaatccgcattcttctcgacgtcctgtaggtcctacgctggcgtcagccatcttgcgatgcgccacccacgtgtccttgtcgaagtttaagataatcgagcacactatcacagaagaggaattgaacacacagtagaaatctactctagcaattaaacgtgtaatcaaaatctgctcctgcaaccgaacgtgcagtcgaaacctgctcctgcaatcgaacacggcaagagggcgatcatggacttcattgctgtcaagaataggagggagagaggccccatgggaggatggatagagggaggaagaaagagtgagagtgtggatgacacacatgtttcaggccactgacatgtgggcaccacataatattccttgatgacatagcatttttaaccatgtcaacgtaccacgtcaccaataccactatcaatactatcttatgaatcattttgtaccggttttaatagttgaggtattcgttatatccggttttatggttgagggatatgaattagattgacctataatttaagggagccaaattggaatttttagttttactctcaacaaaatgagacccacaattagattaccggaaataaaagggccagctatcaaaaacttcaaagcaattacaaatcgggcgcccgatttgtttctcaaaaattgggcgttgtttcatttaggggtgaaaacggagcggattcggacgataatggtcataccatatcctaaaccatatattttaagcgggtgcggatagtgtacggatgcggatacggagcagattgtttcggatgtcgaaaatggtgcggaatcagttcggtaacggattaaatttatcggatgttacgtgtgtacgcaatcgatacaacatcgagttagcaatgcaaggaacaataatacaataatcaataaacgacccatcgtaataattatgtgcttaagtgttaatcaacatgaatatatgatgcccataatataaaagtacagctacgacagtgtgacatgagacagtgaaagcctcagactaagaaatctaggttaactgatgaattaggcaattggatgaaccaacttatgtaagatgcaatagatagagtggttacatgtgttgataatttcggattatctggcaaacagcctatcggataatctgatagaaatgtcggataatccgtattcgctggattttagagataccatatcctcatccgtatccgcattgtactatccgcatccgcatccatatccgccatatttctaaagcacataccatatcctcatttcggacggattcggagcggaacgaatcgatccgttttcacccctagttccactagtcgaataaaaatgtttcacctattagatcgaaaatgtttcaatcccttaaaatgttgaaacacatttgaaataagactgaatcattttggtgcaacatatgaaacatcgaatatccccctactgaaacaccaacaaataaatatcaaccaaggacaaagatatgaaacaccatcaaaatcccatcgcaacatttcaatccaatacaaaagaacatcaaattacaatatataaacaacagtttcaaatatattgaaacatgaaacacatctgagtatatcaaaaaaataatgaaacaccatcgaaaaacccattgcatcatttcaatctggctaatgaaacataatggtgcatgggctgaaacatcaaaaaattcaagagaaaaacctagatctatctcttcctccgctctagtggttagctaccacatgaactgggatgctgtcacgcccagaaatttagctcaaatttccagactattttatgtattaaatccctgtccaggatcaggcagggtacataaaacgacaagtaatatacagttccaaatgcaaataaaagcgtaaatacttacagaagagacacttaatcctcacaccgaaacgaaagcaacagcagcggaaaaaggcgatcctagcggggcttcagctccactccataggcaaaactcaattggggtctgagccttggtcttctaacttcgtcttcagctcagaagcactacacttctgaaaagggggaataatagcaaggctgagtacaaccaccgtactcagcaagccacaccaacgatgcagacgtgcaagaggaacacaaggacggtttgtggctattgcataaaggcggttgtaaaacattttattgagcaaaacagtaaaattgttgagtaattaaagtaacattaaatctcaactgatcaacgctacaccacgttgaacaggcccaatgtggacccccgtttttataacaggaatcaatcgtgtaacagtaccatttccctggatcaagtagtctggtacatacgagttcatagctgaaataccaaatacacatacacgagagtctagtgcgaattattacatcataagcccgcaggcatagtcttagatcatcggactgagcggtccggaatacattccaaaagcagaagtagataaggcagcggagttaaggcagcggcacgccattgccacaggcaacgaccgtaactaagacctactgagcgccatcgtcttcatcaccctcctggtaatagtcatagggatcctccgaagcttcatctccggcctctgattaagtttatatattgcaagggtgagtaccaaccgtactcagcaagccaccacagcaacaatgcacatgataggggtattcaaaggatggctatggttcttttgcgcaaagtaagttttgtaattcttttcacaagcctaagacctagcatagactaatcaaattttagtaccagtgttcacattaaacaacgacggttctatccaccatccattgtgatcccaagaatagcttctggccattgagtcgtcatggtttttctgaggacgtccatcttccctcctctcaggaaatggctccatcagtatagaaatcatcatgcactatcccatcccacacatgttaagaatttagagtctagccaagtgtaatacatgtcccggtgctcaataaccgcgagcacggctattcgaatagatttggtttactcacactacagtggatgtacactttacccgcactccgcaactgcccaacacatgagcctcgtcccaacacatgagacgtgtcacggcaaagctttttgataacctcgcattggcagtacccgctccatgaactttacatcctcatgcactctaggcgtacacggtttctagcagtgagaggagttctggcgcacccgggaaggaaagactcacacatgcattaagttataagtatgtttagattctcacatggcagtcctgccgatggcgacaccactgtagacacccgcctcgcggtcctaccaatggctgctccaccgtagagcccctgcctcacacatcaagaaaccattatgcatggatactgcctccgctcagctatctactccgctaggtctatacccatacgagaagtgcggttgtacggggatcgtttcatgcttaacttcatggctcggtccttaattaaccggggacggcactagccttttccggacaccacccaaatcctccgtccgctccagtcgaaaacagttgtttaatttttatttctcctttcataaatcatgtcatcaacatcatggcaatgtggcgctcatgtctccacatgccgcatctcaattaccttcccaaaggtaattgcccaagcatatagcatttgataaatatgagtatgcatgattctaaaatagcatttctaagcaattgtcataattgactagggactcatacgtaaacatggttacgaaggcataagggtaaacaataatcaaggcatggcataatcacaagtaggatgttcataattgcatgcaattttatttgtaaacaaaataatttcgcaattgggatcgacatgttcaaggaatagtgatgacttgccttgctcgtagtcctgcgggtcttgatccttgctcggatccgcaaccccctcgggctctaaaattacgtgcgaagaaatgatttgaattcaattagaattcaaataaaatccaataaactcaaataaaagtcgaacgcgaatcgatctgcctatatcgactacaaagtttgcgaaaccacgttattccaattttagtgtcattcaacctaagttatttcgtgatttagaagtacactcctgaggattcaacataattatttagctcttaataaatctaaactcctaccgcgaattgattacttatagagattaccaaaaataatctataattatattaagttttgcaattctacgactataattaatctataattaaattctaattattctaaattttctaaacctccttattctctctctaattttctatttatttttccttttctttttctctctgttttttttctcttctttctttctttcttcttttctttttcctctccttttttttctttctcttcctcccggcttctttcttcctccctctctcggcttctcctcacctctctctctctcggctcacggcctacccgggcggcgacggcgaccggacgcgaggggagggcggcggcttaccgacggcggcggcggcgacggcgccgcaaggcgtggtgtcgcccggcgcggcacacggcgcggtgcggcggtaccgagggcgtcgacgcggcggcacaaaggcggcggcgcagtggagagggtagagaggaggaggagggaatggagtggggagaataggggaggtggggtttttatagggagagagggaagagggggccggttaatggcgacgcgacagcggcgcacagagctcggaacgacggcgacgcgcggcgacgcgacggcgcggggcgcaaggcggcgaggggacgggcgcgcggcgacgggacgggcgacgcgacgacggaacagggctcgaggcgacggcggcacgcgcggcgcggcagcgggatggtgacggcgacggcgcagcagcggcggctcggcgacgcgacggcggacggcgcggtgtggggcgcaaggcgcgagcgcgtggcacgaggcggcgacgggacgatggcgacggcgacggcgtgcggcaacgcgcgacaggcaagaggcgcggcgcggggcgcgaggcggccagccgcgcgcggcagaggagggggcaaggctagggaatcccatcgagcacctagagtgcaatgaatagtgtattttcctatttatccctattttagcctatttcctatataaattttattctataaatcctaatttttgcataaatgaagtgtactcaatatttgtgttattctaaccaatagatacaccctagattaatattacccatattataattttatataatttatttgaatctttaattagggctaactcttattccaacgcacttaaatttaaatttaattgatactaatatggtcgcgataatatttttatttatttctatcctcacctaatctttattttaaattgtattccaactatttatttagccaaattaattttagggtttattcctaattagttactctttattcgcgattaatgaactccgaaatcaaaatccaatgaaataggcaataaaatcggcatgatgcaatttatttaaaaagtttttgaaaatccgtatttttagagttttgattttgttggtcgaattttcagggtgttacacccaaccaacccacctgaactacagtgcattgggtcgatttattaagtgtgagactaatcacggtgaatctggtcgaccgcccataaccgcgggcacggctattcgaatagttttactctgatcagaggtgtacaactgtacccacaagacacagccccacgacatgtttccgtgcgctgacatgccaccacgacataccggaaagaggccgtgaaaggacccttcgcataaccccctctaaccaagcacaccacacctcaggtttaacccccactcctcgcaaggcagcgggcagtcccctctcgtgcctaggtgaatccggaagccgcataggccatcgcagggcccatccaaactccatcacgcccacccttgcctagatgcgtaagctagaggaaagctacactacaagcccagccgttgcccacgctggcttgtggtaagcacgataaattcttccagggtttcccacgaaccggtccttaattgccatgggcacgactagcaaaaccatgcacccacagcccaccatgtagtcgcattttagttggataattacgaccatgaagcatggccagatgtctcgagcacgcagctcattctgatactaaaaagggtctaatactgtaattatcccatcaactgagctagtggtaattaagcatggctaagcatatagttttagctaggtcacataagtaacatgagctagtcgatttattacccaaggttgacaaaggacagatatcaagtaaatatggcacaagcaaacagataggtaatacccagatcccatgtaattagcaagacatgcaattttatttgcaaacgataaaacatttgtaaattaggatcaaaattctgggaatgtgtgactgtaacgtcccgccttcccccaggccgggcccacttacatatgatagctttcataggtcgtaacatgagctagtcgatttattacccaaggttgacaaaggacagatatcaagtaaatatggcacaagcaaacagataggtaatacccagatcccatgtaattagcaagacatgcaattttatttgcaaacgataaaacatttgtaaattaggatcaaaattctgggaatgtgtgactgtaacgtcccgccttcccccaggccgggcccacttacatctgatagctttcataggtcatagactgccctcacagaccaacacatgtcttttctgcacactttgtcctcactcgtgtgcacccgggaagaataattcttcccggtcggtcacccatcccaaattgcaccaggccaagcacgcttaaccctggagttctttggagattggcttccggaaaagaagttgcaacttgttgatataagtattctattaatcctattaagccctaggccgggatgttacaccctcacccccttaagagagatcgacgcccccgtcgatcaaccctaggccaggaacgtcctctcttggccacgtccatgtgtccaactgcgacacacgcgcccgtgaaaccgcgagagtcggctctgataccattttgtaacgtcccgccttcccccaggccgggcccgcttacatctgatagctttcataggtcatagactgccctcacaggccaacacatgtcttttctacacactttgtcctcactcgtgtgcacccgagaagaatttcccggtcggtcacccatcccaaattgctccaggccaagcacgcttaaccctgaagttctttggagattggcttccggaaaagaagttgcaacttgttgatataagtattctattaatcctattaagccctaggccgggatgttacagtgacttgccttgcttcttcacaacaaccttccgaactctgatcctcatgaaagcgatcttccgaaacgacgagagctacacgctcgcacgtaaaacgagaaaaaactctaataaaaaccaataaaacagtacattaaaagtaaacaaacatgtagagcttaattttatatgaattttgcaagttgagtggcccaattcagagttcgaatgaattagatatgaattttagaagttttgagccatttaaatgaatttctagaattattatttatttattgcgcaattataaattattttctcagaggaaaagggggatgctgacgtcatcaaaggggccggcgctgacaggcgggccccatgcgtcagcgggccaaggggagggtgcacggtggaccacgtccaccgcggcctcgggcgcgccgtggaccaggaccacgccggcccacgggcggccacagggcaaggcgggcgcggccgagaccggccggccgagcggcgacggcggcctagccggatggccaccggcggcggcggcgcaacgcgggcgaccagcgaaggggagatagagggagagggagggatgctcaccaagctcgcgcaacggcgaggagacaacgggaacgcggcggcgatggactcctcggggaggcacggcaacggcgggactccggcgacgtccggcgaaggaggagcggctggggcacaacacagtctgggagagaggatagaggggttaggaagggaggaggaggcgcggtaccgaggggaattgcggccggaggcggcaatggcggaggtggctcgggtacgtggtgaaggggtggtttcggtggtggcgaggagaaaggaagcggtggccgggcttgggattgctgcggtgaagccggtggtgacggtgacacagtgcggcggcggttccagccacggggaacgacggccggagctcgcaaaggcgatggcggctcgggttgacagaggggagggcggctcggtgggggattggaggaacgaggcggtggccggtgctcggcttggagcggtgaagccgatggcgcaagcggagcgccgcggcgacggccagggctccggtggcgcgcagccggagtcggtggaggcggtggagagaggtggtgcgcgtggcggcggtgcttcggagacggggaggggaaatggagcggatgccggggtgcggtggggcgctgcgatgctataggtggcagcggcgcagtgcgggggcgacggaagcggcgacggcgcgcggctggagggtcgccggcgtgcggcggcgcacgggaacggcgtggggagctcgagagagcacgcgggagggggcgatgagttggggaaacggatgaggggaggccggggtgcatttttataggccccggagagggagatcgtggccgaggtgggcggcaaccgccggcggagggagctccggcgacgtgggcgagtgaggctcgaacggcgccgatttttggggaaaataggggagaacgtggaggaaggggaggacgtggggtggaccacgtccacacgcgcgcgggagcggggagacgcgcggaggaggcggcgtcgtggggcggctcgggcgtccatggcggcggttggagccggaggaaggggatgggcctgacgggtggggccgtgggtcccacctatcagccaaaggaagagaggggaagccgggtgggggttttctggactttgggggagaggggagccgagctggccgagcggcccaaagaggagaggggagggaggcggcccggccggaggggaaaggaggaaggaggggaatgggccgaaagcggcccaaagggagaagagggaattttatttgcttttctttttaattaattgattacatgatctttgtgctattaaaattattttttgagctccgaaaattcatgcgaaaatttcggagaatatttagggcacaaagagtattgcaaaatattctcggccaatgatttttaaaggaaaaattttaaattctcccattatttcacttgattgaattgacttaacttttatttaatttctaaaaaatatattatttaatgatttttaatcccgaaagaaaatcggggcgttacagatgccgctgtggatgaggaggtggcaccgacgtaccctagaatcactaccacgtgctcatgtggcaaatctgcaccgtggtcgtcgatgcagaccaagctcagccacaaccgcgtggctgccgttgtcgatgccgtgccgagctcggccatgtcagccacaactgcgccgccgccatcgtcaacgccgcgaagctcggccgcgtccatagaagagggagcgagagaagcgaggaagagggagagcgagataagaaacgagtggctgagaatgaggagcgcccgatatttttatttttatcgggcactcaggtaggaactttttcccataaacctgttttgggctgaaagcccatatgtgttttgcaggaaaaatagtactctattttctgggggaaaaagtacaccgaaggtccctcaacttgtcatcgagttacaaaatcgtcccgcaaaaccagttatccagcgtccctcatctatcaaaaccggttacaataggtccttcggtgtgtttgaccccggttttgacttacgtgacggctgagtcagcgtgggacctacgtgggccccacatgtcatgctgccacatcaccctcctctctctctcttttcccctcttatctcccttcctcatctctctctctcccttctctgacagccgccggtgggaggatgagggtgtcggcggccggcgaggggcgacgcggcggcagtgatgacggcgacgagcgacgcggcggcgatgggggagaaactgcaagtgggcggcgaggaggagcggcgcgcgggcggcgaggatcagcgcgcgggctcccccgccagccgccgcccaccgcccacgaggcccacgaggcagaggaggaggcggcgagcggcacggcggcgacgacacggcaaattacagaggatatcaccaaggtccatataaacaagataatcaccaggcaaattactgctgctgctgctacttcaccatttgtgcatttcctcttctactatcttagctgcagctcgcacgctttgagtacgtgcattgttcaactgccatttctctcctcaattcaaaaaaaatatattcacctttttctcattcgagctaaaccatttcgatcaatggaattcggacgatctccagcccttctactcctcgttggtaagtccgagaaactttcaggccggttaactttaggctgttagcacacatcttcttcattcttcaacaatggcgtgtctcaatgcagggttcctatggtcacagctgcagttcggcgctgaggcagccggcacgacggtcttcacgctgtgcaacaactgcacctacaccgtctggccgaccaccttgtccggaaacacagcggtcgggggccatcgggggcggcgacttcaagctatcgcccggcgccaacgtctcattcccagccccggatggttggtccgaccgcttatgggcgcgcacggactgtgcaccctccggcaccgcgtcccttgcctgcgccacggggtacttcggcggcgccgtgagctgctccctcggcggcgcgccgcccgtcaccctcgccgagttcacgctgggcggcgccgacgggaaggacttctacgacgtgagcctcgtgggcggcggccgacgggggagtccgcgcgccgctcctccccccgccgcacgcgctctgctcctcgccgcccctccccgccgcccacccgcagcttctccccccaccgctgccgcgtcgcccctcgccggccgccaacgccctcctcctcccgccggctgagtcagagaagggagagagagatgaggagagagacaagagtggaaaagagagggagagaggaggctgatgtggcagcttgacatgtggggcccacgtgggtcccacgctgactcagctaccatctaggacaaaaccagggtcaaaactaccaaaagacctattgtagttttaatagttgagggaccttcagtgtactttttccattttctgggtcactcagcgagaatgaaagcccacctaattggtcaggctggtctctttcctttcatccgatcagtcacgcggcgttgccaacttgccgtccacgagagcaagcaaagcaacttcaaagcttctcgccgcggcagccacggccgccggagtccggacgctgtcgtgcggagcacgccaccctcatctctctctctctctctctctctctctctctctctctctctctctcactgacacctccatccccaccacggccccagttcaattcaaatcacaccgcctcgcccccctccaccgacatggccgatcccaacggccaccaccgctgcctcctcgccggtgccccagggtcgcctcaacttggcctccgccccgcctcgtcggtctccactgcgacgagcgcgtcgtccgctacgacgaccgccgccgccgacttcgctcccagcagccgcgacattcccttgctccccatcggccagtttcctcaggaccacgtcaacttgggctccgcctccgccgccggcgacgccatgatcaactccgccggcgctcccgctggagctcaccagtacatgaccaacccatacgccggcgacgccatgatcaactcctccgcgctcgctggtgctcacccgcacatggtcaacccaccaccgtacgccggcgcttcttcctcgcgactccccactgcttccgccgagtggaacatggattggctgcacgacgcgatggcagaacagcagcagccaccgcccccgccgcagtggcaggagcagagtgtcttctccccccccaccgcctacagcttcatcccctctccatcactccatctggttcacgctccatacccatcttcgccccctccaccttttccacgatccccaccatccgacgggagttcatgccggtgccgtgtcaagttccagccccacacgcgccgccattccccgcaacctatcagtatcccggcgctcttcccgccgccaccacccacaccatgagggactcctcgccgatcggaacatggataccggcatcaatgggagatcgcaagacgatgatgtgcgtgaaattcaatccgcacgggtggtgcaacgaaggggatgggtgtcaattcgctcaccacgaggacgagcaacgaattgtgccggggaggaggggcagccgctggtggcatcggtgcaataagttcgcgaccagaaaatggtgcaagtacgggcgcaactgcaggtattcccatggccatgggcgccatggcggcgtataggccggaggagcagcgccatgggaggatgagtccttcgtcttagcagcagcagttaccacgcgcgcggaggaaacacgtcaggttagagtctggatcatatggctgaatccatccgaatcatttggttcaaatgcttgcttctgttgtggaccttgtggtcagatgaaccactgcgtttttttttttctgtttgtgatttgatttgagtcctgaatccatccgaatctgagttcgacgaagcacaagtgctgtttgtttctgttttggtcagatgggacatggattttctacacctaggtgccatggcatctatcatttgcatgtaactcaaatagttatagaaaaaattaaaaaaatttagtaacatcgtttgtgatgatacaagtctatacacaaacatacatgactaaatttgatctacaactagagaaacaaaaataataaaatcagacagtgaatagtacgtacagtgcagataaaatttgttatttttgtttcttcatatatcgatcgaatttagacttgcatgtttgcatagtgtcttatattattatggactatcttataaaattttataaaatttttatataaatgtttgggtgtagaaaatactttctgtggtcagatgaaccaatgtgtttttgttgtcacttgtcagggtctagtcttagtctaggggaagaagacttgattagaacccatgcatttgatttgattctgagtcctaataaacttgatgcctcgatgatatcgttgattgttctggtatctggtttcgatctggggttattacaacattgcttgcttccttgctctggatttgggaatgtggtgtgtactatgtcgctgtttggcttgctctggaagtctggattcggtttggtaacgttgatgcattgagatattgttatgatatctggattcgattggggagaatgtatattggttcattgctcgcttcggaacgtacatatacatgccgctgccttctgcgctgtacgacgcggccagttcatgatctcgacgaggagcacgactaagttattggtcggtcagaactatgggtcatctgcttttcttagtttggggcatttagattttgattcattttgatcaagcctgcattgtccttgtgttttgggttgctgtagcctgtaaactgatgagagacagacatgtagctgaccttgttctgttgtagactgtcatttctattaatggaaatggagggctatgcctttgcttaaaaaaaagagtagctatattcatggtattatattttcagaattgctaaagctctgtcgacagaaaatcctacctcaaatcttgcaaattttggatcattggacgtgcttcacgattcgtgctcttcttctccaactccggcgaccacctcttcttctccggcgccggcgaacccaaactccagtagagggccgacgaattagggtcccggggtgaggtgggggtgtggggggaggggga

SEQ ID NO: 18157 - DNA, 6385 bp, Oryza sativa
  unsure (1)..(6385): unsure at all n locations
gggggccggccgggggggcctcgccggcgcctttgacaccattcggccagctggcgaggccgggcggcggcgcgctagggcggcggcggctgtggtggaggcgctgaggagcggcggcgcgtgaggaatcgggagagagaggagaaaggatttttagggtttggttgcctgcacgaatcttaaagcaatcgggtggtctaaaatttacaagatttgtgagagggttttctgtcaaatgatctatagacattcccttatattttttaccaaaaaatagtcagcatgtatttacattgtaagtctgtaaattacatatgtaattttagtatgtttataatgtaaataccaaaaattacatatgtaggttcaaaattatatgtgtaattagtatataattacagtgtaagtataatgtaatcatggtgtaactaacatgtatactaattacccatactcaaatttgtttatacgtactcctatatctttctactatattaaggccctgtttgcatccggagggctattaaatagccctccgaaatcttactatttagaaatattaaacatagattatcgacaaaacccatttcataactcctaggctattttgcgagacgaatctaacgagatatattaatccatgatttgttacagtgatgctacagtaatcatccgctaatcatggattaatatacatcattagatttgtctcgtaaaatagcctagaggttatgaaataggttttgtcggtaatctacgtttaatactcctaaatagcaatatttcggagagctatttaatagcccgaatatccaaacaaggcctaaataggtggttcctgtttacgctaatcaccgacagcctacgcgcgtaatactgctgcacgaatctcaatggagcatcaatggtagaaaatctgactgaggttgtgttcagttcagtgcaaagtttggattttaattgaaattgaagatgatgtgactgaaaagttgtatgtgtatgacatgttgatatgatggaaaaggactgaagtttagatctaaattttgaatctaaacacagcctgagattaggaacaaaatatggcacaacaagtttagcaaattcgaaaaaaaaaatgtagctgactttgctgaaattatgcacgagtagttaaatactgtgcataatttcagagtttatggttaagtagaaactgaagaatggctcatggttcttcaccgtcagagcttttcattgcttaattctccatttaattaccacggccgccggcgccatggtaccgcagacgccgtcgacatgagatgcgggctcactggaggcacacgacattggctagattgacttggacaccgagacgtgtgtcgtgtcgtgtcagcgcgcgcggtacgtacgcccgttcactcaacgggcgtgcgtaggcgtagcgccattctttgcaaggaaaaagtacaccaaaggttcctcaacttgtcatcggaaaaagtacaccaaatattctcgaacaacaaaaccaaaatatgatgtcccttaactatataaaaccggtctcccgagatccttcggtggttttaactccggttttattctacgtgacggctgagtcagcataggacccacatgtcaggtgtccacgtcagcctcctttccctctttcccctcttctctcccttcctcatctctctctctctccctcccttcgtcatcttcgtcaatgtcgcggcgaacccgcggctcggcgaggccgtgctccgacaggtcggcacgtcgactgcgatggtggatcggctggtggagatgctcacctggaacggcaccgtactctgaactggcgccagcccatacccctcagcttcatgccccctgagcaccacatcgacgtcgctcttctcgccgccgtcaccaagatggtacacatgcacctcatccacacaggtcttggtagccaccgtgtacggcctctgcggcatgcagcgggcgtggttgacctcgccattgtgcggcaccgagcgggagatggacacaagcggggtcgggacggcgccgctcgccgccgaggctgccgccgccaggcagggtggaagcgggagggtggcgtcggcgagcaggaggtggttggcacgtctcgtcggaggtgtgggttccgaggatgaggcggtaggagagggtggagtccggtgaccgggagtgggaggggagccactggacggtgagcgatggccactcgagcggctgggagatgacgaggtcatagagcaccagcgcgttcttcttccagttttggtgctcctccatctcctccgcggacgacctcgtcgccgggggtggcggtgacgttgaggaggttgaagatagagacggcggaggcgtagagcggtggggaggagcggaacacgaggtaggcatcgcagggccccgcagtggcggcagaggtgacttcgtactcctgctgcgcccaaggcagctgctgatggccctcgcccgcgccacgccgcgatggcaaggaggacgaggaggaggtgacctcgtactcctgctgcacctgcgctgcgatggtgaggaggacgaggaggagcatggcgccgccatctcggattcgccgtagtgtctccgccatcggcgaggtcagcggccgccgccaccacttagcctcgccgccagctgcctccccgctggccgctgtctagccactgacatcgtttttgccgcgccgccatcgacaagatttaacgcgagagcttcgcatgacgcctgccgtttcggcccatttgagccaatgctatttcgggcgggcggcggtgccgccggccgccggacctcctctccccttcccccggtggcctccttcccacagcgctgcctgttgccggcctgagaaaagtgaaagagagagaaatggagaagagggggaaataagagaggggttatgaagtggcatcctgacatgtggggctcaggtgggtcccacgctgactcagctgtcacatagaccaaaaccagggtcaaaaccgccgaaggacctcgggtgaccggttatgtatagttaagggaccccgtatatctggttttgcggttcgaggacgattttgtatcccaatgacaagttgagggaccttcggtgtactttttccttcctgcaaacaacgcagcctcaatcgacttcggctacaaatattgggatcacgcgggaaggcccattatactcttcccagcccatgagcttttatcgggcccaacaccgcatcctacctagggttatcagaagggcgccgcatataagaccgaggtcccaagctcgcgccgccgccgccgaaccgagccgcttcttctccagaccttggagctcgccgtcagggagggagaggaaggacagaggtgagcggcgcgccgccgcgatgagggccaaggtgagtgactcctcctcctcaactctcacgttggatggatcttgttttgattttgtgggtgttctcttatttgtgtatgtatgtatggttctcgctggttagcaaacaagtttactactagtaaaatcttatccgttccgttgtggacatggggtcaatcgaagcatttatctgagaggattaccgtgttaaaatgttgtttgattgagtgattgtataccttttttttttccggattggtttggcatgatgaggaaatcaatcgtttctaactgatccactggatgagaaattcctcctactcattctgaatgctaaaattttctttcataattccgtgatttgtgtccagttttgcggtcattttgattaagcacgccttgccttatgtgagatgctgcgaaaaaaaaactgtctctgttatgccctgatggcctgatctaagatatgagcagccagagttttctgtgtaccgactgcattttgggggatttcgtgtttccttgcaagtttttgcttctgtttagctaaaattctttgctctggtacgcagtggaagaagaagaggatgaggcggctcaagaggaagcgccgaaagatgaggcagagatccaagtaatcccataggcgatcgactgatggaggaggagaaagcgtctttggctctcactgctgtcatctcatctatttaagttgtttagtttcctttagtaagagagaaaaaaaactaatcaatgtacttctcttgatctttgtcatgggagtaattgattgtactggacagcaatgtttccataattctattacctggagttatctgtcagcaattctcattgtgtctcttctctgtaagagaagctgttcatctgcgattgtgattgtggagatctgaatttttttgcttctttccagtaatccagtgacagtttgcgtcttgattattttgcattctgtcggagtctctaagatagcttgtttttgtcattttgaattggtattcagtttcggataccattcagagattgcgaaaaatgcattcagatagcttgtctttgcggttgcgaatcggtattcagtctctagatagtttgcagctttacacttttctacacacgtaaactttaaacttttgaactaaacacaacttcaaacttttgaactaaacacagcctcagatggcttgtagattgcggttgtgaattggcattctgtttcaggcagcgctcgcagtgggagtaatctcgattttggcattctgctggttgttctattgcatttctagtgctctgtccactgtatatgatgttacctgtttgcagtatattgaaatctgcaagcaagtggatattattcacaaattctcactcactcaaaacaaattccctgaacctcctgaaatctggagtggacattaatatttcgaattacttgttgcagcgtggattcgccagcttatcaaatgaacacagattttatacactggtgtaattagtttaattgattacagcgctgcctcagattttgcacgcacagatcaccagttcactactccctccgtcccacaatataagggattttgagtttttgcttgtaacgtttgaccactcgtcttatttacttttttttaaatataaaaaacaaaaagttgtgcttaaagtattatatataataaagtaagtcacaaataaaataaataataatttcaaaattttttgaataagacaagtggtcaaacattgcaaacgaaaactcataatctcttatattaggggatggagggagtacttcagttcatcatctagaaaaagcacctcggtagcttgtacgtcaacgacacaggaaggcgtattccatgttcccgtcaacgagatcatcaagacgaggaaaattggaaaagaatccctctcctcctcctcgtaaccgacacgcccccgaaatcttgcgccgtttcgatgggggaagcngaggcttcctcctcctcttcctcgcggaagatttcaaatccctcctccacttctccaacgccttcgccaactggaaaccccgaattccccgccgcctccccacccgcgccgcaaacccctaaaccctagccgccacctccacggcggcggccgccgtagccatggatttctactccgacgactccgacccggacatcgacgaggacctgcagagggacctggacgcgctgcgccaatcctgcatcctctccgggaacgaccccgacgcggcggtcgcgcaggtctccgcctgcctcgccgccccgccggcggcggcggcgggagcggaggtgaatggcttgtctgatgacgacgacgaggaggaggacgaggatttggccctcgtccgcagcatacgtgagaatctcctcctcaacaaggcctcgccgtcctcgcccctgccgcgcccgatctgcgcctggccgccctccgactcggaggacgacgaggacgacctcgagacgctccgcgcgatacagcgccggttctcgcactaccactccggtgagttgattcgctctccctttgtttgttcgcggcatatgctctaagataggttccatgtggtgtgctaatcgatttatacattaggacaggaataggatgattttgtatgatacgacctgggaatccgaataactgggataaacttgcaaggtacttgactctttgatcaaaacataaattacccaattcaactcgtcttctataaaatatgctcttgcatcggtatataatgtttttatgggttctctagggtttatacttccttaattgttgtagctgtagaagaaatttaagctatgtaacacacttgctacatatggtgttatcttcatcagaccttacttctaaaacatggaatagaatctgtgcaaactatatttgttccttagagccaccaatataatatatataattgaagaaataatatgatgtaactaagtctctgacgtatagatatatagtaagtaa

SEQ ID NO: 18158 - DNA, 23523 bp, Oryza sativa
ctcattcagtccccccgtggatcatactgcttaatgcatgccaagtcttatcatgcatgcatattcttttgggcatactctcatccccgcttcaaaataaaactcaacatgcctgggcaagtctttagccagattatagatcacgtcctatgtttagattagattattttggaacggagaagtagcgcccaacctacctatataattactctgtttcaaaacaaacaaacaaaattagtacgaaacatgcatggcgatatatattgtatatatactaaaattttaagttgagttgagatggtttcttgctaaatggaagctaaaattttgatattggccggttatgtgcctattagaatgtgttacttctccttctcgtaacaattccaattgtgatattcttatacgtacgctatatatatttacaatgaagctactatattcaaccttgtattttttccacccaaaataaacaaacataatatatatggaatgtgacattgttcactaggatgtgtcattcgtttatttattttgagatagagggagtattatcctgctataatgtttggaagtgcatggtggagtcagctctccggccggactgtgcataagtcaccacccgggcgggctcgatgctatatattgtgcccactctccaaagacgccgaaaacaaaacgtgagtagatattgtcccactctcccactgttcgggctccatgcatgccaggcattcatcttggatccaccacttctatttacctgaccatgcacaagcttataattaattgtgctgacaatgtgcttcaggtgacgtaattgactaatacgaaaaattcagacgacttataaatagcgaaatttaattagctatatgcatgtgttaagttggcgcaaaaacgagcttgcgcgtaacaagcacgacgaccatacttagttgaaagagagtacaagcttaattaggaagatagtgcaaattaagagacacacaaacatgccatatatatatgtacaagtgatgaaattgagtttcagccccttacatcggggcaattgcttagggtgttctcaactacacattttaatttctactccttcgtttttctcgctcacgctttctaaattgttaaacaatatgattttttttcaaaaaaaagtaaaatttttattttcaaaaataatatttatccattttaagttttttggcttatatttaattaatcatgtgttaatatgtcattctattttatcagatgaaaggttcctaaacccctaaggccttgttcggttaattcttttgtatgaaattattttccctcaaatcccttccaacctctttcaactggaggattaaccgaacaaggcctaagtgaacaacgcctaatatttatacaaccaagtgtaattaattgcagtgtacaatatagacctctgagtatagtaagagatttactctatttatatatgatgtacactgccgtgtaggctcatgtcaaggtggtcttatactattgcacatgccttgactgggtgtccatattttcgcagcgttaggatgcaacccacttgtaaaaagagggaggtgggggggggggcacaacttggacatgacgatcggtaatagaggctcaatgatctgatagtgatcgatggtagtggctttcactgtgataggcagacataatcgatggtagtaggctcacttataaatggatttgtgggttagccactctatatccctaaacgactaaacatggagtcgttgtcccagtatagtggctcatgttcttggttatgtggcattagttaatgatcttaccggacgagcgtggaaagtgataatatggcttagagaggtttgagctaaaggcgcccccatccctaccgatgaggcaggctgatcaagggcatgaagtaaaagacgaagtgtagctccgtcacccttctataaggatcctggaatggagggttgggtcactaaagatctttccctccatgttgctctaacggaagagactcaaacccctctgatgtgaatttgggggttccgattcatttaggagttagcctccatattcatgtggtatatcttaacatcttttcttttgggtggccttgcatgttttggttcttctatcaggaatacactatgactctctttagggaattaagattttgttaaacatttggttggtagccaacttccgagaatttagaaaagttaagtctttcgatttctagcttctagttttattttaagattttatagctataaattcttagaatctggatgagaatctaaactgttaggaagcggagatttggaaaaagctatggctagaaactccttcaaacaagacctaaagctctgtccatcgaggtgatgccggagggagtttcctcttatcgcaaatcacacctttcaattccaaatcatgcctttgtacgatgggtaaagggcttaagaaaaaagccaaaaaatttattacataaataaatattgatagaaaatgtatactcttcccattgtactatttcacatattgtggtgtgtactcctatctttaattctcctgtgcaatgcactactaccacattttcaaggagtaatgtgatggaaaaattgaaaatttgaagaaaaaatttagaactaaacttggaatttagataaatacattttcaggtagcccctacctagctatagtactactcatatactagctcgtccaatgcactactaccaccttggttggctctattaaaggccaagcccactagacgcattctgtcacgtctctctagtgttactgcgtaacgtaggtggccgctgccggccatgtcgtcgtcgtccgctgccgcgctgggctccgacgacggctgctcgccggcggagctgcggccgagccggtacgagtcgcagaagcgccgggactggcagaccttcacgcagtacctcgccgcgcaccgcccgccgctcgagctccgccgctgcagcggcgcccacgtcctcgagttcctccgctacctcgaccgcttcggcaagacgcgcgtccacgagccgccgtgcccgtcgtacggcggccgctcgccgtccgccgccggcccggtcgccgccgccgccgccgcatgccagtgcccgctgagccaggagtggggcagcctcgacgcgctagtcaggcgcctccgcgccgcatacgacgagcgtcacgaccgagccggggagccagacagccgtagcgggcgccggcgcggtcgccaccgacagtacctcctcctcctccgccgccgccgccaaccccttcgccgcgcgcgccgtgaggctgtacctgcgcgacgtccgcgacgcgcaggccatggcgcgcggcatctcctatcacaagaagaagaagcgcaggggcggcaacatgaacggcgcccgcggcggcgccggcggcggcgcgcgcgcgggcgtgaacgacggcgatgcgacggcgccgccggtggcggtgaccccggggctacctctgccgccgctgccaccgtgcctcaacggtgtgccgttcgagtactgcgacttcgggagcgtcctcgggggagcacatggcgcccatggcggccatggcggcggcggcggcggcttctacggcgccggcgtctacttgccatttctgtacaacaccttcagttagttagctagctagctagttcgtcgtgtatttgtctgtgcttctcactgtggttgcttcagtgtactagctagctacatgtgtgatgtgtctgcatcttgtgatcatcttgatctgtgctttgatgctgatcgatccagcatatccgtacgtgttcgttccgttgcttcggatcttaattaactaatttaattgtgctaattaattttgttagttttggtgatggatgtcgattgcgttatgttcgtgcatgatctgattaataacatgcatgtgttacggtatttaaaccaggctgaaatcgctaaatgagggtgaacctcccaagaactaaggaatatgttgagaaatataaggtctataagcctcggacacaaatagaagatccacggttttgatttatttcacaaaatatcatattgtccaattcttcatcttattctgggtgtccggagagaagcaatatatttcccaactttttttaaaaaaacttttttctttgcactcttgcgaaaaaaaacttactacaaatgaatgaacatttaggtttcttactatacaaaattactgtgtaatggcaaagatggcatgaatctccttaattaaggcttttcccgctgtcccgctcccgtaggccgcaacaactctccggaagcgattttttagtttttttttctgaactttttaaatttttaattttaaaaataaacccttttaaaacttatttccactatctgaacaatttggctaaaacaatactagcattattttgtcacaccggtttgattggcgtgataacgttatttagtcacaccaccatagctgcatggctggattaaacatccacacccgctatttgtaacgcgtcagtattgttttgctacatggcaaaaaaaatttagattctgaaaataaactagttttgtaagggtctattattaaaattaaaaaatttaaaagttaaaaaaaatcgtcagaagcttccggcaaaaagaaccttctccttcgttttcgcaagtaaaatgggcctgtttctccatttacgccggcccaaaagcccattcgtattcagaaaacaaaaacatttgcggcgcgcgggcaccgaaatgctggtgcaggtgctccgccgcatcgcgcagagcggcagcgtcgtcgtcatgacccatgaccatccaccagcccagcggccgcatcctcaacatcctcgaccgcctcctcttcctctcccgcggccgcaccgtacgtctactccggcacgccgtcggggctcaagaccttcttctccgtcttcgccgcgcccgtcccggacaacgagaacccagccgagagttcgccctcgacaccatcggtgagctcgagcaccacagcacgacggcgccgccatgctcgtcgaattcaactccaagtggcaatcatcgctcggcgctttcctcatcgatgccgacgtacgcgaacccgccgtacgtggaggtgtgggtgctgatcaagagggcgttcaccaacacgaggcgaatgccggagctgttggtgatgcggctccgcacgatcacggtgacggggttcatcctggcaaccatcttctggcgcctcgatcgacgacacgcccaagggagtccaggagcggctgggcttcttatttcgccatggcgatgtcgacgacgttctacgtctgcgccgacgcgctgccggtgttcgtccaggagcgccacatccacatccgggatcgagacagcccacaacgcctaccgccgcctctcctacgtgatcgccaacaccgccgtcgcgttcccgccgctggtgtccctgtcgctggcgttcgcggcgaccacgttcttcgccgtcggtctctccggtggcggtgctgcttctcccgtggcgtcgagatgttcgacggcacgccgatcgtcgggttgtcgaaggccgtgaagatgtcggtgatggacgccaatcaggcgtacgctcggcaccactttgacggcggacacctgcgtggtgaccgcgccgacgtgctggcgcagcaggctgggatggatatcggcaggtggaagtgcctgctggtcaccgtggcgtttggtttctttttccgttttctgttttatattgtcctgctctttgggagcaaaaacaagaggcgctagctaaaccttcgggtgtgtgtatgtatgtaatatttcaattttgaagattttgtattcatatagctgaaaaccgtgttcaattataattatctgattagatttgatgacaaaaaactcaaggaaaggtttaaattcagacgtatgtagtgaacacgattttttatgtcctacaacaaattttacaacggtattaatacattgttctatcattttgtccacctattgttcaccagtatataaagacgaaaaaagatgtttatactgtagcaaatcccatagcaccggaccaataaatctcgcaactgatatgccgttttcataattattagtggagtcaggggcggatctatccattagaaagggtgagtcgatcgatccaattatacgacatgtgttgccctacacctctaaaacccccctatcctcttataatagtcatgaaaaattatgtataacaaggtctgaacgtctaacagatcaagtctattttttcacaatgcacgcaagccacagacaataattgagacaattatgcgattgaactataaatacgatatgtgttgtgttctattgctcttatcaagtaaacatctccgttctccaccccacgtatattttaaagctgcgtccgtcagtcctagagggctagaccgctagaccgcagcagtgtgcaggagacgttcacggtgcatccgacccggtggccgtagttcgatcgatcggttgcggtgcgccgccgcacacacgacacgagcggccgggcaagcgtgcgtacgtggcctgtgtcgtgggccccacgaaatcccacttcagccaggaatttgaatatctttgctctcatctgcgttgggcccaccaaatcccacttgctgggaggctgggaccactagtgtagttggttgggaccactgccagatcgtgtgccagatggattccgtgggacccactatgcattcaaaggtgcttggagaaccctacgatgacgtggcaggtcattccgactatataaaccccccgtgagagttcaagcagcccccgtttcttccacctctcctctccttctccccacctcgcttcgccctcctcttgctctttgcatccacacgccgacacgcgcgcgaggagatttttcatctcgccgatcggatcgagtcgagtagctagcggagagaggtgagcgtattttgatcgatcgcgctgtgtgtgttctggttttgattttggtcgatcaaaatggtggtggtgcttcgttttcgtgaatcgtgatcgatttttgaatgtgatccatggcgtgttttctgtgctgattttgcgtttgatgcgtgtggttttggtgctcgatctgtgtgtgtttgagcagcatggcggactcggaggatggagatcacgttgcgacgacgacgacggagcagcgctacgacgacgacgggcacctcgtccccagcagcggcggccaggaggaggagggatccggcggccgcgacgtcgtcgtccccggcggccacgtcgctgaggattaccgctctggcgttggcgtccccgtcggccgagacgcaggcggcgccacctcctccccgccgcagccagtccacgtcaccccgagcatcctcgtcggcagcatccacgcgccggtcttccagggcgagctcgtcggcatgaagttcggggtcgggtcaggctccatgggtgccggcaccagcgcgaccaggcgccttcccgcgaccggttttggtgctctgccgaccagcagcatggcggaggatagtgccgaccacgccgacgacgaccacctcgccgaggaggaggaggaggaggaggaggagcactactcgacgacgggcccctcgtccccagcagcggcggccaggaggaggagggatccggcggccgccacgtcttcgtccccggcggccacgatggtgaggaggaccaccccgacgacctcgtcgccgacctcgacctcgacctactcgtcgacggcgtagtcggccctgtccccggtggccacctcaacgcagatgcccccgccttcgtccccaccacccgtgggcgccaggacctctattccgccctctcctcatccgcccccgccgccggttaccggtaccgccactacatcacctcgtccgcgctcgcagaagccggccacgtgtccccattcctcggtctcccgtacgccacggccttcgattctccgctcgaccgcgagttggtcggcccgtcgtcagcgccgccgccgtgctccgccgctagccgtgcctggttagtgcgctgttcctcaccgctctccgactccgagtggactcggcgttcgatcctggcgcgagaggctgcacacacaccggcctccaccgtcactgggcgtgggcggttcgagttcgtgcccattcccggcgcaccctatgctccgccgccgtcattcgcccccatcgccgccggagctggaccagcagcgcgaccgctacagcagctggcattcggactggaggaacacaagacgaagctgtgcgcggaatattattcccgtgggcttggttgtcctcgtggcaacacatgcaagtacgcccatggagaagatgacctgcgtttggtggtggcggtgagctctctagccgacgccggtgagggctcctcgtcctcggtgagtttaattgatttcgtcttcaatatatatataactgattgattcgatctaccacgcaatacctagtcatcttgtcctcatgcatccagatttaatttactatacagagtcgatgcagatttcatttttggttttgaacttttgatcatatatgcattcgtttgcctttgcaggattcgtccttcgccgctttgggaggggaagacaagtacaagacgaagctatgcaagacgttcacgagtggtggattatgcctgtttgcagccaactgcaggttcgcgcatggggaggtggagcttgggaagaaggagccgtgctggtatttcttctccggtcagacctgcccccgcggtgacacctgtggtttccggcattcctactaggccattgtcttcgcatcgatcagttacatttatcccaccaatagcaaagcgcaaggaatgggagcagtagattgatcgattacctttgcgtgcacgagatacatagatagttctgatgcttgtttgttccatctcgttcagtgtatatccgatccctgtgtcgaacaacacatttacaaactgcatttctacctatcctagctacagcattgctcgggtaacaccatgaggttttcgtctacttagtacttgttaaatgtcttctttcttcaatgtaagaaagctttgtacatgcatgacttcattgagatactccctccgtattttaatgtatgacgccgttgacttttcgaccaacgtttgattattcgttttatttaaaatttgtgtgtaaatatgaaaatgtttatatcatgcttaaagaacatttgatgacgaatcaagtcataataaaataaatgataattacataaatttttgaataagacgaatggtcaaacgttggacaaaaagttaacggcgtcatacattaaaatatggagatagtatgttgcatgcctgcctaatcactgcatggaggttttgtctacctaattatccactgtctgcgcacctgacatgttaatttctgcttctggatatgcctagtacttttccccccaaacttactctgttttggatcacaactcaggggatgggtcaagcattgtactatttttgttctggaatgggaagttaaaagtttggtgcttaaattaaagccctagcttgctgtcatcctagagttgtccacgccgggtgaatgctaattaaaggtgaaaagggtttcccgttgacccagacgatttccgaaaacagagtgtatactgtatagtattggattcggaaagtatgttcctatgaattcttgtcttagtgtcggttccttccttcagtagtagtgaggtgcggtactaaatctggtaccgtgcctggaatgtcacgtggaagggtgacaccataattttgtattggcatatcagttgaatgtgctttgagtgggtgcatcctgggagtggacataaccatttgagtgacatgcaaataacgaggggacattccttcgagggattaaaatagtttcccggtgtatccttccaaatttcgaaccctaggtcccccgtgactgcgtgacaccgaggtcgtacaccgccgtgatcctcgcccgctgttatcctccgtgccagggttacggataaggcatactctctatcctacgacttatggaatatactgataagatataccttcacgtatacggttcgtttccgtgtatgccattaggaattcgcctcaagtcaagttatatctctacaaagttaaaggaattgcagaagtcctactcggaaagggtaaaatctctaatatatcgtgttggtttacatatctccaagtcttacttaagggtcaaggtatcccacatgtcacgccccgaactagtcccgaccggaactagcccgtgacgctccaaattaacctgttaatcgataccagtcccagaaaacagtgctggtatcacaggaagacagaatatcacagcaacagaggtctctttattatagagtaggagtacagtcatgttgggctgcggacagatcccgagctcacaactgcattacaaaagggaagtggaagccaagacttggaccaaacatcacaggcgcgacttgggaactaggccgaaaccctaaaactcatcgtagccggcttgctcctggaagaactcctcgtcagcgggatccgcttcatcttcttcagcaactggggggggttatttatatagagcaagggtgagtacaggagtactcagcaagccatgggaaataagtgtttaatgtaggcttcaaagaaaggctgttgtttttgcgattgattttatttaaactcttttctgaaacaactaagggagtgcttctcaaacgacacggatgagacagtgcgtctcgtccggtcggagtatgtgcaatgtttcagtcttttgaattgatcaagattggcacccggccaacagctttcaaacagccagccgggcctggctgatcccatcagccgcagattttccaaacatcaaacccattccacaacagcaaatttcacaaggcagtagtcaaacaaaactacgctaggaattacctcacatccgcccatgaccgtgggcacggctgttcgaacagttttaataacctctgcagagggggtacactttacccacacgacattactaacccggatcatccagcccgtgcagaacggccacgactagagaccttaaggcttttatgacaaggcatttcgaaagccgacacaggttcaccatatgccaacgagaggggtcccagtccaacaccagattaggtcccagaccatactatgcccccgacaccaccccggcgaatccacatgtctcttagcatcatggctcccccgataagctagttactcagccaggggtgtcccattccacccatgtggtcgtacttgtcttatgttcggatgaaattccaaggaaacggtccttaagtgcaagagcgggaaaccgtacacccggtacgttccccggtccgcggttttggaaattcatttagttcgcaagcaccgacccaggtgtcgggttttccaagtcttttgtaaaacccaagttttacccaagatgtttctcagattttaagtttgaaggcgaccgtcgatacccgtgcagagtgcacgattaccgaggcgcaactaggtgggtacaagggaacatggtataacaattacaatggaagggtcaaatgcaacaaattaggtaggtccgccaatctgccttgcagacgggacaagcagattaagtgcgatcctatcaatgcataatatttttcaagcaacataattaagttcaaatataggctcaagatgttcaaaggtggcttgcctcgctcgagatcttgagcttgatcctcgaaatcctcgcactgcgggtcttcgggctccgaaactacacgcgaaacgggacaactcagcaaacggtgaaaaaaacggggaagattgggtggggaaaaggaagggagggcgcctgggtttatagggcggcgatgtcggtttggaaaccgaccttgggcggtcaagggagggagctcgcgctcggcggtcgcggccaaagcggcgacaggggaggggaaggatgacgccggcgggagggaaaagggaaaaagggggagagaaagggggcttgccccttgccactttgggaaaaggaggacgaagagagggtgacgcgggagagggaggaggagctcagcctccatcccttggagggacgcgcggggagaggcggggccgtgtcgatgacaacggcgatgacggcggaccggtttggagtggagcggcaacacgggcggtagacgcggggcaggcgcggcaggcgctgacggcggcggcgactggccggtcagccaccacggcacgcgcgcgcgcgggcggcgcggcgatttgggcggcatcggcgggaaaggcagcgagagcgggagggagggctcggcgcggctcacgacagagcggggagagagagagagagaaagagagagagagagagcaggggagggaaggggagatgggccgagagggattcggcccatcgaactcgatggaggctaaatagacttttgcggagggatttgatttgggaaggatttggattcgggattgaacttggcaatagatcggggatttgagatctgagatggcacggacactagacaacaagcaaagaaacggatttcgcaaatagggtttttaagagatagtttttccgctaggcgccacgacggaacgggcgctacaccacgatataaaagggacctctagggagaggtaaagggcatcgcatctcatcgccaacacacccaccaaagtttacgaagccggagtccacggagccaactcgtcgggagatctcgtcgaacccctcgactatgatctcatcggcattgtctgttcggttactctctttgtaatctgttctcatcatcattaatcccatataaactagactagggctattacctgataaggggcctgaaccagtataatccttgtcttttgtttgttttgatatcgtactacgtagatccctgttccaacatactctaataccctattcttccggtccgcgagtatcactcgtcgacactccactacgctacagtcgcacaagctctccttgggtatgctatcctcgctgccactcatcctcttctatcaccacgactttcatccgctgtcatggccacttcatagttcggaggatggaaaagatggattcctagaggtgggatgaatcgtgcaaagaggtttgagtacgtgaaggcgaatacgatgttggcttcaatgaggtcagaggcaaactgacgtcgatgctggccacacgacaacgaggtcctgtgtcgcctgggacatcggcgtcggtgaacccctactaggtggggatgatttcggtggggaagagaggagccgcacacgcgacatatgcatgttgtgtgaagcccagtgctggtgaacccctactaggtggggatgattttggtgggagagagaggagccacacacgcgacagatgcgtgttgtgtgaagccccaacgtgagacaccggcgtcggtgaacgcctactaggtggggatgctttcggtgggagagagaggagccacacacggggatgatttcggtgggagagagaggagccgcacacgcgatagatgcgtgttgtgcaaagcccagcgccagtgaacccctactaggtggggatgatttcggtgggagagaaaggagccgcgcacgtgacaaatgcgtgttgtgcgaagccccaacgtgagagatgatggttgtgggggcaagacaagttcggcgctgcgcagtgcttatacgacacgtggaggaaattcagccagcgacaagttgcaacaaagagccaagcctcatcctgcccatgatgacccaacggcccgattcaatttggtaccgcaagcactaatacagacaaggtttttgcatacggctagaatgatttatctcatgcgggttggcaattatcacgagcagacgctaggcctgtatacgaaaaaaatatttttagtagtgaaggtacatgtacctcaaagtaccatttgttgtaccagaacaaaccgaccaaaattaacaacatggaccaaaatatcaccaaatagaagataaatccattttgtaagccaagagtggtaataaaaaaaaatagaagaaaacatcttcaaatgttcagccaatatatagtagctctaggccagcctcaggggtaagtaaattattgagcataagacataccaaataaagcctccaatagggtaccacgagtgaccaatggtaacgccataattaggataatgaacaaatgattcttggtagatgagacaagcatcagtatggaccatgccatcacagttgctgggtgtcacaactcgttgacaatatctgcaaaactttgtagaattcttccctacaaaacgagtagaataaatgtttccattgacagacttgacatcgcttctgttatttactataatgctgacgtaaatatctttaccatcctgcgagatatagtcaacaacacaatgaaaggtcaacatgttacccttcatgacaccaaatcttctgatgttatttatgtactcgctttcttcatagttactaaaaaatggaccaagagttgtaatgaccctatctccaatccggtacaaggagttaccaaccggacaaattcgctggcaaaggaacttggacatttgattagccaatcttcctgatgatgatttggttggttctgctattccaacgtatagctgtataatatagaaaaaacattttcaattcatcggcatattattataagagcaattttactattattgaggaggtaccatgacgtacgtactattttttctattgtaaatttaatacctcttgatatctaagtagtatgagatactaaattttccactaaatttttgatacaccctcaaggattgtaaaattgctcttattataaacatgggttttcacatcaatgtgaaattgcacccattacttgtatgcaacttgattatagttacaggaaaaaatgaaaaaaaatgttagattgaatgggatattgggattctagaagtatatacacatacacacacaaatttgcatgcctcaaatgtgatctacacgtggaggtaaaaaaatgacacagtagaacgcagtgttactgctgttcttgaagtgtacaacgaatttgtagttgcatgcttgtgtacttccttatatcatcacagtatatttttccaatagtttttcaaaattttatttaactagttataccacatgcatttatacagtgagggatgaaaacagtagagcggaaacaatatatagtttatgtattaattttatggaaatggtttcgtcatggttgggaattttccatatttcagaatttaacaatctagtgacgactttaatatgacgccaacataaattagaaaaatgtgattagaaacggaagcggttggaaacgatgtcattatattatttgtatggaaacaatgtcatttttattatttgtatggaaaggatatcggtactatcaggaatttccgtatcattgtcacccccatatacatttaggtgcatagaatgcacatgcacctaggtgctaaaaatagtttctgacataataatcatatgattctacaagacactaaacatagtagctatgaacaacaagccattcccaacctaagacactagacatagtttccataaactccacatcatcaagaaactagtactagacactactcttccaatgcaaacaccactatttcattcttaaatttaatgctacttatctcacatgatgtcttgtatgttgtgtagaaactatatcttatgtaagatatggtttcctcctcttttctcatttagtcatttgccacatcatttttcatcctatgtggcagtttatttaatgctatggacaccatccttattgggttggcaatagcctaaggtgccaagctagtcaacttctgttaaaaagagagtagctttaacaggttactgctatatttgaaattaatggtatttgaacaaacgagggaacatgctttgagagtttaaaacacttccctgtgtattcgaaagttaaaaaaaagattaaaagcagcactgttaattaaactgtgaaactcctgaaaaaaatgcatgtaattgatgtgaatgagtttggtaaatgcagtcaaattgactgaaccaccaaaaccaaaccatatacgaagtcagagtggatgcgtgcacacgtcacggcagatatatagcagatttattactgcacggagtagtaattattgagtttgaaaactgctaataatcaggtagacagataccttctggccgttgacgacgtggttatggtcggcgagggcgagggcggcgttggcggggtgcatgaaccggcgaaggcgaaccggcggggaaggccggtgaggcgatcgcggcgcagccagatgtcggcgacatccccgtagcggccgaagtggtcgcggagctccgtgtcgcccatgtccggggagacgccgccgacggacagcctcgcgctctccggtatcctcatcggcgcgcgcgacgccggcggcgaacctaggtttttcttttcgctctcctttccgacgccactatacatatatgggcggggcggtccatgtgaaatacaagttcgggccatactagctagatgggccgaaccggaattgcttccaatcgaatgtgcagtccatgttctgttggctggattgtgtccatcgcggccaggacgcatcgaactgaactgttcttgcttaaagataagacagagtaaacgttttattttaaaaaaaaactagcaaaatacacggataaattatttgttaggctaagtattgattagaaattttaatgataattaggatggataaaatcaacattgcatattgatatactcttgttctcataatactcaagatgggtgtggatgctctgacgatcaaacggcggtgagaactgtggtaggatgtgtcccacaacatggtcttgatagagagaaaaatgacaacggcgaccttcggtggtgaacagatgagcgcggcaaaacatgttctcggacgaggggattccgttttctttggccgtgtaggaagatcaaaagatggagaaaaatgattagcactgttcatcgtcttccctaactgaaacaataaaataaataggagggacgatgggcgccgatgctctggtgaccaaacggcggcgaggaaggtggccgaacgtgctccagatgtgactcatccataaatggtggcgtttggcaacaaagacaaaacaacgggaacacgaccgacaagacatggtcccaacagatagagaaatgagaatgacgagctctggttatgaacacggtcatcaatggatgagtccaatcgtggaacacatcctaccacaatactcaccaccgtttgatcgtcagagcatccacacccatcatgattattatgagaacatgggtatatcatatatttaacagtggtttttatccagcctgattatcattaaaatttataatcaatacttagcctaacaaataaaaataatttatccgtagcgaagcacgggtattttgctagcagtagttattatatatttcttaaagataagacgcatcgatcagtttgatacgaatacggaacgtcccgtacgtacgcgtctacgtgtacgcacgagttgccgtcgacgagaaaatcagatcagcagatcgaggcggccggcaaagctcgctgcttcaagcttcgtgtcacctccatctccgaccacggcagcagcagccgccgcctcggagagctgccgtgcagcgcacgctacccgccgtctatataaagaggcacctctcgtgtcctctctcctctgaacccttcgttcccatcacaaaccacgcccgcctcgatcgatcgatcgaaagctcgagatggccggcgatgacgccgatcgcaaccgccccggccgtggtcgagagtctcagcccggcggcgccacctcgtcgtcgtccccgccgggctccaacttcgatggcctcgccgcgaccacgaccggcggcgcctccaccggcgacagcagcaggatcgcaagccacctcgtcgagttggaggacaccggccggaggcggagcgccgccttcgtccccagccgccacgaccccatctacgtccccatcggccgccccaatcccttgggccccatcggccatcgggaggactactactccggctccggcagcgccaccgccttcttccccagcagccgcgaccccgtccatgtccccatcggccgcgacaccgccttacccccaatcggccatccttcccagggccgcgtcaagtcgggatcgtcatccgcctccgccggcgacgacatgatcaactcctcctccgccgccgtcagccactcaaccggcgccggtggcggtttctcctcgcgacacgcccctgcttccgacgaggcgaagaagcagcagcgtgtgatggcaataaggcggcagcagcagctacagcttgcgatggaaatctggcggcagcagcagcagcagttagcggcggcaatgtggcagcagcagcagcaggaagatgagtgttctggcagcagctgcgtgcgatgacaccctccgccagcagcagcagcagcagctcgtcgtcctcatccgctgcggtcgccgccgccgacatagctctcgcgccatcggcagaggccgggtctccgtcgtctcctacgacgccgacgacaactggagccgatcagaagaatgtcggcgacgtcgtcaaacgtcggagtccttgatcgatgatcttagcatcagttagtcaggttagcacactcgcggaaggatcggaggaaacgccagtttcgtcaggttttgtttctgttatacgttgtggtaaaatcgatgaaccactgcgtgtttttgtttgttcgggtcgatatatccgtcttgaacccatttggtttgatttgactagtacggcttaaaagacttgatgcgttgatgatattgttgaatgttgattttgtgttcttgcattctggtatctagtatatctggagaaagattggttagtaagtattgctgcttaattgcttgcctgattgtggtcagattcagattctgatcagatgaacagtgtacatttgtctgatcaaagagtaggcagtaattaacatcttactctgctaatcaatcagtagttgatatgcagtttgacattccaattcatggttgcatgcacatgaatcttgttcagccttgatggaacattggaactgaagttgtgaactacggagtatatatgaaatgtcagatattttcagttatattttttatttgtacatctgaaatttctggatttcctgcatgcagccacaccggcaccatgcatgggtacaactaaacctatctcaacaaagctgacttgttcgggctagcaattaatcagttagcgcaaaattgaaatcagaaaagtaatgtttccactgcccgccgaccgacgaagacagagaaagagagataagaggaagagagaaagagggggtatgacacgtgggtctcaccattaaaaaaaaataaaataatgactggactgccacgcgtataccacgtagaacaaaaccaccacagattaggtcgaggggggtaattcggtcaaccgcgatagttaggggtgaagaatatccagttttgtggttcagggggtaatccggtcaaccgcgatagttcgggggtttaattcgtacttttttcttagctatttgctgaaacattgtttttatatagggtaaaacaacgttcgactttttggaaaccgttgtttcatacattgtagcaaaagtttcatgaggagatttgattgtgtttcagccttttacaagattaaaacattttttatttatttagtgaaatattttcgatctacttaattaaatagcgtttgatttttgaaaaaaagaaaaagaaaaggcgcctggagggattctggtcggtggctatacgggacaagattatatcggacacgatcgatctagctaggattactactctaggagtccctgactacatgtacttagattagatcgacgaccttaattaatttggcatcagttaacaattttttcgatcctccgctatcctcatcctcgccggccgcgcattgagacatgtcgaccaccaacgacgaagctacgacgtcgtcgtcgcctccttcagaattagatgctctcgacaccgtcgccaaggcagtcggcgacgccgttcgcttcgcgttaaagatggatcctaagaccaccttcctcgcccacggcctcgccgatttcgtcgcctccgccgccgcacgcgacgcgctctcccccatcttcgccaagttggcagccgccgagccgccgccgccgcccagtacaacggcgccgatcatcgcggcgccggcgtgggcgcccctcctgcagtttgcggcgacgcaacagataatcccgatcagtgcgaggctgttcgtgttcggcgtctccaagaagcgcaccaccgagctcgacctccgccgccacttcaagcgctacgggtatgtggccgacatctggctgcgccgtcgcggcggctacgccttcgtccagttgaggacaccctcccacgccgccctcgccctcgccgataaaaacccaggtcgtcaatggccggaaggtaacgtcatcgttgcatggaaaccgttctaaacactcgggcttttcttgcatatcattatgaaaaaatttaaaattttgacatgataggttaacatgtaatatatcacttcataaacatgcaagttcaaattagacttctacaagttgtaacaaaaataataaatttgactgtgattctgtgaatatatgtatactggttagagtttaatttgttatttttgttgttacaatttgtagaagactaatttgaacttgcatatttgtgaattgatatattacatattaatctatctgtatttttttttgaaaatttttcataatcaattagttgacatgcaagaaacgagtggacgttcacccgagagattagaatccatcatcgtcgttgcactgctacatgcatgcctacgtactaggggaataaccacccgggaaagcgttttcatcctttgagccaatattattctctagtttgttacatgtcatctaaaccgttatcaataaaattgtaaagaatttacaagatagattaacatgagatatatcatgtcacaacatgctagtttaaattcgttttttataagtcataacaaaaaataactctgaatttatatatattaactagttttagtttagtttatttttttattataacttctagaagtcgattttgaacttgcatgtttgtaagtgatatctaatattaatctaccttatcaaaaattgttaattttttttataactatttaggtgacatataagaaactaatggtatgaaaatccatctccatagtaacctgaccctatgagtatacttatacgagtatagagtgaattttgcaacatcattggtcagttaattagttattaacttcagctcgataaataatactccctccatcccaaaaagaaccaattcatgcttgtccagattcatagcccgggattggttctttttgggacggagggagtactcttttgttttatgtttgacgttgttgattttttacttacatttgactattcattttattaaaaatatacaaatatgtatttgtaatggtaaaaaaaataataataaatgatgattagatatttttttcctggaaagagaatgatgtctaaaaggcaaatgcgtcaaacataagaaaatggaggtagtagctaaacttcttttttatcaaaaaaaaagtagctaaacttctgaataaagtaacaaggtgattattgtgttgattggtcctctttgttttacagaattagtcggctactttggcccttagccccttatagacatgtttctttatatgattaattaatcacatgccttaattatatattatgcagctatacattgaaatagcgcaaccaaaattaccagtagaaagaccaatggccaagtacctctgccagcgggtttgtccagttgataactcgcttgttcggattggagacagggtcctctcaacacttgcattgcttggcaattactataaagcaagtgattacattactaacctcaaaagatacggtttcatggagggtaacatgctcatgtttgacagcgttgtcgactatatatcggaggattgccaacgttgttctgtgagttccgtagtaaagaaaagtgatgccaacaagcctgcagtccactacggaaacaacatttcttctactactccttctgtaggggatgatgctactgcaaaattttgccggtactgtctacaatttgtgactcccggtgatagcagcaactgtggcgaggttgatccataatgattcgagcctcatctaccaagaatcgtttcgtcgttttaattatggtcttaaaattaatgacaagtggtttcctgttggagcctttgttggagatatgtctagtgccgaggctgaagaacttgagaatttttaccgtccattgagtatctgcaggctcaaagatgatcaaattggtaataattttcaaacctataaaggtcttaggtaaggggatcctttatatctccaattttttttaatatagtggttgatatgcttactttactgattgagagggctaaagatgtggttctataaatggtgtaattcctcatttagtggatgatggtttatctatattacaatatgcagatgatactatcatttttctagagcattatttacatcaagcaaagaatctaaaattgattttattccgtatttgaaaagctttctggtttaaaaattaattttcacaaaagtgaattattttgcttcggtcaagcagaggatcattacgatcaatattctaatatctttggttgtaagttaggctctttttctgtcaaatatcttagtattccaatgtattttagaaagcttggtacgtaacaaagactggaaggttattgaacaaagaattgagaaaaaacttagtagttggaaaggtaagcatatgtctgttggtggtagattggtgttgactaattatgtactttcaagtttagctatgtttatgattttcttttttgagataccgaaaggggtgctttaaaaaattgattattatagatctcgcttttcttggcaaggagattttcataaggaaaggtacagacttactagatgggatatcatctaccagcccaaagatcagggtttaggggttcataatttggaaatagaaaataaatgttttttggacaaatggttttttaagttaattaatgaacaaggggtttggcaagacttattgaggaggaaatatcttcataataagtctattacccaagttgataagaagcaatgtgactcatttttggtcaggtttcatgaaagttaagggtactttcttaaacatgggttcctgtat

SEQ ID NO: 18159 - DNA, 14654 bp, Oryza sativa
tccgccgagtgctacagggattggctggaatggctgcacgacaccatggcagaagagcagcagccgctgctcccagttcaattcaaatcacaccgcctcgccccctccaccgacatggccgatcccaacggccaccaccgccgcctccccgccggtgccccaggccgcctcaacttgggctccgcctccgccgacttcgcccccagcagccgcgacaccatctacgtccccgccaaccgcgacaatcccttactccccatcggccagtttcctcaggaccacgtcaagtcgggctccgcctccgccgccgtcgacatgatcaactcctccgccggcgacgacaacgccagagatttctcctcctccccgcggctggatgtgattgcagaagcacagggtgctgcatggggttgggatgctctgtgggaagacacgggattcgctcactgccttcatgatcccaagatcgtgctctgctggcgatacatgtatggaggcgacgactactgtgatttgggatgcgattgctttgacgctcacagttacaatgatctgcaatcaaagatcaggacaggcgtcgccgccgccagcagaagctattcggttcctcaccctgacctagtgagttcactgtcgaattgatttgacgccggcattattattattgtgaattgattcgatgactaattcccaattgtttttctcttttcaggatctcgacttgtccgacgtcagccagttcgctggcgttttctcctcgcagcaacaaccccctgcttccgacgagtggaactttgcagtcgggaacatgcagcagcagcagcagcagcgttcgatgacgccctccgccagcagccgcgccgctgccgctaccgacgcggacggagaggatccaccgccgccgccgccacaccctccatctccatcggcagaggggtctgcgtctcctcctacgacgccggggacaccaactactggagccgatgagaagaacgtcggcgagctcaacgacgtcgactacccgctacttctccccgacgcccccgccccagcacccgcacctgcaccggcgccgccaccgagtcacaccccgatccggcactgccgtacaacggcacctgacaggagcgtgtcgtaggaaaaacggcgcgaaccgcttcctacgaaaccgcgatctcagtatcagtcccaggacatagcgctggtacccacggtgacaaatatgaatcattgcaatccttaaaataaatagaggacttatttaccttaacttaggttgcagctcagacagcccgagaatgcaaccgacgacacggacgaggcaaacaccaacaacagcagcagcagcggaaccaacggtctaacacccaataccacattcgacggctgggaaccaggacgaaaccctaatcttcacttcacttcatcttcacttcacgacggaggaactatatatacatatatagagcaagggtgagtactttcgtactcagcaagtcacgggaatttaggtgtttaatgcaagcttggaagagtggcaaggttgttttgcaaatcttttatttgaaatccattttgaaaccactaagtgatttattccttttcaggtttgggtcgaaaagagacttgcgtctcgattcaactttaagagatgcttttcaacaactcaattgataatgtaccgacctcccgggtcagatcattacttctcggctcccagagtcagttcacttgattaatcggctcccagagcctttttcattttctcggactcccagagtccagctgcccagcagcaaagcaatccgcttcctcttgggaagcctagtctatgatgcccgcaaacatcccgaatcacacagattcatttctgaccactcaggtcatccatctgccacataggctgatctggttacgattcccatcccacaacaacttttcacaaagcacaggcaaacaaatctacacaacggaaaccacctcacatccgcccatgaccgtgggcacggctgttcgaacagttagttaacctctgcagaggggtacactttacccacaagatacgaacttattccgaacacccgtcggtatcggaggttcgcaacaaagcctttcccaagccgacccagggttacctcatgccacatagaaggatcaaatcctcacataaatataggccattttagttttcacaaatcaaactccaaccacctcaattggaaatctggcaagcttcgcgttcttgccttaccaggaacccgggttggctccaaccgaccccgccccggcgttccccaactattggcatgcgaggtttccctgaaccgactagttacttagctagggtgtcccattccaccttgtggttgcactttgttatgcttgatgaatttcccacaggaatcggtccttatatgtgaatacgggacagtgccacgcaggcacaacccccgcatcgcgagttttcacaattcattttatttttaaacacaccgacaccacaggtcgggttttcaaggcttctcaaacccatttcccaatttttcgacaatcaacagtgtatgtgggatatttggtatacgcgctcaaagagcacggataccgaagtaccacaagggtggagcgacaaggaatcagggtagtacaacctataggaattagtgcgactactgggtaggtccgtcggtttggcacgcaaactgaggccaagcaagttaagtgtgtgactataataatgcaagttgcaaacaaaataataatggttttccaattataggagcaattggtcaaagggtgacttgccttgcttaaggtcttcacggagcttcatgaatcttcgagaaaacccgcgatcggcgaaaatccggtaaccgcaactatacgcaaacaaacaaaaacctaaacaaaagaccaagaaaaagaccctatttagagtaaataatagtgccattaaatagatctcaattttacggaattactggaagttgaacggagtcaatcggaagagcggttgggaagatatgaattttggaagtttaattggaatttctggaagacgagaaatggtttatggaatttatagaaataatattctcaagaatattattgacagtcactgacgtgcgggaccaaaggaaaatgattcatggaattttggaataaagaattttatttatggaacaaaggaaaaagatttattaaatcccttggaaaattaaagggatgagggatgtgatttggacttatctcgggtggcattggtgcggcccaaagggttgaaggaggctcggccgagccattgggccgggcgctgccacggggaggcggcccaacagagggggcgcgggggagagagagacggctcggtggaccgattccaccacgcggggtcccaggtggggccctcttgtcggtgatacggcccacggtgggatgggcgcacgcaagggcagcgctagggttcggggggaaagcggtccacgcgcggcgcgcgggtggacgcggtgtgcagcgggcccacgcgcagcctgtcggctctccgtggaccgcgcgcgagggtgggggacggagggaggcggctgaccgaggtcagctttgacccggtcgcgtcgaggtggcgccgacgtggcgcctacgtggcagccacgcgggccgggcgagaggaggaagaagaacaggagctccaaccaacggtggccgacggcggggtttcaccggagcacgacgcggcgatttgatcgagagggagttcaccggtacaaaggggagcacgagaggggttgagccaacggctcggatccttcgaagaggggctgacgacgacgaatcgcggcggcgcacgccggcggcgagaaaagggggaaatggcggaggggtgacagggattcaattcaaggcggtgggagcgtgtccggggttcaagaaatccgtttccggcatcggatggggcggaggagcaccgaggagggctagcgacggcggcggcctccggaagcgggcggcaatggcggcgaggccatgccgagcggcggcgaagctcggggcagtgtctacgcgcgttcgatgggctagtagagctaccacgcaagctagagagggcgagggagaacgaggaaggagaacggagggagtcactaccgagtcgggacggcacggtgacgagtggccgacggcgcgggagtgagttctccgttctcaggccggggaaggggaagaaggggggtgctcggagtcccgcgtcacgcgtcctcgcacgcaccggcctccccggtgcttggcgacgaacggcgacggcgagagcagagcgagcaacaataatagcgcggcggtgatggaagtgaaacgagaggaggattcgatgggaggggctcgggttttataggtggccgggtgaggagcttcgaggggaaggaaccgactcgggagaggcggtcaaggagaggagctggcggtcacgcccgtggtccaggcggcgacaggcggtcacgggcggtgtcgggcaaaatggaaaaaggagggggaaaagggaactctgttcttgccgaaacggggaatgggagagggagaggagagcgcgtgaggcagagagtcgcgctgcctccacgtcttggacgcacgcgcgtacagggtgggggcgagcggcagggcggcatgggcggccagggctgacgcggcggcgaccgggcggtctgccacgcgcgggcgagcgcgtgcgcgatgcgagggcgcggcggaattcagaggcggcggcgggaatcggcgccgggaggggagagagcagagagagagagcgaagacgggagagagaaagaacgagagagcgagagagctctctctcggctcggctcggcgcgtgcaacgcacgtgcgaggctgagagaggagaaacggctgagagagggaggtgggctaaggggggaaaacggcccacaacacccgagggaggtaaaatagacttttgcagggaaagctgatttggagagaattggagtttgtatttggattcaaattcgatattcgaactcgagggttcagggaggaatcaaggaagactcaaggtagggtttgatatttttcggaattgggagcgagtatttgccgaggattcaaaggatgcgattgaatttcggaatttgatttggagatttgagttgaaggaggaatttcgaggtggaggattttgatttcgatgagagggaacaacgggattgaattgagatcctggcacgacttagactctcacacaaagaacgaaaattttcgcaattaggattttgccgaattagtttttaacgtctcacgaaaagctgagcgttacacaccgccaccgccaccgccacggccacggccacggccacggccaccgacgatgagaagccgcaaggcgcggctgtgcgagcggtggatgcaggatggggaatgcccaaatgggaacggctgtcatgacccccacggcttggaggatcagataagggtggcagtgaagaagacgaccgaccgcggacatcggtgcacggactacttgttgggacagtgcaggaatggagtcaactgcactagactccatgatgttggtccttgatcgatcataggaatggaggatcaggatcggaggaaacgcccagtttcggagtctcgatgatgatgatcttactgaatgtctgaatcagatgttttgtttctgtttgtgggtggtcagatcgatgaaccactgcgtgttttctgttgttctcaggtcgatccgtcttgaacccatttggtttgattcgactagtagtgtccgtcctgagaaaaacttgatgcattgatcatattgttgatttgtgtgcttgaattctggtttttggattccgttatttccatcaagtattgttgcttgctttcctggttgtgttcggactcagatcaggtgagtgatatatttcaatatttgtgttcatactcagatcagatgaacagtgtgtgactggtgaaagagttggttgtagtaacagcttactcggctaataattgatatgcagtttgacattccaatatatgcacatggatcttactcagctagaaaggttcataaactgttctgagaatcgtcatcacatatatgaaactactagtgcaggaacaagagaaaccttgatggaacattagttggaactgaacttgtgaattacggagtatatctcagatattttcagttagatttataagtttgtacattttctgcatgcagccacaccatgcagggtacaattaaacctatctccacaaagcagtactcagactgaaccttttgtttaaaaaaaagtagtgcaactaaatttttgttttataaaaatcgtaaaatctaaaccgagaaacctctcggtttagacttaaccagctacgggcatgcactattcagtgtattagtagcaaccaaagtgaggtcgctggatatgcctaaccagcgacgatctcgttacagtcacgtccctttctaaaacttaaatgccatggaaaaaatttctttgcactccctggaaaaatttacaaatgaatggacatttcgatctcctacaaaattactatggaaatacggaatggcccatgtggcttctctgggagcccattcgtgttcctcaagtaaaaaagaccacatctgtgataaacttactttgggccgaaagcaaatatcttttggcccactaaaccttgcttcaccttcttccttcgcccagagcaaagcaagcgcgactcgaagcttctcaaccccgagctcgccagcaacttgcaccgtggacgctgtcgtacagcgcaagctacccctcgcctatataagacagcctctttctctctctctgacggtctgaccccaccacgcgtccacgcccccatttgaaatcacacgcctcgcctcgcctcgccctccatcgagatggccgatcccaacggccgccgccgcctccccaccggtgatccagatcaagccaacgcctccccgtcccggcgagtctccgccgtcgatggcgtcaccggcggcgagggcaggcccacctactcccacttcccccccggcgcgtacgagccgacggacgtggcctacggcatccgcgacgcggccaacgacgagcgggcgcgggcgcgggctcgggctcgccatgaccagggtggcggggctcatgaccaccaccacgaccggccccggcaagaccagcgcggcgaggctcacctccacgacctccccggcgagaagagcgaggtccccgacgtcggtccatctgaccaacaggggaaggaagcctccgacaccgacatggctccattggcggcgctggcaaagagatcctacgacgtcaacttcccgccgctgcacgagcaccgcgccgcccccttccccgccccggcacccgcattcgcacccgcaccggcgggcaccatgggatcctcttccgcacaggtgcagggtgacggggctcctgacaatcacgaccacgacccacgtcacctaccccggcaagaccagagcggcggagctcaccccgacgacctccacggcgagaagaccatcggttcaggctccgatatcctcgacgactccaagagaggaatgatcaacgccggtccccaacacggccgcatcaccacctccaatggcggcagcggcagcggcagcgacaagggcaagggggtctcctacgccggggacaagcccgcatctagctcgtcgtcctccagctctgctggccagcaggggagcgacaccgacaaaactccttcggcggcggcggcgagctcctacgccggcaacttcccgccgctgctgcccgcacccgctcccgtccccgcccccgcacccgcacccgcgggcgcggcgccatgggtgttaccaatgcccaccacaagattgcgctgtgcagcaagaggaggaaggggaggtgccacaacggggcagcgtgtcgctactctcatggcgaggaggagcaacgaattgtgccggagatgagagtcggcggcgggggacgtccgtgcccggagctcgccgccgccaagggatggtgcaggtacgggctcaactgcaagtattgccatggcggcgtataggatcgaggagcagcgccatgggaggggggagtccttcatcttacaacgctcgcggaggaaacacgtcaggttagagtctggatcatatgactgaatccatccgaatcatctggtcagctgttttgcttctgttgtggtcagatgaaccactgcgttttttgttgctagatcgagtctactctagtcatgcgtttgatttgattcgactcgtgaatccatccgaatctgaattcgaccaaggaccagtacactttttgtttcttttttggtcagatgaaccactgcgagttttcgttgtcagggtctaggggaaaaagattactagaacccatgaatttgattttgagtcctaataaacttgatgcagtgatgatattgtttactgttctgttatctgctcttcatctgggggaagattgcttatgaaaattgctttctggcagctgcttgggatttgggaccagtactgtttgtttctgttctggtcagatgaaccactgcgagttttcgttgtcagggactagaactcctgaatttgatttttgagtcctagtaaacttgatgcattgatgatattgttgagctctcgatccgggggggatattgcttactaacattgcttgtttgctgggatttgggaatgtggtgtactaatatggctctgcttcctctggaatccatttgagaatgttgatgcattgatatatttatttttttttaatctgcagttggtatagttattggttgttctgatttctggattcaatctagagtagaatgttgcttacttgggaacattctttcttgtttctggtcagatcagacactgcttatcagggggtctaggagaagaagacttattagaacacatatgattgattcttaaaattttgatgttattctcaattgtggtcatgaattctgaatccaatggttaacaaaattttgatcctattggaatgataacttctgatggtgatgagaccctggtctcaatgtgctgtcactctcacctgaatctgtgcttctccacttgagctgaatctgtgtttgttctgatatctggatttgatttgggggaagattgatcactattacaaagttgcttgatatgctggcacaggaggccttgatgttagcacgcgcaggagacatgttcacgtcaggatagagtctgaattcatcttaatctgaacgaaccactgtttgtttcaggtcagatcagatcagccactgtttgttaggtggtatagggagaagaagtctgtaattagaaagcatttgatcagagtcctaaaaaaccttgatgctgtttctgaattgcggtgtgaatcctgaaaatgcaacggttaaaatcgtgatcttattggaatgatcaggctgacgagaccctgatctcaatgtgttctcactgttcatcggcggcctcactgttctaataaaatcgtcaccttattagaaccccacagtagagctaagctacgaaatacaaatcactgtataactgaatcatgtaaagcgattattgatgacaagattctcaaagtacatgcagacagaatataggagtacttcctttcatacattcactttctagctatgatcaagcttgcctaagatcgagcgctactttctactaaagagaggaaaatatctccaaatatatgttcaaccaacagcagctctggaggttgagtatgttggataagtatagattattcagcattagacacatctccaataaagcatccaacagggaaccactcatcagcaacggcaacacagtaaggataatgaacaaattattcttggtagatgagacaagcatcggtatggaccaagccgtcgcagttgccaccgggtgtcacggctcgttgacagtatccgcaaaaccttgcagaggtggtctcgcttgcaagacgagtagaagaaatgtttccatggacagccttattagcttcgtcacttttgtcaactacaaagctgaagaaaaaaactcgaccatcctgtgagatatagtcgatgacaatatcgaagatcaacattttatccttgaggacaccaaatcttctgaggttttttatatactcgctttcttcacagttgtcaggcaatggaccaacggttgcaatgtgcctgtctccaatccggtagaaggatttaccaatccaacaaactcgctggcaaaggtacttggacatttcattagcaatcctcctgatgactttgttggttgtgctactctaatgtatacctgtataatacagaaaaaaaggttttccgattaattaattaaggttaaactgttaattaggcaatactgtagtaactaggtaggctaggtacttcctctgtttcatattataagtcgtttgacttttttttctagtaaaatttctttaagtttgatcaagtttatagaaaaatatcaaaaatatattctatttttaacacaaaacaaacatattatcaaaatatattcaatgttagttttaaaaaactaatttgatattttagattttgctagtttttttcataaacttaatcaaacttaacaaaatttaattaggaaaaaaagtcaaacgcttgtattaagaaacggaacgagtacgtaccttgcggccgttgatgaagtggtccttgtcggcgagagcgcgggcggcgtgggcgggttggatgaactggacgaaggcgaaggggcggtcatggcgcagccagatgtcggccacatccccatagaccttgaagtggcggcggagctccgctttgccggtgcccggagcgacgcggcccacgaacagcctcgcgctgatctccggtgatgtcctcatcgccgatcgatcgatgcgccggtgatctgcttagtatatattggtgttttgcttctgtctcttaattaatttccatatgcctaaccttgcctccatatatataactacagagagagatgatgcgagtcgccttccgattctgtaatggtgtcgtaatacgtcgtcggtggtgtggctgatcgagcgtgtgccggactggcagctcacgcagacgtacgttcgtgagttcgtcgacgaccgggactccaagatcttgttggcttcccctccctatgatcgatctcagacatgaatccacagtgcagatgccgttcacgcagtttgttgggccttgatcatcaagcaaataatcgccagaacacggatcgagcaggtggtgtgcactgtgcagtgcagcatgtacattttggttgagcactctgtaactgaagatcatatgcagagcgtttgttgatgacaaagattctcaaagtacgtgcagacatgatatactttctttcatacagtacagaaacagaattacactatgaaaggtacgttgcaatcatgcaatgtacagatacatccagtttctatctactaggatcaagctaggtacgttgtggccgttgatgaagtggttcttgtgggtgggcttgctttgaactgaaggtgggcccggaccaacgcttcgtttgtacatcgcaatttcggcccgctgggccggctacctcatcgcccaccgtcggatcgttcgatcaccgcctgtgaatgaagtactaataaaccctaagcagccgccgcctagccgccgccgtcttggtaaggctcgcctctccgcggatgctcgcaagagaaagtaatgccgatctcccactctttttcttcccgtgtttccattcggttcgaggcttcgagcagatgtgctgttgtcttgttgatcaggtgtcttcgatgagcgcgtgcttagatcgttttttattttattttggatgagttcatgtgtcatgttaataaaatataattcgagctcaacacaaattagaattgaatcagttatcattagaaataatctataatttatcgatgtgtcatgtcaatgaagaaaatcttagactcatagttggactgatgtacataggttgataggaacttgattagcaagggttagtatgtgttatgtatgcccttgataaatcttatcagattgcacaacttgaataaatgcttgtcccaagtgaataatgtatgttctgagaaactttcccacactaagttagtggcaaaaattgtaaatatagctattactatactttgagtttcttcagtggacaatcatacaatacaagtatggatacatttcaaaattatatctttcgaagcgttttctgttttttcccctggagtttgatatcggatggcagtgatttgacattacccgcgcttctgatataatccgtgaagcaaagggaaaataatggttgaattccttaatatgagccattcattcagctatcatatttcctctaaagtattagtgtttttgtctggttgatttacttcgactgctagatttggtggttggcagtgatgatacaaactttcagcttacaatgccagttctgcttctgagaatacatgacagataaagctgatatatatctgagccttttttttccattatgtgtttgtagtcatagcatccaaatatctaatctgcccatgatgagctgcccaatgattagagggtgtagttggctcaagttcctgtttatcaggaagaacctacttgcagctgctgcattcacatgttatcaacgggtttctgaggttatagacactccttattttgctcgtccatcaaattttggtgttgtactttcagggattcttttctccattgagaagttgcataatttttgccgagtttaactatccttccgcaagttaagtttctgttttgtgtgtaggctgaaaaagctcggagattgtgtgttgacatcagcttcgtctctttatgtctgtgagatgggagttaaatgacagcacgaaattccattctctttgggtgcactggtgcagtcctccccacctacaaggatcagccaccatcactgccgctgctgcaccattgcagctttcctttctggtctgtgttttcgtgttgccttctacatgttcaatttgatttcttttcatggatcaatggtatatgattttttttcctgtgtgttttgaatcgtcctctcttgctccttaaggttggggcaccaatatctccatggtgtcaccatctttgcaagaaggggatagatcgacgcgtcaagaaatcgtttctgttgccatggctccagtaggcaatacgattgttgcttgcgtacaattttttcttgacgcagactagtttcttttcttgtgctctgctgtaaaaattctgtttatatctgttctgttcatgcacggtgctaaccccgggcttgtcggattggaatcctctgaagaatgaagccccaatgcctgtgctagatccaccatgccattcagtgttgcaggtcatgatgcttcgagctcgtgattggtctgtgtcagcgtaatggatacatttcaaaactatatctttcttagtgttttctatttttttcccttggagtttgatggctgatggcagtgatttgacattacccgcacttctgatctaatccgtgaagcaaagggaaaaataatggttgaatttcttaatatgagccgttcattcagctatcatatttcctctaaagtatttctgtttgtgttcattagatttactttgttagatttggtggtttggcaatgatgatacaaactttcagcttaccatgccagttctgcttctgagaattcatgacagataaagctgatatagatctgagctgaatgtttttctttttctattatgagtttgtaatgtagcatccaaatatgaaatatctaatgtgcccatgatgagctgcccaatgattagagggtgtagttggctcaagttcctgttcatcaggaagaacctacttgcagctgctgcattcacatgttatcaacgggcttcctgaggtcatagatacacttcttgttctgctcgtccatcaaattccgtattgtagtatcagggattcttttctagttgatacacattgatttgctagtttttttttaaatggaaaattctgattgagcattgaattaattttcattgagcattatcgtgctgcttgctcttctgcaggaatctccatgatacaaaacaaaaccaaccctagatgtgttctattgctgacacagggagttgtaagtacatgttaaatggtggcatactatacagctgtacaatagacgcaagaaacaataaccacttacatgccatcctccaccctgaaatagaaaaccatttttagcatgttggtgcttcattttgtattccattgggatataaaaatggtagagaacaaccatttttaacccaattttgtattcctttgcggatataaatatggtatagattgtaacttgatatctggactcatttcgggtttggtgttcgctatttgttccacatggtacctggacgtgagtggttcatctgattcaatgccattttcattgatttgaaatcgcacttttctcacaattgcgctgattaacttatgaatcaacagatacttcggcaccaggatcttcgaaaaacttttccagtaaatcagattctacgcgcaattttcgagagtttgtcatt

SEQ ID NO: 18160 - DNA, 11267 bp, Oryza sativa
acacatgaggactcacatgtcatagacagcgagtggcaaataattaattgtcactttttaaaagtggccacacaagttaaatgtcccgcttttctaagtatcttttaataaatacagtaataataatagagctttatataagtttgggccccatactagtatgggccgcaatgggattgctatgcacatatagcccatgtcgcttgcggcacgttttgcttcgtccagttgagctagtttctgaatattattgctgcttctgtcgccgctgcaaactgtaattgttgccattgaattctttctttttggtgaggaatattgccatcgaattacagcctccgtcgtagaaaatttaacctctgtttatgaatctgaacttagactatgcacaattttctggtctaagatatcgcgtgttccaattaattaaaaataaaaggcatgcagtgaactgatgatccacgtcagagaattaatttgtcctgaataattacacatcagtgtggctgctgcactcaaaacaatacaaagaccaggtgcaacagaaagagacgtgcacaaaaatcaattggtctcttgcaatgttcagctatgcttgcttgaggtaagcaaggttggctggctctagcaaagctttcctgtcctctcacctaccatgaaagtgacaaaggaatgtgctcttcgctctgttcaatactttttttttctttagaacagctctgttcaatactccctccaccccattttaaatacagttgcggatttccgtatccaatatttaatcgtctatgtttgtttaatttttttattattagtatttttattgttattagatgataaaacataaatagtattttatatgtgatttatttttttaatttttttatattttttaagcaagacgaacggtcaaacgttggatacgggaatttataactgcacttaaaatagaacggagagaatacttctatgtttttttttcactccaaaagctttagacaaatcgccaaaatatagctgggggtgatgcatatatgcattcgtgatatcatttattattatttttttgttgccggtcggtggattagaccgatcaaatttcagtaagataatatatatatggggagagtgcataaaaaagtatcattcaattcgtccaattttttgttttaacactgttatctgacggcactagtttgtatgagaatcagaacagtctttgagtagttccatgttggctcaaaagtcagaacgtacgtgtacttatctggttcgtatttatacgccaaacagtacaaggctgctagtctgggtcaaattgtcaggtggctgcaagtatttcttttatagttccttacttattttttttctttctttctaagaagaagaaggtcagacggctgctatagtaaaacaacaatacaagagtacgatgttatgagctacgacaaaatacagataaaaaaagagacttattcttcagcttatgaattatatacatgatcttggtaaggctgtgctcagtgtactccagttttccatcctctgctttctccttttttaacacacttcctgaaccctttttttaaaacaaaattctacagaaaggttgtttcaagaaatcttattaattacttttaagattttatggctaatacttaatcaatcatgttaatgttttatggctaatacttagtcaatcacgtgctaatgagccaacctatttttcgtgccagagagaaaacttgtattccctccatccaaaagagttagacacattacttttgacactaagaccgagaaaaaaattaactcatttgtaacaaagatctatacatgcataaaatcaatgagtactacgtacgatactccttggatcgatcaaatatttaatttatctcttcatttaagtcttggatatataaaactacatatatgatcaatttaattgagaaccataatattaaataagtcaaacattttttggatggagggggtattgtctaacacaccctaataataatacttcctaacccagtcaactttgcgaccctacctacaactagctcctatcaccgtagctctagctagcaggggctcatccagtatgggtgttgggaaactcaagtcccatctacctcattggatcactattgagagaaaaggagagaggaggacgcaggaagaagagagagaagaaagtgtaggggagggaagggggagggggctggagaaggaagaaggaaataagcccctctctattctttttctagatccgcccctgctagctagtggtgtcagcaccccttgcgtcgcgctcctttcttcactataccaatatctatatctcttctaactatccttgtgtttctattgtccctactcctttttcccgcctagagtacccgccagtttgccatttctcgcccgctccattaccaaattttacctacatttgcgctaatgaagtggtcacattcacagagggagaagtagcatgggctgttggatttttatccaactacctggatcatgctaatgcttgcaaattcatgatgccaattaatatgatcaagctagacgttgtcggacgtttgattattctcccaaaagcgggcgttatttcatcagtttgagaaaattgttttagtacttggtccaatatttctaagagatgcaaagtccaagaaagattggttgtgacaccaacaacccgctatataaaacattgagtctcaatgactgcaatatcaaaaaaagaaattataaaatcaaacttaaaatgtgcaacgtagttggaattctagttgaaacattctcttcttatgtatgaaacatcaaattttacgactaaaacatgtgtatattttttcatcgtaatataataaaatgatcttgttgtaaacatttaattgtaacaaattcaacagtgtaaccggatcgacaattggataagtaatttagaagaaaaaatttttaatattagttgatagtcttcgtgcatgcatgtattcatagtttgagtacagagcatggcacatagagaaaagaaagagaggtgaatttgagggtgcccaaccatttgggttgtatctggcgtacgtccgaggctaggcatttttgttaaattaatatgtacttacaattataacactcaatcactcataatcccctataagatacacattgacaattattactgcctacaagaaaaataacaaaaaaaaatcaacaaagggcctctcggccatcaacatctatcctaatttcaccttcttcactcttcagaacttccctcatgtgggccctacatgccagtctcctgatttgtcgacagatttttttttgggtgctcattaattgtctctgctgcaaagcttaattctctgtaacaaattaaaaactgagctacaaactgtaaaaaaaaaatcaacctaattaagcatatatatgatcatagaacaagctcggatcggcgagctccatcaccatcctgtaaatgtcatcgttgcatccatccttgtagtagaaatcgctcggcgccggcgagctgagaacgctctgatcatggccgaatccggccatcgccgtcgccggcgaaggctccggcggtggcgccgccgccgcatgctgatgaaacactgtggtattatcattgctgctactgttccattgctcctggaagtagcgctggttgctgtagccaccgttcacgttgctcgccggcggcggctggagggtgttcatgtactcgacgacgtcgtcgccggcgctgtcggactcgaggctgccggtgatcgagctcgtcgcgtccggcaccggcgccggcaccgcggcggcggcgacggcgagctgcggctgcggctgcttcttgtgggtgatgttcctctggaagattcggcagatggtccaaacttcctgcatttttttcacgcacacaacaaaagttcagttcgtcgtcgtgctaacatttcggcacgttcgaggacacgtgtcagtgcgtcacgccactgtttccacgcacgtgtgaatggaaccaagccgggttcgcgggaaagtgcatgcaatggccgatcgacggcgacgtcgccggagatgaagaagatgcatgtaattaacaggttttaaatatcccgctatagctatttgagaagggttttaactaattatttactctcatatataatttagtcgctatagttctacttaacccgccgctatatctatctaagaagctactccctccgtccaataatataagggattttatgttgatgcgacacattctagtatctgtccagatttattgtattaggatgtgtcacatctactcaaaatcccttatattatggaacaaagagagtaaccgctagtaatgtcttagcacgctatttaaaatattggtaattaacttaccgcttcttggaggctcggaggaggggaggagcggccggcggcgaggtcgtcggcgggcggcggagggaggcggaactcgtgcatcatccagtcggtcttggtgcccttgccggcgctgccgcggtagtagacgagcgacttcttgaggccgatgcagtcgccgccgccgccgccggcggcagagcagattgggcggtcgattccggtggccttccagaagccggagccggtgacccggttgggtcggatgctgttcctgtacttcctccctcgaaggcagaagaagtaccattccttctcgctgcccaccgtgctcgtctctgcatgcatcaacatggttaattaattaatttgattaatccccacaagatttagcttttcatgatcgaatgatcgatctagcttatagtttgaaacaaaaaaaaatcacgtaaatatagatattattcatgttgttaattatatgtgttaattcttgaatttactcaaggcctggtcactaaatctgtcatgttattctattgcatgcaaatgaaactacccaatcttagctgataggaacatcatgctccaagcgcatgagcttgtagatcaccatgaactataagcatatatatatgcatgcatgctgtgattttttttctttaataagtatttggtgatcatgaacttttaattagttgaatgaacttactgaggaagtcggagggatcatgcttgtagatgtccatctccttgatgatctcgatgctcagccgcttctcggcgatcttccggcgaaggtagaacgtcactagctcctcgtcggtaggatggaaccggaatccggggagaaccaggtcatcatcatcttcctcttctacctcctccacccctcgtagaatcacatcaccagctccaagttcatcttcacaacccctcttcatctctgcagatggcaccattaattttatctttgatgatcagtgttcgccggccgttcgatcgaatcgtcgattcgatcgatcgcctcctcttctcaaacaatctaggagctagagaacgaaaattgttcttgtgttgttcttggaattaatatccctgtaaagatataggggagatcgatgaagttgttgagaggagatggccatggagccatgtatatttatatggctctgatggatgtgtatagtgagctaaactaagctgtctgttggtttgtgaaagctgcaagaggatggagtcatgaagtttcatggttgcttggtccaagtcacttgctttgacttctcttctctctagcaaccatgtccatatcgaaatatatcagcattggatgcatgtgtgtgtatatcctaatttttttttgacaattcttttcatttgaaataaatgcatatctcgtcatttatatagattatttgcccgtggtacggccaattgaatggcaaaaattaatatatgcaatgacgtagattaacagtgcctggtagtacggtgcgtgtttggtaaaagttgttgagtagagttttaatttaatttattcatgtctgttggctttattaactacagtatgttgttgttacggttgaaatttagacatgacaagacatgctcccaggcccgttcagccacgtcccgggagagacgtgccgccaaagtttactgagtcatcttgcagaagattaattaataatatcactacatggtttaatgtgactgccggcttcttaatggtgattatattgatcagtatatctttcttaaattcttactccctccgtcgtaaaatataatttctctatcaacattcttttcccaactaatcataatcctccaccattcaccttttccacttaccttcactgctcatccaatcacaacattccaccattcacttctatctactttcttaataactgtgttcaactttaaagcttcttatattatagtacagagggagtaattatttaggatagaagctgatgaacacattcgatcgatcttggccgtgggatagaacaacgacgatcgatattgcttagacagataaatacggaaaatatatagtgcaaaccacatattttcccagataaataagggccatatatggtagagagctaggtttgcaactaggtattgctctttttgataattcgtggagatgaaagctgatggatgatctgtttaattatagtggtaaattaaatattttatataataaattaaacaaagagcttatatacaaagtagtataatcaatgcgttagaagattaattttatattattagaaaacatatttttaagaatcatcaagcaaataatccgcgacaggatcgaaagtactcgatctgcataattggatcaactcttcttttttaataacagatagaatcgatcaagcctcaatgaaaattttcataggtggatatattcaccgccagtctagctagatcacgctatattatttacagtggttgatatgcataaataataatgaattaatcaatgatacggagtatccatagaccattgaattgaattaattgacattcttaggtggtatagcgcatctacttgttctttcttatttcatcaataatttactaaactaacacacaaagtgcaaagcatgcagtgtactgatcgagttgtgccttcgagaaaagtagaaagtaaatttgacgtaccaaccaactaccaagtcgatccgttcaccctgtcaatcaagaaacccaccaggccaacaagtctcaaatttttttactacaggatctttgcagaagagaacaatatattttctatagaagactgaatgcgatgttttccaatacaacgtatctagatagatttcttattcagatacattgtactaaaaaatattacattcgattcgattctatgttcttgtgtttgggatggaggtagtactttcaaagacaataagtgtatgcatggttattggtaaagaagaaagatcagaattagcatgtgtagaattctccttgcccgtatatgctatgtgaaactattttcttgcatggttgttggagacaaagacgaaagggaccagtataaacagtcgcaagaaggagtcaacttcatcaagatttgatggggtccatttgtgagaaaatgtttttcgacattcaattgagacacgtaacatagttttatgccttttggtgcaactttaagtattgttaattaggagaatatcaattttgggctttcttctacttacactcctatgatgttttctacttactgtgcatacaatctagctagaggctagtaagatcatttcagcatgaacaatggcgtgacgtcagcactgggtgtcaattaggattaatttgtgataatgtgaaggcaagattaacagaagagatcaatattttgtctgttgattaacaaatgttataatatgcagcttcataccatatatagcgtcatatactatctatatacttaaaattaaataattgaatgtacaaatttaatgtaaataattaattaactaagcatacaatacgctgtacaagttgtctgtgtatcatctggccggtatgacatgaaaagattacatagacgactaatctttaaaccgttattcatgcatgcatgatcttccatgtggaattaattatggttattaatacaatgagctatactttacacgatttctcaaacaatattttagttaatttgctatttttaatttatcattacaaatatatacccctatcgtccacaaatatatataagggactccaggttgtttagaagagtttaacgttaaggcaaaattgctttgttgcccctaggacttgattgagaaaaatcacataccagtgagcaataaatgcagcatagttggatgaattgaaaaagtagtactaagaaatgtcttatatttgtaaacagattttgaatttaaaatcctttatatttgtgaacagagaacactaaaatttaaaataaaagtattgtattttttatgtaataatgtagtctattcggttattttgtttatgaaagtaaaaatatgactacacatcaaattaaccaaaattggttatttccagtcgattaatttgtttaagttggtttttgcccacttagatcatacggtcaatgtcttagaatatcatactttactacttaattaacattctgaaaatgtttttttttcgcatcaagatcatatatatacactatatttcccatagtttgttttgtctaaatttttatatttaattaaaatattgttttgaaactaagccaacaatttctggtaccaactacagtatgtccatgacttccgaaatggagcttagcaacaaagtacaagccaagcggctgatgttggactaatgcattattatcctcgctagacttttggctccacagattttccataaattgatttcctccgtgatcttggatagtctcttagcctcacacatgctccctccgtcccgaaaaacaaatctaggactgaatgcaacatattctagtacaacgaatctggacaaatgtatgtctagattcgtagtactaggatgtgtcatatccggtactaggttggttttttaaggatggagggagtatccttgtttttgaatattcttctctttcactctttccaagcaatctacacaaaaccatcaccacacacacatatatgcatcacagacctattgatcttcaaagatatgagtttacaaaaagaggaatcagggtgataaaacaaagtatagaaagaagtttgggagtaggacaataagggactgtctactctacatttgatagaaaaccttcaaatacattgtaaattttagaccgttggatcactttaagatttttgcaaatcccccaaaccttgtcccttctccttttttccccctcttagctgccgcacgacgcgcaagagctcgacttcctgatgtctctttgacgacaccgcttgagctcgccggctggccagaaggccccaacgatgcctgcgagccccccccccctcccccgcgcgccctctatcttcctcatgaatgcggcagtggtgtggtgccctcatcctcaccgtcttctctgtctctaacaactccccaccacctaatccgtcccggctacaacctcttaatcacaaccttgctttgccccccccccccctccaccaccctcctccatcccaaatggcttcggctctgactccggcgccttgccgccgtccaaccccgggccatcgcctcccacaaatatcacactaagcctgactctcactagtcgagttcatcatcgttggtcgtcagtgtttatcaaggtcgttggagttggaggaaaagtccatttgagtacaaatcatgaagcggatttgaggttagaaatttgcaatattgtatctctatttttctgttggatgttgtttagcaatttcgaaaaaatatatatgaccggttgatgatgcatgagtcaatgtgcaatatatctttcaaggtacagcgagagattgtgaaccaaacaagtagtttatatggaatcttgtgtttctgctagttatggctcacgtgccaagcaatttgaagatctgaactttcgtctgatctctctcacaaatacctgtcaatagccatatagttggatcaaaaatatatatgtccaaagaccccacatatttttttctactttattttctctccaatgtaaatcacgcaagtggattgtgttcgattggtcaatggagcaatccgtgattatataattgcgatcttggttgatggatttttccatggatgaaaaagaaaagacaagctatataagaaatgtcgccatggtaggtaggaaacctgtcagtgtgttcaaggactaaatctattattatcgttcccacgtgtggctagagataagtcaggtaattaagcagcaaactagtcatttttagaaagcccgttatgaccaacaattgataaattatttataaacatgttgttgaaaaccagatagaaagctgatgacttgtatcgattttgagaggaatcgtttgtacgtacacaagcatcttttggttcccatatgctcttgtgggtctaatacgctaatgctacaagacagcaacattgcacttctagttgactaaactcaccttgccgtttgacaaaactttctttggaagcttatggaattcctgtagaagttagtgtgtttagtagtatatatgtacatattaatgtatttcaaattcttatattagatgtataaatatcatatgggaagacaatcattttgtctcaaatgtactttcgtaattagtattgaattttgtaaatgtattagataaaaattagtactagtttataaaattgtaatctggactgtaccgatgtgcaaatcaccccgactgtttgtttgacagttatttggtcaatgcatgcatgggctcaaagttgtagcatgtcaaatcacacttctagctacagtagcaaagccagtgaccttgtcgagcccggatgactaaaatcacttttcgatgatcaactaaattttaggatttatttgaaatgtaggaatgaaaaaacaaataactttaatagaaatataagtgtaaaatagagaattgtaaaatataggaaaaataaatgaatgattgtttgagtagaccaaaaccggaaaaaaacacatgaattgagtgagatcgaaatagacttaaaaagaaatttcgaaaaggttgaaacgtttgataacttttctctacaatctaaatagactgtccattccaaaataaaattaaaggatgggatatgatttttttcaaaggtattcttaattaggatttttttatgtaggattgaaatccttaaataggatctta

SEQ ID NO: 18161 - DNA, 653 bp, Oryza sativa
tcctctcccgcggccgcaccgtacgtctactccggcacgccgtcggggctcaagaccttcttctccgtcttcgccgcgcccgtcccggacaacgagaacccagccgagagttcgccctcgacaccatcggtgagctcgagcaccacagcacgacggcgccgccatgctcgtcgaattcaactccaagtggcaatcatcgctcggcgctttcctcatcgatgccgacgtacgcgaacccgccgtacgtggaggtgtgggtgctgatcaagagggcgttcaccaacacgaggcgaatgccggagctgttggtgatgcggctccgcacgatcacggtgacggggttcatcctggcaaccatcttctggcgcctcgatcgacgacacgcccaagggagtccaggagcggctgggcttcttaattcgccatggcgatgtcgaccacgttctacgtctgcgccgacgcgctgccggtgttcgtccaggagcgccacatccacatccgggatcgagacagcccacaacgcctaccgccgcctctcttacgtgatcgccaacaccgccgtcgcgttcccgccgctggtgtccctgtcgctggcgttcgcggcgaccacgttcttcgccgtcggtctctccggtggcggtgctgcttctccc

SEQ ID NO: 18162 - DNA, 1292 bp, Oryza sativa
tgattggaagagttaagaaggttttggaatatcttctctttgcagccaagacactagcacaaaacaagtctgcgaggagaggtcggagctgtgctccacgtcttcaaagcatgtagacatggaagatgataatgtggataaagcttgcttaagtgatacagatccaatacccattactgagaacatagttgatttggatgatgatggagtcgatatccctacaattggggtcacggagtggaataatcctcattcttctgaagtatctgatgtaagagaagtaaccactgaacctgaagataacagcttggatattcctgttgatagccaaccagtatctgagaatgctttccacggttaacctggcttgtttctattcttaaccccgttggcttgtattctatgttctcattttagttcattgcaaacattcatatattcaaattaaagctcgctatgagctcatggactttagttccacaacgtgttcactgtatccaagtggaataaaacagtgcaattgtgggtgtgtacatctgaaagtccatgtttgtcaacgtgattcagggtatcaggatagtgctctgaactaaattcacatgagctgcataatgcatcctgttcgagtattaattagtgacatctattactctttgcttgtatcatacggagtatatataaacaagtaatgaatgaacatcttgtcttcctagttttctttaataaaaaaggaagccgtcgttctcgtgcatttttgtggagataagtactcaaatgccctagctatttctctaatttgggggtagtgtctttcagacctatagtttcatttattcgaggaataagcgaaacggcatatttacaaatgaatagtaatttgtgaataaaacttttatatatgtgctcttaacgatctaaaagcaaagactgaaaaaataaacttatgaaaaaacctcaaaactaattctaaatttaaggttaaaaatttaaattttggcggatacgcatgagcgaaaacatgatgcctttctgtctgtaccttcaaatgaaaaaccaacgtagtgccttctagagaaaaatgaagttgtttagtgcctttctgtctttctgtctttctgtcttttttggggacaagttgtttagtgaaatttgtagctagtaaaatgaagcaatgaagcccatttttcatcacctgctcactaactatcaataatttactgtagacatcatcacaaaggaacagatcaaattaattgggaagacaagtaaaaggttggtcaaaaggaagagat

SEQ ID NO: 18163 - DNA, 6939 bp, Oryza sativa
ttaccatattggtacccagttttgtatgccattggggatatcaaaatggtgtactagattgtaacttgttatccggagagttggtaactcgtttccggttggtgtacagtacttgtcctacttggtacctggacgtgagtagttcatctgattctgaaacaatggcattttcattgatttgaaatcgcacatttctcataatatgaaaattaatggcattttcatttttttgagtcgcacttcttataattggataattaatttcgttggcatcagacctgtactgtacacccaacttatgtcagttgattaactttctggtcggttgatggtacccgtacgcacggaaatctttattaaatgacgaggcgaatttcttccgcctggcgcatgtgttttgttgttgctgtgctgtattgcatatagatatagtagtaaatagtttcatattattctactttctccgtttcacaatgtaagtcattctagcgtttttcatatttatattgctccgtttcacaatgtaagtcattttagtatttttcacattcatattgatattaatgaatctagatagatatatatgtctagattagatagatatatagatttattaacatcaatatgaatgtgggaaatgctagaatgatttacattgtgaaacaggggaagtaataataagatatatgttcaccaaaccagtataacttgacaataaacagattcttttgcaccagatcgtttgaaaaaaaaaaactctttaagagaaacaaaccaatctgcttctaattccattgtaaattgccgcatatttttttgtcggcacggtgaccacaaaacgtttttcggtttgatgactacaagagggtaagtactaagtacactgtacacacccttgcagttcggtgagaaaccaaccaggataacaattctgaggatagcttgttggatttttattgtatactgaatacatcaacaatattacaatcttctaaaatcctcccataatatgaatctcaagaattgaacgaatgaccataagcgctatattacatataacttctgtgagtgagcaattgaaagcccttgatgatgaacattcctaagaatatatccacctaagtttttaagttttcagccaatagatgctacagggtaaattctcttcacaaaaccatggcctgagggggtccgtagccgctccggtgcttcttctgccatgtccaggcaaccctgaggctctccaggagatcggtatgttgagcagtccagttcagctcgctgttgatctttgcgggatcgctgtacacttcggcatagtcaccgggtcgacgagggaagtagtcgaccttgatgtcaactcctgttgccttcttgcaagcttcgacaaattctttcactgacctacctgaacagccaagtggaatgaacatatgttagctaattaagatgctgaaaatgagtttgcattcatgttttcccttataatgaacttatgatcataatagaatacgatcttgacctttgcctgtgccaacattgtatatgccaactttgcccctttccgccttgttgagcgccttcacatgggcgtcaacgaggtcagtgacatcgatgtaatctcttacacaagtaccgtcaggtgtttcatagtcagtacctttaacctgtaatggaaaatgctattaatcagcaatccactaaaagctaagcaatccttataaatgtgaatctcaatgagtaagcaataggctatgctagcagcaatcagggcaccctgttcttgaatgtaataattgaaatactgggagtgaagatgtaccttcaaaccaggaattatccccagtgcagcatcaaagcatgcaccagatatacggccatgctcccgtaattcaggttttggagcctcgccaagccttccttcagggtcagaaccaatgacgttgaagtatctagaagtattaggttacatattcgtaagtcaggaatcaaatggtggtttaaatagtgggtttcatgcttttgttttgtaaacggtacataccttagaatcatcacagccatgtctgccttcttggatttggaaaaatccaagatgatgtcctctgccatcttcttggctttaccatatgggttgatcggaaactgtacagtaggatttggtgagcaaaagccttcagcattatctgaaagtaaagaggatgcagaagcaacagctgacctggggagttccttcggtgataggcatcttctcgggttctccataggtggcacatgtgctagagtagatcagggttctcacattgtgtgctgccatagcctctagcacaactaaagtgtttgaggtgatgttatgatagtacctgtttaaaatgttttcagtatctcgtgtgtcttgtggagaggtaatttgatggacaatagagactttagtacctcaaaggctcaagtgtgctctcaccaacataagcgacagcagcaaagtgcatgacagcatcaaaagcattttctgcaaatattctattaacctaagcatgtgctaaggaaaaaagatctttcaaaaaattccttcatcatattttgccgcattttgaatgaaagatatatctctacagaaaaattcgatttgagttattcagagaaataaatcaggatacagcttttggatcgcctaaatcagcatagatgaactgcaaccgcccaggctctgaaaacaagttctgaagaaccttgattgcccccatatttcctcttgaaagattatcctgcagaaaccatataggcacaagcattccataaattgcactacaacaacaccaaattcgaggaagaaatggcaacacaaagtcgcgaagaagtaccactatggtgactctgaaggaatctttcagcagccgaagcgcagcgtgcgaaccgatatatccagcgccgcccgtcactagaacatgcgtgactccgggttcatggatggagaactggacacatcacacaagtgaagagtgaagacaaatgttagctgcctgaccatgaattgttcatggcaacatacagagctgctgaaaaacatctgaaattgagttaccacactgggagtcctcctatggcagggcggctgtgtgagcatgacgacgcacatggcggtgaggagcgccaccatgaggatcttactgaggtaccgcggcttgcgcttcggatcggagaagtccatgtctggcacaacatgatgagctcaaattcagaggcatgtacaacaaggggaaaaaatatttctagcaaaggactaaaattacagagctcaaaccataaaaaaaccaaaattcctgttgcacaagcaacaactggacccaactatgagacaatcaaaaggcacttgcagataattttagagctatccaattacatgaaccaacaattatcaactaattcagaaaaaagagagaaagagacaaggttatcagtaagatagggtgagatggaaggaagcagacagacctgagatgaaataccaagatctggcaggcctctgctggggcctgttcctgttggtgggaagcatctggagcagcagcagcacaccaaatcccctcccagaaagaatcaaagttcctcggagacaagaacgccagagatgattcctcctgctcactgccggccacctacagcggcatcgaggaagaaaatctcgtcagaatcagcgagaggacagcacacacgacgcggccacgggtcgcaggagcagcagatccaacaaccacacacacgcaacttcaatctgatttaattacagctaattcaccagcgaaaagaaagcagcatcggcgctggcatggatggatggatggagcgatgaaattgcagcgaacacgcgtaaattaagccgccaagaaaaagggaaaagaaaagaaaaagaaagaaaagaaacagcaagaagaagaggaaggtagcttcgcacctagcttaccagaactcgttcaggatagcaatggcggcgaagcagatcagaggaaaagaaaggtgagctttaacacttacccggactagtagcctaccacctgctgggacgacttggctggctgcctcggcgacggcggaggagaggagggaaagcaggggagccacctacttcccgaggcagtggcggtggtcctagctctccctctccctctctcgttggccgcgagaagaggcgaggcgaggtgaggttgttgatgaagtgagaagaagaagaggctttgaagggaggaggcggcgctggctgctgctgctgctctgtccggtcgaggggggagtggggcccacgcggaggaaggggacacgtagcgtatgcgagagggggtgacgtcgtcgcgtatttgctgggccccacaacctcatcggtcggaacacgtctgggagcactacgaggaggttcaaaatattccgtgtctttcgctctttttttttgttttaataataataataataataataactggggaagaaaaatactgctgcactatgtatatatcgccgacacgcttccactgtatttgtcctgaggagtttatttttagagcttcttttatttatgctaaaataaatttgttgttcgtaattattatatagaagtttataaaaggcaaagataaatgtaataggaatagataaagtgaggaataattatattggatttaataaattaagttggaatattctagtcttttttttattggtatatgtgtgggatgggtgaaaaataaacttattttaaaaggatggagtatttctaatccgtgtgcttatttgaaaaactttctatatataattgtcttatatcgctagaatttaatttttaaaatttttaaaatttgaactatttatttacgcccttcaaaatctatcataaaatctgaatatagtacctagttcgaacggacctacgtactactacatatttgcatcttcgaggttcaattttctttttctttttcttatgggaaattcggtctcgattggtactagtagcatttttaccgagagtggatcacgagtagagtgtactgctgtgtttgttaaattttgagtgtatgacagtcggcttgttccaagaatccaaggacaagtttcactttttcttatgtactcctaaccaacaaaaaccggcaacacagtgtgtatagtggagtacataagaaacttctgcaaacacatataggttctatttagttcacaaacaaaaatctttcagcatgtcacattgaatatttagacacgtacatagagtattaaaaaaaactaattacattgatagcgtgtaaattacgagacaaatcttttaaacctaattgtaccatgatttgacaatgtggtgctacgcaaacatttgctaatgatgaaataattaggcttaataaattcgtctcgcagtttctatgcagaatatgtaatttattttgttattagcctacgtttaatgtttcaaatgtatgtccgtatattcgatgtgacatgccaaaagttttcgatcgcgaactaaacatgctcatatactactacgagcataggggcactgtagagtgttgacttggcacgacgaagaaatgaataatactaaagcgttggacgagcctaacaaaaccacttattatcatcgaattagtgggacaattttgttataaaaacatgattccaacatgtaaaccatgagcagctagcaggcatgacacaagatcaatgtcttacccggaaactacttaaatcaaccgtgtattccaacacaaaacgacagtcggccaaagactcgtggacataaagcccgagcagccacatatactatggattgagatcctctaacttacgtccttttaacttatgccatttttaacttataccattgacacgtgtgccatctactcagtagacccacatgttagtgactcaaagttagaagtaagtaagagaatcctcttcatatgtactatctaagagtaaaactcgcttggcagcccctaaaagtaatgttaaagaatgtacacgtgtgggtttgcttggtttgctttaaatctcaaaactaaggtagtacattttacgatcaagatatacacatcgagtcgatctatatcagttggaaaaggtaaagtcgtcatctatcgctatatattatgcgtgttatcttctagattattttttgtatttacatacttttatcctttatgtatgtcgctctctatttacttttgatttataaatgatagttcacgtagaaaattttaatatgcctgaatttgagtaaattacacaagcggtccttaaacttgtaatgaagtttcacttaggtccacgaacttgcaaagcgcgcatcgaaatccttaaacttccatgtcatcctggtccaaagtctggtttgacaccgtgatcttgcctatatgtcatgccacgtggtcgatgacatggctaatttttctttttccctttttttcttcccatcttttctctccttcctcacctcgcgtggagaaaaatgcggcagaagggagaggaaggaggcaaagtggagaaaaaaagggataagaagggagaaaaaaagaaggaagaaaggagaaaaaaaataaaaattccatgtcatcgtccacgtaggtaagaccacagtcaaacgagactttggacccggatgttacattaaaccaagtttaaggatctcgatgcgtgttttgcaagttcatggacctaagtgaaacttcgttataagtttaagaaccgctagtgtaatttactccctgaattttatcgtgtaatgcaattcaatgcacgaattaattcacaatgaacttgtgtagaaaaggctcttactacaacaataacaacaataagagctaacaccatatgatgtttaataaaatttaacattgttatttcaaacaacattaagatccgatcatttcttgcctgtttcaaagtgca

SEQ ID NO: 18164 - DNA, 10610 bp, Oryza sativa
aaacctgaaaaccttggcctccattccaacaagagaagaggtatatccaacagagaaaagcttgtttcctagtcaccttaacagaaagaaaaattgaaggttaatcagaaaagtgagcacgccaccagtatttagaattcaatgtactatatacaggagtttaggtggatcaaatctttacataacactgggatatattgaatagcatacgagtaagaacaccaaaaagtcatgtcccagtatctcaaatatgatgaaaggtgccactctggtggtctttgcaaaataaagagaagaggaacctgaaagaggccacactcaattcctgaacaatgaagacggtgacaagtagcactctccaaagcatcagtgtcttgtatcaaacagataatagaaaaaacatatattccagattagataacaacatgtcctaaatcttcaaaacacctaaaaccctcttatgatcgaaggtgtgaaacaaatcacaatagctgtatactccctccgtcccataaaaactcaaccgatgaggggatgtgactcctcctagtacaacgaatctggccaaccctctgtccagattctctagcaggggtcgcatcccctcctaggctgagtttttcttgggacaaagggagtatgttgtgaattaaggataggggtcgccacggtgactcaattactaatttggacatggacaaagtcacactgatggcttggtgagtagtagtgaggcacagatacacgatatagtgtttttggtccaaactagaatcattatagcagctgcagaaattttactttgatgactggaaagctaagcaaaattcctattaaggcgccatacagcgatttttgtttggtactacaaactgaatcattctaaccttgcaaaaaggaaaaaaaaatcaaaaccattgtaaaatgggaatcatacacctgtctgactcacgattcaataatctatgatgtcatttcccatatcatcttagactacaaacacccctcctaagcaatgtacttagtatcatactagcggcagaatgttaatgcatcactcccctagttggatcttttaggccttgttcggttgcttgagaattaatccccaaggggaacctatccaggaaggggttgggtgaatcccttccatatcacccaatccctgtggggtttgaatccctttcctgtttttaatccctatcataaaaccatgtgcttgttttggcagggatttcacacaaagtagcatgttgggattccaaatcccgctactttgccatactgaatctagacccaaaaaactcctactccttccttcctgcactgcaataataagaaatgagtattcagtctgctgaatcaaagcacaaacggtagctttgattcagacagcaaaaggcacattctgatagcatcaaattgatattagtatttggtttatgttgatatctccgaatcaagctcgaaaaatccatttgtgaaccgagctagctagcttagcttgcatttccgtactccgatccagccaaagaaacaatactagtgaatccgaattcgaattcgtgcattcatggtgatacaagtttgggatctactatctatctgatgcgatgacaagaagatagaggtgctaggctataagaatccgaacaaggttgagacaaaactcgtcagtcgtcgaaggcagcggcggcggcggatgaggggtcggcgaggtgggcaaagcgggcggcggaggcggatgaagctagctacatcaaaaatgcacaccatgttgacggtggatgaggaggagcccttgcagtcggagacggagacagaccaagaaccgaggatcaaagacccaaaaaccctaggtaggacagggagaagagaggggaaggaagagatactcaccggtgagaaggtggccagcggagggggcggtcgccggaggagagagcaccgccgccggggagagctccgcgtcgctgtcgcgccgtcgactcccagtcgcgtctgcgtcgccaccgccgccgccgctttcccctacgcgctcctcgtctcctccgcgcgagggtttttttagcggtttcttacccggcccaggacggggtcggcctggattggaataagttcacctaacgtccctcaacttttacgtcgagtctgccgaggtccccaatacgcaaaaccataaacctctgcccctcaactatcaaaaaaatcccgaggcagtattgacccaaatttttaccctttttgctgacgtggcatacggcgggatccacatgtcccttgcctcctcgcgcgcaccaacgatccaccgctcgccgtggccatgctctcctagcatggcgccgaccttcgcccgtcctgcatcctcctcaccctcctcccggcgctcttcccaaccttccctgcgcacagccgccacacgctctccgccgtcgcctccatgcccacgagacggcggggagatgtgcaagatggcgcgtgcggtgcggcgggccaacaagttgtggtgacacaccatggaagccgcggtgaaggaggtgctgacgccaacgcaagacaaagagttcctaaagaaaaaagaaaaagaaaaggagaagatgagaagagattatgctgacatgtggaacccaccgtatgccacgtcaatgaaacagggaaaaaatgggtcaatattgcatcgggatcttttttgtacgatttgtaatagttgagggatagagatttctggtattgcgaattggggacctcagacagacagactagatgtaaagttgagggacgttaggtgaacttattccgtcttgattcaatccgcgatgggcttaaccgaatgcacatttttatgtgggccgggtttcactccgcgtctgtccaatccacaggaattgcagcccaatccagctcgttctcaggacaaccaaataaggacctagaggggcagtttctgaagcaaaacctgcaagatgtgtagacgaagttcccagtttgaatgcttttgtagactaccggtactacggaacttgttgtaaacatgaagaatgttgtctgtgccgtggtgtttcagtcacgacgaataggtcaaattgtaggtttgttttggttactacctggatagaagaagcctaacatgatgcctccttgtgacttgcctaaaaggtgtttgattggaggcctgataaattgagtagctccaacgcatcattagcatgagtccggcgtgcgaattcggacgcctgagatccaggcgaaactgctcaactttttaatcacaagagagttctgccgacatcttctcgaaaagcaaggtagaaggggataagaatttcacagctagcaaacccccattccacaaagctccatgactacgtcttagatttctctatcctgtgcaccgatggatctgacggcggcgttggcttgccgcgcacgcgctcaactcatcaccgaaacaactatcggcgtcttttcatttatacttatgcttctcagccaaattttaaatttttaaccttaatttagagttgattttagagttttttcatcgaagtttattttccagccattacttttaaatcactaaatacacgcatatgaaaattttatttataaattacttttcgtttacaaatatattgtttggtttattccacgaataagtaaaacgatggggccgatcgcgggaggcttgcccggtcaggcaaaagctacgacaatatcagtttaagtctcgggcgtgcaactttctcaggcacatgctaatcaagcaaccaacccaacacggccaaacacgcatgtttcaatcagtgacaccccctgacccggtgacccctgtgacaccatcagagctctctaactcactttcgcaaccaactagccatgaaaaacattgacagaggcaaataaacaacattaaccttgggggcatcactacccggggaaaaaaaaacttggggcagatcctccgctcgatggaggaatagtttatctttcaatgcaaagttgccaaaatagcactgactgcaaatctctaatgcaaagagccaaagcctatatcacaaagcagacagagtaaagaacatataattccagacaaaacagactgtacggttggaaccattggattgtcaaacagttaatcgtgctatttagttattttgagcatacaagaagagagatcttttagttaatagaacaaaattataccaccaacctaactgaaccagaacaaactgatcacgacaaatgtcagcaaatgaagaagacaaggatacaaggatttaatagaactagataaattaattactctgaagtgcttcaaacaaagggggaagcgcgcacaggttacgacaatctaaagggccttaacatgctctcttgaagaattaaagcagagccaacaagtaagattcgccaatacaaagacacggaaaaatgagaatatgatccctaacaagtgagtattctagctagctaaacaccactcctttctcatcttcctacgtctctaccgcatcttttcctgccaagatagaacaagaaggttagatcgatggcaatgatgtagtaccatgttgcttgcttgctgcaaagggaaagaataataattttgaataccagagttaaaacagaattaagcgtttggtagcaacttcattagtagagaattacctggacgcgactgctaccagtccccagatgatctcgttgcatcttccttggtcgaactgtaagcacactggcttcaccgcgatccctcttattgggtggaataagctggcacagattatgcttcttgatgtgcttgaatatatcagaccccattagggatggagaaccagcatgccgccaacgaggaaggtgccaagctgacacaaacttgcaagtcaccatgtcaacgctgaaggcatataggctcctgtccttctcatcctccgcatagaactcacccatcaagagataaacgacaccatcgtcctcagtgctcagcatgggatgggtcggcgaagtgttcgtcggcagccctgacctcctgaacccctcctgctcccacaatctcccaacacggatgctaccgaccttgcgccactgccctgagctcggcatcatcaactcccacatggacagcagcatgttgtatccgggcaaggtgttgtatccctcgatggacacgaatctgatcgagttgccaacgcagcggatatcgcgatattgcgacggcggagcagtgagatagagcgagtcgaaatccacattgcaaccggtgggtagtgcaatgtaacggaattgcacgtcgtcgttggtattagagatgagatcgtggcagctgcaggagaggatgccttgtccaagatccacccagtaagatgaaccttggaacgagaaggtttgatgagcattgaacttctttggcttctcggagcggaagattggccttctggttccccagcaatggcggtcgaatggtgccgatgacggcagcaggcagaggacttgcggtagatacccatcgtcatctgcatccgcgtccatgtccattgcaaagaggacaaggaggtagccgtcgccatcggattgccggagagggagcggggtcacagaagggcggaacctcatcgggacggtggggaacatcttgagcgaggcgttgtccgtggcggcgtcgcagacgaggtaggagttgtcgccgcgcgtgccgggaaggcaggaggagagcacgaggaaccggggtcggcgagcaggacgccgccgaggaacccgcggcggccctcctcctcgtcgtcgtccgggtcgccgtcgaggcggatggacaggcgggagggccgggggggatcggcgacgagcgcgagcagcttcaggccgtcgtcgtcgaacggcgacagctcgtcgtcgcggcgcaggccctcgacgtccgcgcggagcgtgacgtaggccgtcgtctcgcacctgatggctgcccaccccgggttctcctcctccccgtccggttcgtggagacggacgacgggatccagcaccacccagggtggcaaagagcgcgcctccgccgccgccgccatggccggtctgtgttttcgcttctttctgtttttccctcttctccgagtcggaggcggtggcgttgaggaggggatcgatttcatttttttattttttggcgcggatcgtatgtccatcggacggtggatctgcgactgcaagaagcccacggccacgtgtatttctatttcacgagcgcccgtgaatccacctcagcttcggaattggtttagagcctacaaattcgatttcgttaaaaatagagagagtataaaatttgctaaaataatggagtagttacgacttacgagaacgaatttgtaggctcaaaagacattacgtctttgtccgaaaccgagcgtagatcagccatggcggcggcgcgctctttgccaccttgggtggtgctggatcgcaacgcctttctccacaaaccggacgacgaggaggaggaggacccggggtgggcaaccatcaggtgcgagacgacggcctacgtcacgctccgcgcgaacgtcgagggcctgcgccccgtcgacgagctagcgccgttcgacgacggcctgaagctgctcgcgctcgtcgccgatccccccccggccctcccgcctgtccatccgcctcgacggcgacccggaggaggaggaccgccgcggcttccgcagcagcgtcctgctcgccgacgccgggttcatcgtgctctcctcctgcctccccgacacgcgcggccacaaatcctacctcgtctgcgacgtcgccgccgcggacaatgccgcctcgctcaagatgctcccgactcttccgatgaggtttctcccgtctgtgacctactgcccgcaccccgtccggcaacaacccgacgccgatggcggcggctacctccttgccatctttgcaatggacatggacgccgatgcagaggctgacgggtatctaccgcaagtcctctgccttctgccgtcatcggcaccattcgaccgccgtcgctggggaaccagaaggccaatcttcccctccgagaagccaaagagtttcaccgctcatcaaaccttctcattccaaggctctgcttactgggtggatcttggacaaggcatcctcttctgcagctgccatgatctcatgtctggtaccaacaacatcaacaacaacgacgacgacgatttgcaatttggttacatccaattacccgatggttgctacgttggttgcgactcgctctatctcactcatctgccgtcacagtatcgtgatatccgttgcatcagtgactccatcagattcgtctccatcgagggatacaacaccgatcctccatacgacatgctattatccatgtgggatttgacgccgagctcaaggcagtggcacaaggttggtagtatccatgttgggagcttgtgggagcaggaggggttcaggagatcagggttgccgacgaacacgtcgccgacccagcccatgttgagcagcgaggaggacggcgtcgtgtatctcatggcgggtgatttctacgaggaggatgagaagcacaggagcctgcacgtcttcagcgttgacatgacgacttgcgagtttgtgtcggcttggcgccttcctccttggcgccattcgggtcctccatccctgatagggtctgatatattcaagcacctcaagatggataatctctgtcagcttgttccacccaatacgagggccaaggtgctccctcgtccaccaaagagggatcgaggtgaaggcaatgtgattacagttcgaccaaggaaggtgcaacgagttcatcatcaaggggaaaatgtctaaacttttttagggaaaatgtcacctaaattttcgtgtaagcatcaatattttttgtacatgtatggcaagataaagatcaacaacgttttccacggagaggggttattcggactttttttcaaagtgtatttacatggataacagtggagacaggttatttgagattgttttgtagttaaaatcaaatcaaagaaccctataacactacaaaagaagtgagacgcacgttttcactcgtaaaattctctaattgataaattcccattgagctaatcgccctcgtgttactgggatcgatagaaaacaagcattcactgattcacaataccagcgcgtcgtacggtccatttagcaatgcccttcttgcaagttgcaagtgacactctagatgcaaatcatttggctccaagaacttcttgaataagcctctcagtgagctccctcgggagtcctcgaacgctatccattgtgccgatctatgcaacataggaagaaatctcaaaatcagagcaatggattcgatattattgttgttcagacgttgcagtgacactgtccagtacagattggccgttctaagagtagtaatactagcaatggtggttgtttcgaaagaattgctcactaactgcttgatgaatggcagcaccgaaggatgtgtcagcttaaggcctccagccacgcaggtcatgtgtccttccttcacctaattgaattaagaagtactagtacataagattgcattaccaagcagcaacaaaacaggcttccacggtgggtgaaaatatatgtccaaatacttttgcaaggttcagaagattaccacactttggatgaaatcctctggtatgtggtgaaaatagatctgcagaaaccaaaacatgcaccgatttgatgatttggtatagatcatttcagttgaactcaaaacaaactcgagatcaaattcgcagccgtcatcactatgtgcataaccacataactaaaagctcagattatgaatgtgcagctacctcaggtatatcccatcctcctttggaagctccattgcttaggttagtcacaagaacatagttcactgcgaatgctttatcacccgaataccctaccaatagcagcgaaacacacagccaaaactttttagctaaatacaacaaatttactggtacaattcctaagcagagatttgagatagatatacccttgatgaactccctggcttcttcctggccttttggcctctcccttatcatccctttgctcaccatgacctgattgatcaattcaccaaattaattagtcaaacgaactccgttcaaatataaaactcaagttgtttatgactgaaactgatggccggtacctggtcagaggtgatcagaatagtaggctgatctctctcttgagcagagtcttccccatgcaacttcagtttgatggcctctgcctgcagttcatcaggaatacaattttagctgctctggttgcttgacttgcttcacctcgactgaacacagcatctagcatcttaaaaattcttaattaattatactgttcggtgtaattagcagctgaaccttagcttcagcgagggccttgacaagctcctctggcttctccctcctgatggccctctcatcgatgtcagcgcactgaacagttaaccagaaccaaacacacttaattcgtgagggattaattacagggtaatagcgagattaataacgagagagctccaagatgatatagccaatcaaatcagctaaccatgacggtgaactcgtatcccatgtccgccagtatctcgcggcgcgccggcgacgacgatccgagcacgacctgccggcgaaaggatcagtaatcaattgaacagtggctatggctaattggctagtgaatcaattcggatgaatggatcataagcaggaaagggagggagacacgcaccttgaaaggcgaggagttcttggccatggaagacgccatggctgaactcatcgcagagctataggactctgaatttctgaaacgcctgcatgatcggaggctacaaattctaaccgaattaagtacttgttgcttccttgcatcccaagtagtatcccactcaagagattataatagcatatcatgaggggattagggttgatctcaccacgtaaaagctggttggtttctgtttgaccgtagcgttgaccggagtgcgttgagacttgggagactgggagagtgaagcgcggcgagattgtgtagaagcttctctctgtccacgtgtctgtgctttgggggaaataggccaaaggcccactttgtcttgccccattgggcttctcctcgagcccgaggagatctcacagcgtggtgacgtggcgtttcgagccgagcgcttgtgggcccaggcgtacgatctttcatacacggggtcgggttcaggcggactcagcttcggtgacttaggtggtgtttacatctagggacttaactttagtccatgtctttagacactaatttagagtattaaatatagactatttacaaaactaattacataaataaaagctaattcacgagacaaattttttaagcctaattaatctataattagagaatgtttactgtagcatcacataggctaatcatggattaattaggctcattagattcgtctcgcaaattagtccaagattatggatgggttttattaatagtctacgtttaatatttataattaattttcaaacatcatggatgggttttattaatagtct

SEQ ID NO: 18165 - DNA, 3702 bp, Oryza sativa
cacaaaagcacatcttcttttcgcccaagaagagacgtccatgttttgtccttgcaatttgctgggcccaccaggccagtctcagcggccggagaatccggagccccaccgggccgatatgtcagtgacacaagcggatgccgtggtcccactgtcagagaagcaccccgcctctctcctcctcgcgccccgcgcgcctccaagccttctctttctttccaaggcaacccgcgccgcgcagtataaagcaagcgcagcgccaccattgccaggaacacgaaaagcttttggttagtggagcactagtagtcttcgtctgagagagagagagagagaggtttggggggtaggtgttgttgggggagtcgtcgagatggagaaagagggcggagtgaaggcggcggcggaggcggaggcggaggcggagggggagatcgtggcggcgccggcggagaaggtggcgtgcttcaagaagacggcgggggaggaggcggacgcgacgttcatggagcgcgtcaaggactactataaccagctcaaggagagctccgccgagaagcactggatctgcatcaaggacaagttccgcgccgccggcgagtacgtctcacagaagagcagctcggtaattcctccccgcttaaccctctcctcctccctcctctgcaaacttttgcttggatccaacctgtgatgcatcatgcatggtgttttcgcttctgagtttttccctgtgtgttttgtccgcgcgtgtaggtagtgtagtactcgtgcttcgtcttggattcttggtggttcgctggtgtttctcggtgtcttggccgcgcttgtagtcctagtgcttcctcttggtggttcgcttctgagtttctcagtgttttggccgccgcgtgtaatacgagttcatcttggtggttggttcatgtcgttttttttctttttctgtgtagttcttggcgtttaattcatctcgtgcgtggttagaatgttcgatcggtgggaatgtaatcgatcgcttaggttaccgttcgtttttttggtgaatagatcatgtcgaagacgcgattagcatacaagttctagtgccaaagcggttctgttaatttgacaagcatttgatcgtttcatagcaatgcgagttcgtgctgttcggcatcaagccttgtaggtgtttagggggaacagtcttgtctgcgaataggttcttatctctccattttaatcattggcggcttcaatgttgtatgatttgagacggagaagcatttggggggttttcccccttcgatcctgatgttcttttttgttgaatcggtggctgcttaagcgaacatcaggattaggatctctcttgctagaaattgtggagttctcttcgctacgcgcactctgttctgcttgctattagtactgccaagtctctgtttatgtagaaactccactagtgcttgaggtttaacaagcgttgtgagttcgattcttgcctttcattatgtttaagggaaaacctgcgtgaatgggttcttgtgtttgcgatttgaatcgtcatttgtggtcgggttcactgttattcgatttgcgacgtagagatcagagatgcagaggcattcgttttttttccctgtggatttgtgatgcttttttttttttgttctctattcatttggtggtggctattaacctgtgcgtacatcaggatctgtttgttgctagcaatcttgttgaaatagtggcaaattatagattatgttgcaaatggtctgcgcattctagattgccaatgtaaaaaagttgttaatgctcaatttaccccgtatgtttcttagctacatggaacctgtcctgctcaattttatcctgtcaagtctctctttctgcatatacttctaccagcgataaaatttctgcactgttttgcctttgtgctgaaatatttgcaaatgattgtgcgatctctatcttgatatatgcaaggttcagctgtatctgctggtgtgatgtctcctaaacatttgccatggacaatcatttgtctgcagtagtgtatcctagcatttgcatttcaaattagcaacgcactctaaattgcaatcgggttctccagttgcaacgaatagcatttgtcatgtactctctgttcttggcagacttggcagactgaagttaattggacttctttttatgctgttatgttgatagctaattacaacatgctgttgcctctgatggatctcgtgggctaatctgctgtttcctgtgatgtgattcaggtgttcggcaagaagaaggtcgagcccgtggtcaaggatgctgcagttccaggggaggcgagttcggtgacagtcgagtctcagtgagggggggctagcttctgatcagtaccaactttgatgagacaagtgtaaatcctcttaggtgctcaacggtggaacttgaattgtgaggtcttatcgatcagcgagtagtttttttgctatgtcatcttgttcgtagattctagtaggaagagtagtttggacatggttggctgagtggttactactgctgtgatctccggatgtttctacctgaaaaaatatgtgaaccttgaatctgcttggtagcatctatgatcaatctgcagtgcagctggttaaattcgtgccgctgctattctgatatagacatatagttatatgagttcttgtgttgagcatggggatgatatacccactggattcatcttggttttctgaatgcaagggtcaattagcactggttcattgtgaatgcaaatctgtgctttgtgcatgcaaagatcaatgcattggttaattggctccggtcaggtccttcctcagatccacagggaaaggaaaatgttccagttagtgcttatatcgtagtagtattcaaaccacagcctttgccatcaagcttttgcagatgcttggggggggggggggggggggttaaattcactgtatttgctgatttttcttggttcaccatgaattgttgggattttcctcaaaaagaatcggtagtatttccatcaggtaccggagttatcaccactcaaaatatttaggggaatattatgattcatgagaatttataaaaccttgaaattttctccgttccgtgtgcttcatcttcctctccctctccgcgagccccttgattaggtttcaggtttacgggatagtgccgtcacgggtaagatagagacattgctggggctgtggtggcattgcctcgcgagagaggaagagggcaatggatcagactcctcttaacatttttaggtaatattaccaaagatatacatacatttagtttattttggtaaacacataagaaatcctgctaaaattttgatagtattatcatcaacttaccaaaatttagtaagatttattttgtctacaatctgaatgacccctctatctttaaattccgatgaactatggatttacatgtcagagataaaaacacggtaatttgtaatttagaagtctaaaatggtgcgacgctgaaatgcgggagagatgtgcacagtgggccggatactaggtcaggccggctcggcccaagcctgaacacactgcgaggcccaaagccatctcgaacattccgggtgtttcctcccttcccgtgtgctatcccctccgctccgcggctttctcccgcggtttcccttcctccaagaaagaaaaaccg

SEQ ID NO: 18166 - DNA, 2819 bp, Oryza sativa
cgtttagcagcttactagcttagtatgagattttcactgccttaatccttaattgttaaattatgatctgatcgcacccaggcctcttgaaagctatagttctggaaacatgattgtatagataaatatgaaaacctacgtagaagctgttttttttttcaactgatttttgtaactggttttatatgcacaatggtttggtgcaactgagaaatataactgaacactcatgagatattgagatataaaatttgacattgaacttattttgtgcttctgcctgccctacaaaattgtttctaaactctgaaggttgcatactgagtagcgctgtttaactttggcattctcctttttgacacatgttgttgtagacatattattttagagctagaaaatttattatgttgctgccgttgttgttttgttcttgctatatgctgttcttcaacctcaaccataccgctttacatgttgaaagtttgatttgttcatttcctatgttatgttaaacatttggtggaaatttcattatgtttaaccttctacctgggttaagtgacagaagatgtcgaaccaatagttactccctatctctctttttatagttctgagttacttatttttagttcctaatgcagactcatgagtcatgatttgatctctgtttctgcactctctcagtttgatggaattccgaatttgtttatgttctggcttatgtaactataccacctgttgatggttctggtagctaaattttattcaagttgcatttcattgtgatatgacgaaagcgttcctcaaggtgttggtttctggctgaaaatatgcagatgttggttctggatcttgttatgttgatcttttcctaagaatccacacatcagctttactttgctggtttctttggtttatttcagacttcggatggaatccattaagacacaatctcaaggttctgcctcttctgttccaaagaacccagccatgtcctcttgtcggaagaagaagtctgacgacgctacgttcctcgaagatctgaaagaccatatcgacgagttcatccatgcctccatggatgagcacaagcattgcttcaaaaacaccatccagaaggtcagttgtgctaacactcagatactcggctcgttactctttctgcattttagacttgtttgacaatcaagcgtttcttgcgctctatacctcgcatcgcagatgtttgggatgtcaaaggttgtcgcagagcgttccgctgaagcaaaagaagctgaagtcgagagcgctttgcctcttcagaccagtgtctcgcagtaggatgccatggctgatggcagcttgtttgccttctgttgcctgtgttccgtcctgtggagcttaacaatcagtaatacctgtaatagcagtgaatatggagtctactgctttatgtttccttgtattttgctgtttttttcatatattttgagaacaaatcttgaacaaaatggggtataactaaaaagtctacttcaacaagtgtcgaattgctgatctgttttgctcatgtagcagattcctagtctatcctaaattcctaaccttgtttctggggtcaacaaagaattctgcccagaagtttcctggagctaatgatgagtatgggccgaatctcacgtgggcctgaccatcccatgtgggcccactaacagtgggatactgggtgaggtgtttctttttcatttttgagctgtaccctgtagcctctgctactgtccagctttatcacgcattagccgaaaagccgaagctactagtgtaaactactccatccagttataaatatttgaaatttatggtaatatttggttaaaattctgaaatcttaaccaaatatttataactggagagtgtatgaaaaaacttaggtcctgtttagataggagggactaatttgaggcccttaggccatctaaacagtgaaaaatacccgtataagtgaaaaagaactactcgttatactgctatcagtgaaaaagaactactcgttatacctcaaattagtattaatacccgtatcagtgaaaaagaactactactcgttatactgctcatctccagtgaatttgccttgctcgtttcactaattaatactgcaaaaaagaagtttgaacactggtgatatttctggctttctgcatccaaattgcggctctgaattttccaggtaccttgaaggcgacaggtgcaacgggtttatttaaatttaaacgaactggccgaaatagacgtgatcttgatgtaactaatcaaggttttttgttggaccagtccatgtcgattgtcaaattctgaactctctactttatcatgcctagtcttaatacgtgtattaattaacattgctgcgttgttacatcaaataatcagataaagggtctgttcactttcatgccattttcaactttactaaaaaaatttggtatagttgccaaaaaaaatggctacatttagtttgctgtaaaattttagtaactatataaaaaatcctgttaaaactttgtcaagttgccaaaattttgatatagttaccaaaatttttgtattgccaaaatttaataaggttgaaaatagcatcaaagtaaaaaggtccgaagataatcgaaaaaaaaagaactacttaggagatgttgtcaggaaacaggaccacactgtagtactcctagatggacggtcaaacaacactcaccagttgctgtgggcaaattaatggatttgtgtggattatacgtgtatgtgacttgggatgcgtgtcacgtgtaggcagccaccctttt

SEQ ID NO: 18167 - DNA, 5292 bp, Oryza sativa
tttctgagtacattaggccaaacagagtacagagcaccagtcaggcctgttttggcaagatcatgaacctgaccaccagagagcttttaagtgtgatcagtgctcggatacgctcgactctcagttgcgtaagttccctggatctcgtggccactactggttgtcgggagacgaaggcctctgcttctctccccaccaggcaccaggccaccaccggcactgtcgcactgagccattttctctgtgagaagtgaaacgctcagaagtgaaatggctttgtttgaaagagcttttagccgctgtaacttcttttaaaatccgtagctccttcaacagttcagattttcatcaaaattctgagaattgatagatgtaaaacatagaaataaactgaatgtcaaaaggtagaaagcataacttttcagattttcattcagcttcttatcagcatcttgaactacccataggtgccatttccactagctggccccaaccgtgcagtgatgattgtttcattgactagtttgaacatttgttgctccagccactgatctggccgtgtgttcctgttacttcatgcagtcgctcaataatgcgtttatgcccatgctagtctgatagtagcagtttcctagtgctagtggctcccatgattacgtcgtaatctatcactctccctcttgctttgacaagtgaaatctcttgacagactccatccgtcccctaatataaagaattttaacattttgcttgaccacttatcttattaaaaaatttaagcaaatataaaaaacaaaaagttatgcttaaaatactttggataataaagtaagtcaaaaaaataattctaattttttaataagacgaatgattaaacagtacaagcaaaatcccttatattagaggatggagggagtattaaggactcttttgacatatttgatgtttagtccgacggtgtgccgtttaccattaccgcatgttagcagggattcagattggatgacatggggtgaatcttggccctccgaaacaaatccaacggctgagattcgtccacgtcatcatgagtaaaagttttactcctagttaaatttttactcctgagtaaatctgcgagtaaaatgtttactcgtgatgacgtggatgaatgtcagccgttggatttatttcatagggctgagattcaccctatgtcaccttgtgacatgcctaccctatgtcacccaatcccaatccaccttagcggtaagcacagttactatggtaactgggtttactgttagggtaggggaatgttaatcgcaaagtaacccttccaaattttgaaagataatttaatttcttgataaaacttgtctatatttttcacggtttgttgtggttatcacagttatgaactattaactgtgcttattgtcaatgtctggcaatctagccatagccatacggttcaaatcaaccgtacggctatggctagatttcgtggaaactgttgataaaactgataaaaacagatgatatccgaacaaatcttgttataaaaaataaaattcaatttgttttttgattgactagagaaaccgagttgtttgtattttcaacccggttttttgtaaacccaaccagtgcctcgtccattgtgagaagaaaacactaacggtgtgacagtgagtgtttatatcattatatatgctgattatatggagaaaattgatatttagccattctcgggttagggtttcgccaaaatgccatcgccgaatgtggcttcgttataatgccatcttcaaacgactccatcttgccacactaccaatctaccatttcaaccgattttgattatttgcaaatgttttccactgttttgcttatttggtttgacccaaatgcccttacctcagccatggggcccacttgccaggagcgtcttccacctctgcccaccaccatccttctctctctggtgaactcatgcaacagtgttctctcttgacctccctcctcggttgttctcgccccaaattgaatgcaaaaatcggttcctcttgtcctcatcaattcccccaacaaatcccactcaaatcagcgtaactccgtggtgtattttgaagtccgacttgaatagcaagctccaccatgaccggcgtcgatctctctccccggcgaggttggagagcctgctcaagcggctggacgctgcgggtggagcaggtcgctgcccacatcgaggagctcatcagagaagggggtgacgccgtggcgcgcggtccggtcgagcacttggtgcgccgtgccgccgagccgaaccgtcatctccgtctgcaccgctgccttcccgtccccagccatgccgccgcgtcgccttccctgttcccggtcgctgtcgccaccgccgacaacctgcgggtgaacctggtgagctatgttgtcgagctggtgaatgcggcgaagggcaaggtgaacatggagtacatgcggttggtggtcgacctcatggtgaagcgcggtcggccgaaacttcacgatggttcgacgtggtgaaggccaggttcggtgacctcaacttcgggtgggggaaggcggcgtatggcgggctggcgaagggcggggtcggcgccatttccggtgtggccagcttcctcatcctgtagcggttcggcaacggtcccgagctgcgccgacgccgcccaccatctgcaacgaagagaggaataggtacagagagatgcaatgggaaccaagggtattttggtcatcttagcaagaaaaaaatcattaaactgagaagagatggatgaaataacattgcaacatgttgcgtctgtttgaggatggtattttagcgaagccacattcggtgatggcattctggcgaaaccccaacccgatgatggtaaaatgtcaattttctcgaatatatgggccgtcaaggaagacctcgaatccacggcccatgacacgatgggccctctcaggtgggtggcaatctgttccatcttctccggctctccagtgtgctctcaacgggaaacaggacacaggcctttctttgggaaacaggaaaaaaaatgctagaaccagctgcaatatcgcttaacaaggtatattggtggatccatttcatcccactttatgaccatgcaaattgtttaagacattttctaatttacaataattgttgggcgatctgccatttatagatcgtcttaaatcattacatggaaaatggaacacctactttcgcagcttcgcttcaacagatcaatgcagccagggcgtcattttgtttaccgatggacaaggtgacatgggttaatcctacgggtagaggtgacaaacggtgaaatcttacacgtgggagaaggagccaccatataaaataacaaggacagtcaaatgaaactggtaaaaaatatacactactatattatatataagggcagtagcaatgcaaagctacgtcaatgagaaacctcatattgccaaataggatgaagcaattcagaaccacactttccatggtgcaagcagcttgctgtgtgacctaagagtagatatttgcatttcagtccctattacctttaaatttacagtagtacaaaattttacactcaacaccctaaaatctacataataatatataatctctccccagtccccacctaccgccgatttctctcctctccccacctaccgccatctgtcctcacactcaccggcgccggcgcaccgggtggggaagcctagaagggcggcggtcgaggagctccttgggcggcacggcgacgagctccctggcggcaccggtcgctgcctctctgtcaacccgtcgacgacgccacctccgctcgagatccgccactggggcgatggccggcggcgtagagatccacgagcggtcgtggcaggcgacggttgcggtcatcgacgggctgacgggagggaggcgcggtcgtggcgggcggcggtggcggtcgtcgacgggctgatgggagggaggtcggcgacggcggcagtggcgcggtcgtggtgggccccggacgacggccacgcttggcgccatggctctttgttcctatagcgagatgcgaaaaaccaatcagagctatgaggtctacttgctttttcctccacgtagacgaggtaacgcgccatatacttgcattgtgaaagacctaaggtaccaatcaggaggcttatgtacaagagtgaaattcatttgaagcaatcaagaggcttccaaaccttcatcaatttttttatttcttctaaaaaaagaggcttccaatatttggttagttaatcgactgatcaaaccaagaagaaaataacaaatgaagcctcaaccttaagttcgtactggattgagtaacctctacaactatctcatcaatgaagtagtttccggcaaaattaatgtgaggtcgtttcttgccctggacagtgcacatactgatgatacgttatagatatattgactggatatctttatctttacctactataaggaaggccctacacgtcgggcgcccgatgcttcgggggaaaaatcgggcgctgacgtcagcgttcgattttacgtgcaaaattactttaaactgatttatctcttaaattacttatccaaatcatgatccaattgcaccattaaattcgttgcaattaaatcttcaaaacaagaccacacatggatatattttgacgaaattttttttagcttattattgaattatttttaaacattgcacgatgttccaccagatatatcggaattgtttcactaagtagatcgaaaatgtttcactcatttaaatcgggtgttatttcaccttatataaaaacaatgtttcagcaaatagcgaaagaatgtttcagttcactacacattagatctatacatagtgaaacattatgactacactagatgaaacatttttcggtggaacaaaaaataaaccaaattccattaatagggggtttccaaaatatgtgggttttttttgcaatggaatgtttcgttcagtgcaacattagatctatacatagtgaaacattgtgagtacactatgtgaaacattttgggtggaacaaaaaataaaccaaattcccttaatagagagtttccaaaatatgtgggtttttttttttacaaaaaagtattttaattcacagcaacattagatctataaataatgaaacattgtaaatatactaggtgaaacatcttttatagaaaaaagaggagcagaaataggtgggcccaagtagtcacgtggagggagggggcgc

SEQ ID NO: 18168 - DNA, 19612 bp, Oryza sativa
gcccgatccagctccccccgcgccgggcgaccagcaaggagcatttctatacctaattaaaaaataagtaaggcttccggttgatttttttgtccgtcattaaagagtgggcccatgtgattatttcgcggctaatctgtgaatccggatgcattacggcgatctctgacgctccgaaaaaaaaaagagaaacgaaaaaaagaaaaacctagcgagcagcccagccaagacggcagcaggccggcccaacataaagcaaacgcggcccagcagccagcccacagaacagagaagcagcagcccagtacagcatagttatgtgtgatactatctatatctataactaatataaatattcgtattttgttttcgtcacatctaattttcgtccgtacacaatccgatttggttagcaatagccatggaaaaaattgcaaaaaaaaaaaaatccgccgcaccctgtcatcgctacaccgtgccggcgagacaagaaggagagagggagagggagcgcggacgtcgtcgacgccgccgttgggagggcgccgtctccgccgcaccccgccgtcaccgcgctgtgccggcgagaagggagagagaagagaagggaagcggtgctggtggggggagagacgacgccggtggcaggggaggcggccggctggggggagggggagaggcgggagagggggagagggagcggcgccgccggaggggaggggaggggaagcggtgccggtggggagatggggagggggagaggcggtgtcgggacgggggagagggaggcggccggcttggctcggctgggggggagggagggggagggggatggttagggttagggttctcatcaatttcaaactgatctgaaccgtccatcaaaacgaacggctgagatcgatcgagggtttgggccgcaccacttgggctgcaccacttgggacgcacacgggccggcggtccaccaagtgagaggaggagtatgggggcattaagtagactttggtcgcttgcgggctgaagaagaaaatgggctgaaaaaggctcatagagaaaaaataatttttatttaaataaatgctgaaatgatatttgtattatcaaaattagcaattaagctatgtaaattccaagaaaatttcaatgaatgtaattaatatagaaaatttaatccaatcataacattttatttctcacacttactctacttataaattaatttaattatatacctactacttaaaaaatacctaaatatgtcagaaattttgtatttcatttaattagaatttaatatgttttaattcaattttatcttttttcttttcgttgcaacgcacgaacacttttgctataatttcaaagagtgtaattaatattgcagaaaatttatatgtcattaaattataattcattttcttcataaaaatagttcaaatcaaagttcagtcaccatattattatccggtgcaacgcacggatattttgttagtccgtataaagattgaagatgtttttgctgtagcttttggtacgtcatccgaattaatctccgtgtcgagttgtttttcgcgttaatcaccgtttccgatttcgcattggatcacaacgcgtgatgcggaggggtgaagatcgcatcagacgtgcttgtctaaccgaaacgggcttgtgcaacatctggtcctgccggtttgatgcagagccggccagcccattaacagcctaaccacggctttctctgtgtaggtcctgtttggtcagtcaaacaaatctatatacctaccggtatttttttgtccattgtttttttccgtatgcatttttttcgcacggtccagctttttttccgtccgaccggttttttttcgcacgtgcacgcggttttttcgcagggcccagtttttattctgtccgattggtttctttgggcccggttttttccggtccgaatggttttttcacgtggttttgttttgccaggtttttccccatccaatttttttcctttttttccatcctatattttttccgataagtttttttggtgtgcacgggattgaatcccaaatctatatatataccaaatttctactattataaaaattaaaaatgtttcgccgatactttggtatgtcgtccgtatttgagtcaccttgcatgctaatttgggacaaaagtcggactcctaattaatttacaattctcgccagaccataagaaacttttgcaaatacataaggagtcgtataagaaatcattttaaaaacctaacatgctaacttgggacaaaagtcggaatcctaattgatttataattttcgtcagaccataagaaagcaacgtacaatatatgatcaatactatcaaaataaaaatccatatacttttaagaaataaagtctaacaataatacgattaaaatagccttcacccgttgcaacgcacgggtattttttctatattataaaaattaaatatgtttttaccggtattttggtatgtcatccgtatttgagtcagtttttaagtttgttcgcttttgaaaaaatatagatccgtgttaaagtcagattttaagttcgtttgtttttaaaaatataaaagaagtcgtacaagaaatttctttaaaagaacttgcatgctaacttgagattaaagtcagactcctaactgcaactcatgattttctaaaaaataaatccaagcgaattcctaaatgtcatcctatctaaaccgtataacaataataatattaaaatagcattcacccgttgtaacgcacgggtatttttttagtcaagtttaaaaatatatctttgtatatatgtgtataggacaccaccacctaaggcttcttataggtaggtctatacctataagactataaggtataagagagtatataaatatttttactttcgcatgtactggagcacacaattaccaaacgtttgggcccgagagcacttaatttcactagaaacacaaaagcccacgtaaaacatcacatggcaaagtatggcacatgctgtccatgcgaagctcccgttccacctcgtttagtcccacctcggaaaactagcttcagacagcgcagcttaaatagcaagagcgtcccaccacctccagccgagctcagcagcgcgagcttgtaacccgagcgggggcattaaggtggtgtggacgttgccgtatggctgcgggcctgggttggcagtgccatagatggcccgcccgttccaagttgcgtagttgggccggcggggcttgagcgaaagctctggcctcacgtttccctagagtggcaggcattgcgtgaggctggcttcacagagcagcgaatactgtccgcttccaacggtggaaggataacgggccgccgcactgctggcccgcttgggtctcgcagcctactccaacggaccaccactttttttattattattttcccatcttgtttgcctgaatttacctctaactgacttgctgccacgcatgtaggccgtctttacggatcatgaacacgggtattcttgagcggtaaaaatccaacttgtatgtatttgtacacttcattatctaaaaaagaatgtatttgtacactttgttgtaaacaattcgatggaacaaaaaaaaactaaagctggtgaatttgtcgttgaatcaagtcctttttagtttttttttagttttgctgattgaagttctctgttaggcataattggagcttatgttgtttttagatttaatatatttcaattgttgcacagactgggatcgcagggaaacataattatttatgctaatatagtaaactgggttaacagcaaactgaaagcagcgggaagaagatctcaaatggaaagcttcaatgtgttcttcctgtagcctccagtctcaatcatttaaatactactccctccgtttcacaatgtaagtcattttagcatttcacacattcatatagatattaatgaatctagacatatatatctatctagattcattaacatcaatctatctagattcattaacatcaatataaatgtgaaaaatgttagaatgacttacattgtgaaacggagggagtaattacaaatttatactcattcttctttcttgatggaaatgccaagtgtaatacaggcagagcagcagtagttcatggagcaggaggcgtcagcttattgcccatttttctcttgttgctgcttgccgtcgacacgctgaagctgttggtgttgtcgtttgactttttttaacagaaagaattttatttaaaatgaaattatacccggcctctacatacatcctaggactcacacaagcgaaaaaaagaagaatatcctgagacaaacattaatgtatcatgtcatcagatcttctagtctctgttgccaaatgttgaagaaatcagacaaaaaaggagaggcatcattgctgaaaaggggatcagcttgcctactgatgtcaaaagaaaccgtgccatcagctcatcatccagcttatgttgttcaccagatctcttataattcttgtcaccagatccttagaccggcgaggagaagaacatcatagtttctgaagtcctgcactggtgctgcgccacaagggacacaagcaaaccttggtggattgcagaaaaggtgtgatttagcgatcagttccgtagttagctctcataggataaaaagtgatagtaattagtaggcaaaattggttatatagcatcgaaagttcacgtttttggttttatagcaccaaaagttaccggttcactttaatagcatccaaagttcaccctgttaccatttttagcacttccgtcaatttttctatccgtcttgatcgttattgatccagtcacacacatgatatgacatttctacctctcattgacatgcattatacttgtacttgtgaggggtagaaacgtcatatcgtgtgtgtggctggatcaagacggacggaatcctccgtttcacaatgtaagtcattctagcatttcccacattcatattgatgttgatgaatctaaatatatatatatatctatctaaattcattaaaatcaatatgaatgtgggaaatgctagaatggcttacattgtgaaacggagggagtacatatttcaaacatagagaagatgcattgctactattataagtgcttaagaaacaatggtcagtaaatattcagactgaagttctctaagtttcagatatgacatacattacttagtaagcttctcttttcgcaaattttctgtcggattgcccgagtaaaattttcttttcttttatatttttccaatgacaagtagtactcgtacttagtgaggttagaagtagactactcttatgttcttacgatgaaaagaacttttaaggtataatttagtgattgtatatacaacatattgtgtctaaaaagttctcaataatcaaaccgttaagaatcggaagtacctccaatcagggggcaagttcatcgtggaacttcatggttggtttaggggaggccaccgccgagagccagagataaaagatggtgtcaccagtactcccttcactccaaaataaattaatctgatacaaaataaaacatcattgaatataatgaatttgaacaattattctattatctaaaagaaatgaatttggacaatgtttagtgggcgcaagaaatctgaaaaattggcttatactataattagctcggaccaaatatcgtgagcttttcttttcctttttttttatagtttactcattctctattgaataaagttggtagcttgcgcattaaaaaatttagacaatgtttcgtcttacggactaaggctatattcttctcccatcttttccaactcacctctttcatgttccttgcacacactcttgaaactgctaaacggtacgtttttttcaaaaggtttctacacgaaagtcatattaatataaaaaaatcatattaatctttttttaaaataataataataaaaacttaattaatcataagaaaatgcgtcgctctattttgcgtacgcgggatgtgagttcccaacctcacctcctaaacacattctaaatttgtttctcctcttccccctctcgtgctgggatggatagaatagtcattaatgaaggttgaaactaagttttctagtttttcctttttgtgtttgtgtatattgttctgtgtgaggctcggagtctaaaaactcgcgcatgtttttggcagtatatcctttgacatatagagaccgaattaatgaaaaattcactattaaaagtttttagattagtttattttaggataggagtggatctatagttagcgtcagctttaggcgacccgacgacttccgacaaaaactatgattatacttattcatatattataatgatatagtctaagtataattagcatgtcatggtatcgatagatctattataataccaatgaattaatttctatatccatcattgttttaggagatagaggagaactgatatgaccgtggcagagaggaatggagctgggttgatgtggatatctccgtgatcgctacaccaacacctccaggttccgtactaccgtccatgtgccaaattgtggcgcaaaaccgtaccactcggccactccggctgtttcccgaacaaaaaattgtggcctagcctagcgtcaccctcaccgtcctagaaaagccttgcgagcgagagagcgacacgaccccgcccggccgcccctactctcctccccgcctcaccgcgctgcagcacgcgcgcgtggacgtgtcaccccgctccgctgcacgtggccatagccctcgctggccacgcgccccccgagccttccaggcgcgccgctctgcgtacgtgtcccctcctggtagagaacggcatcacggcgcgccgcgaattataagccgagcacgagcacgagcacgagctcccctctcaacgccagggcaaatgttacatcgcgcctcgcgtctttacccctcatgtactcgcttcgtttagctagcagcggcagcacgggactcggcttcgcgctcggccggctcggcgggaggagtggcggcggcggcggcggtggtggtttagcgcccgcgtcggcgtcgtcgtcgtcggtggtatccgctcgcacgaggaggaccgtctccgtgacgcccaacgccgcggcgccgactccgggcgagcagggcgtcgcgatggagcagggcaagcagcagcaccagccaccacctccgtcgcagccgcagccgcaacatgaaaaacgcggctcccgcgacgacgacatgcacaagaccacagggtacgtacgcacgaatacactacagttttggcgtgagcggctgcgtgcgccggatttaaccgtggcgtctgcgtgttcgcgtgtgtgcagggacgtgatgacccactctttcggggagggatactcgacgcggtcggacgaggaagggttcggtggcgtgtacggacagaacgacccggtgttcaaccctgggaccgaggtgcaccccagccaccctggtacgtgcactgctgctagataaaattaacgaatttgctatatatttatcgataaatttcctcaaaaaatttgtcaagatgcaattacagtacaatcgtagtgtaattacactgtaacttgcatgtaattacactgtaactataatgtacaacttgtatgtaactttcaacaatctctcggtaatatgttatttcagtaaaatagaggtcatggaaacaaatccttttatatatgtgtgtgctatgattttttttcttcctcaccagaacaaatcttgtaatagatctaacgattcaaaattacgtgaaacttaaatacaagttacagtgtaattacatacaagttacaatgtaattacactacgattgtactataattatatctgtcaaatttttagtagaaaatttgtcgacaaatgtataggtagtccctaaaattaatttgacacatccttaaatatccgtcttgaaaataggtacattaataaacatatccactacgaatcttgaatctggaaggatgtctaatgaaggatgtctaattttgtttcgagtaattttataatcttgagaaggtactgtaacgtatcaaaaattaaaatttagtgtaaaatttgatctctttataattttacaatagaaaagtgatacctccttgaggactaaaattgccttttgttttggtttataccgagtagttgggaacagtggttacaggagggacgtgaacttaattattaatctgaaaatttggattttgatctctgttttgattaataactggggttgctttggttgtactgcgatgtgtgcagagtacgacacgtcgcaggggtcggaggtgaaggagaaggagaaggcgcgccaccataaggacgacaagcacgcgacctaagcctagcagttgggggctggattaggtcctaatcgtagtttagtcgggcatgacggggatcacccccatcatcacctgtgcatccacgttgccctatctttgatgggcactagttgtatcttttgcttctgaactgttttgatgcatttgttttattccttagatgtgatgtaaaatctctacagtacttaattagctatgtactggtactgtgagttctccagcgcttgtgtctcctggtgtgtgtgatcatgtaatgatgagtcgattcatatatatactccctcctcctccgtcatcccttctataggattttcaaaaaacatcccttctataggatttgtataataaatctgtaataaaagagattttaggtggcttggatatattctgattttaggtggattggatatattctagtataattaatttaggcagatagtttttaaatttattgtatttttaaatttattgtattgggacgtgttacgttcataaaaatcccttataagatcgaaacggacataccagatgagctacggcagattcacaaaaatcccttataatttaggcttaagtgcgctccatgtgaggccgccgctctaattcgaccgacgactctttagggctcgaagcttctgtatcgtgagccttttgggaagggactcaaggagtgatgggctactcgctatattcttctcgaaatactacatccatactaaaatgtaataatttttagctaaacgtataacttttagttataaatctgaacacataattatctagattcatagctaaaaatacatattcatagctaaaataattaaatgtcctaaatgtaacaacttttagctatgaaacttttagctatgaatctgaacttagctatgaatctgaacgtgaacttagctttttagctatgaatctgaacttagctatgaatctgaacgtgaacttagctatgaatctgaacgtaaagttgtttatattcatagctaaaaatacttaaattttagattttaggacgggggagtaagtcgttaatgggcctctatgacacctaagaagcattttcttctcgaaataagtggtgtttggataagggactaaacttcagtaccttactctggcaatccatgtttatgtaccgagagaaaaaaatcactgtcacgcatcgaaagtttggacatttggtctattaaatatagactacttataaaattaattatataaataagagctaattcgcacgataaattttttaaacctaattaatctatagtaagcacatgtttagtgtagcatcatataggttaattatggattaattaggctcaatagattcgtctcgcaaattagtctaggttattgtcggtgacatgggaccgggagtatcatgactagagccttgaggcagacacaatcgcccacgtggcctggcaccctcggggggcgtcgggcccgagggtgatgtgttcgccctcctctttgtctccccgagggggtcggaccgctcccgcctcggccccgagggccgaggcgccccgaccccttgtgggttttgcgccgcgtatatgaggtaggtgagcatagcggggctcacctaaccacatttattgcggtttggacgagcgcgtcacgccgcatgtaacgcagtgcagtgcgctcgtttatccggtcagtgaccagtcacagaccgatcagatcgtgggttaggtggcgacaggcggtctgacgcacgcctcgccccatcccgtcaggatgagagcctccaagcactcgtccctagccggagccggcgtgttagctcctggagatggcacattggtcccggtcagatatataccaggcttcatcctaaccattacaagcaagacattgtatgaagaggggcgaacatgcagattgataaactgacgcgtggtggacaagaatgaccgatttgtgactggtctgacactggtcatgtcgtcagcagacagccatgttcccacgtcgcgcttgcttccggcggaagtggaggtaggtatgggccgtcccatcagaaggtcattcggacggcaatcatacaaatctccgtccatttatgaaaagataggataagtccccacaaaaaagagagagatggtgcatgtggtatccccttgaggtataaaaggaggaccttgcccactgagatggggactggacttttccaaattgggaacccagaacaagggagaggctggctcataccttgtagctccttcatacgcagatcacccaaaacacaggagtagggtattacgcttctcagcggcccgaacctgtatacatcgcccgtgtcttgtgtgtttccggtctagcgaaccttccacatacagagagcttagaatctcaccctgagtccccggccgaaccggcaaaggggggcctgcgcagtctcccggtgaggagcctcacgctccgtcatctggcgcgccaggtagggggctctgcgagggattttctgagctctcgcactctttcgtgtgcgccaagcttttcctgttcagcccaatggccgagccagcaaaggcacacgacctctccccgagtatgagcggtgacgacggggagccaaacccacgccgtcgacctcgtactccaccgccccttccacgccaaagtcctaggcgggagaaggcgctcgagagggctcaaggatccgcgacttcgacatccacaggaggtggagaagggcggcgagatggggagcgtcgcctcctcatctacggcgacggcagcacgccccagggcgcgctccaagctgcaggcgcgctcctacatcacccgcccgtcgcccatgacccggagtctccagcccaacgttggctggacgatttggccaaattggtcatgactgcacggcagcgcctagatgctggtgggcggtcctccgccaccaaggcctctggtgctgctaccaccggctccgcgtcgtcaagacggagggcgcggcgagcggcggctgttgctcgccatttggccgccactccttcgtcagcgcctccgacccaggaagatctgcgtggggggccggatgcccgcatcagtatcgagcgccggcgtaatggccgacgtgctgcccacgcaacggagggcgcctcctcgtccggagtgtcacatcaacacggacgcggggatcagccctccgtgcccccggttggtggtgtcggctgtagagcctttgtggcgagccttcggaacgtccgttggcccccaaggttccggcccaccatcgccgaaaaatatgacgggagcgtcaaccccgccgagtttctccaggtctacacgaccgggatcgaggccgccgggggtgacgacagggtcatggcgaatttctttcccatggccctgaaaggacaggcgcggggttggctaatgaacttgccacccgcgtctgtccactcttgggaggatttgtgccaacagttcaccatgaacttccaaggcacatatccgcgcccaggtgagaaagcagacttacatgcagtccagcgaagggatgatgagtcacttcgctcatacattcagcggttctgtcaagtccgcaacaccataccatgcatccctgcacatgcggtgatctacgcgttcagggggggtgtgcggcacaaccgcatgctcgaaaagatcgcctccaaagagccccagactaccgcggagctttttcagctcgcagaccgagtggctcgtaaggaggaggcatggacctggaacccctccggttccggtgtggcagcttcggccgcccccggatccgctgctcagacagggcggcgtgacaggaggaggaagaagaggtcagcccataccgacgacgagggtcatctcctcgccgtcgagggtgcttcgcgggccacccgaaaggggaggcctgcgagcgacaaaaagaaggaagccgacgctccctgacctcggctacttggaagagcgaaggtggcgcgcggcccttcgagccgcgcgcaaccagcagagcctgcggcgctaccatcagcgccacgtccgggcccgatcactctgcgtcgacgacctcgtcctacgccgtgtccaaacgcgtgctggactgagcaaactctcaccaatgtgggagggtccgtatcgagtgatcggcgtcccccggccgggctccgttcggctggccacgggcgatggcacagagctgcctaacccatggaacatcgaacaccttcgtcgcttctacccctagtgggggtcgggtgtcaggtcttgggctcgggccaaccccgcacccccccgggcgtgcagggttggccgggggcttatcttttttctcttccgtatttcaataaaagcattttcgatttcctaaaggctgtatctgtgctgttgtttccttttgaaggatcttgacttgaaataggtcactcgtgttcaatcctgccctcgggggctcgggtcggctaaaatcgccaaacggggcccagaaccgagccgtgccccgggacgtggtgaactccgggggggaatcggcaaaaacccacaatcgggtcacccataaccctcggtcaccacgctcccggcctggccagtctcgacatgtggatctccccaggcactagccttgacctgcgccgtttgaggctgggacctgggcacgagcccttgttcaagccaagacacaaaaggaccgtggcacagaccatcctcgtctcatacacagaacaaatgaaattgacacaaaaatttcctctttatttgattgcagattaaatcagcctataacaagaagaaggcccgaaggcctcggaagaagaaggaaaagaagaaactatttaaagattggcgggggcctgggggctcactccgatgcacccgggtcgccagcctcgtcgccactgtcggttttcccttgctgatgtgcgcgatttgcgaccaccgggattctgcccgaagagagagagagcagggaggagaggcccccgagccgaacggcggcccaaggcccccgacggccggagctggctctccgcctgcttgtccgacggtgccaggcgcccccgacccccaggatggccccgaggccactgcgggaaggccgcgcctgtcgccctctgaccccgaggtcgtcggcacagaagccgagtgcgccccgcgtggcctttcggatggagagcgccctggagatgtggcccctgacgaagaagatcggccccgccgaaaggtgcagcggcccgtctacttcgttagcgaggccctccgggacgccaagacccgataccctcaggcccagaagatgctttatgctatcctgatggcttcgaggaagttgcgccattatttccaggcgcatcgggtcacggtggttacgtcttatcccctcggccgaatcttgtataaccgagagggtactggacgggtggtgaaatgggcaatcgaactctctgaattcgatttgcgctttgaaccaagccacgcgatcaagagccaggccctcgccgactttgtggtggagtggaccccagctcccgagctcgtctccgtccccgaggccagctcgagcccatcgcagctgcctcacaccgccctctgggtgatgtagttcgacggcacccgtaggaaccggccctacctgtcaccaggccttagaagtggcgtcacgcccgaccgcttccctcggggagggcgatcgccctggcataacgccgggggctactgtcggtgacatgggaccgggagtatcatgactagaggcttgaggcagacacaatcgcccacgtggcctggcaccctcggggggcgtcgggcccgagggtgatgtgttcgccctcctctttgtctccccgagggggtcggaccgctcccgcctcggccccgagggccgaggcgccccgaccccttgtgggttttgcgccgcgtatatgaggtaggtgagcatagcggggctcacctaaccacatttattgtggtttggacgagcgcgtcacgccgcatgtaacgcagtgcagcgcgctcgtttatccggtcagtgaccagtcacagaccgatcagatcgtgggttaggtggcgacaggcggtctgacgcacgcctcgccccatcccgtcaggatgagagcctccaagcactcgtccctagccggagccggcgtgttagctcctggagatggcacattggtcccggtcagatatataccaggcttcatcctaaccattacaagcaagacattgtatgaagaggggcgaacatgcagattgataaactgacgcgtggtggacaagaatgaccgatttgtgactggtctaacactggtcatgtcgtcagtagacagccatgttcccacgtcgcgcttgcttccggcggaagtggaggtaggtatgggccgtcccatcagaaggtcattcggacggcaatcatacaaatctccgtccatttatgaaaagataggataagtccccacaaaaaagagagagatggtgcatgtggtatccccttgaggtataaaaggaggaccttgcccacttagaagggggattggatttttcggatggagaaggatcagagagggagagagtaagagctctctggttctccagctctttgtagcttcttcatacatagatccaccaaaacacaggagtagggtattacgcttctcagcggcccgaacctgtatacatcgcccgtgtcttgtgtgtttccattctcgtgaaccttccacatacagagagcttagaatctcaccctgagtccccggccgaaccggcaaaggggggcctgcgcggtctcccggtggggagccccacgctccgtcagttatggaataggttttttcaatagtctacatttaataattctaagatgtgatcggggctaaaaccttttaatcccatctaaacagcccctaagtctggttgccaaccgtaatatcaaaaaattaatttagggtgtaacttacagaatcatattacattcagtcttggataagaaactatctttgttcggtcggccaaaaaccacaatagttccggttgcaataaaaacccagactaaagatggtttttagtcccagtttataagcagaacgggactatatgatctttagtcccggttcacatgttgtcatgggctgtcagggctctccgggatctttagtccctgttgaagttaccaatagtgtatccgagatacactactggagaccggggaggaggggaggcagcggcggctgcgccggccgtgggcatgagaggaggacgggccggcggccggtagcgccggatttttgtcctttcttttttttaagaatttgtgattcattgtattgaaatgaagaatttgtgattcattggatggattgagatgtataatttcttttttgagaatctgtggtctgagatgtataatctctgatgtattgagatattactttgatttggggtttgattcggggatatgtatctcactcgatttgagagaaaatagttagggattaagtagtaagtatcaatagaaacaatgaaaaaaaaagaaactaaccggaactgcctctgccttctttagtcccggttggtaaagatcgatctttaatcccgagtatttgaatcggggctaaatataacgatctttagtcccggattcatagtcccagataaaaaaccgggactacagagaattataaactgggagtaaaaacgatctctccacccgtgatagctggttttgctagtggcatcctaaaatgaaaagaagaaaaataaaaaacaagtagaagatcaagactcaccttcttctactctccaactcttcccctcacccccacccaccccttcgcccactcctccctcttcacgccaacaagttgcacgtagatcgttaccaacggcctccacctggggcacctgttccatcgatcccgcattgccaccattactgcaagctcgagcttggcaatcaccttcccaagtgcccgccgatcctgcatggctgcatcgccaccatcactgcaagctcaagcttggcaatcgccttcccttcacacgatagctacggaacatagctgccgatcctgcatcgccttcaccacagctagctcgagcttggcaatcgccttccctttgcacgatggatgcggaacaaggaaggatggggacggggagctccacccagatgacagtggcgccagagcagaggaggcactgtgggccgctttggcgcatctttgtctttttgtcttattattattattattattagaattggcgcatcttgtatcgacatcccatttctcgcatagtcgcctgccttcccttcttgcggcgggcgcatagagtggtgtatcgtgggtgctcatggtgtccgttgtttgttcgaaggaccattgacgtccggccccagcaccaggcctgcgtctatcccttagcagcctgcgcggtagtgtgccatggctccatgccctgagaggaaaatgaatcattggccagagtaagggactaggaggaaagagaatcctggccagatagctaccacttgcggccttgcaaatttatcacaaagtgtaatggtagtgttaagatttaacgctaaaatatatagttttgctataacttattaaagctataacgttatgatgtttttttaatatgcagttctatgatagatttgctataaaatctgtagatacgccttaaatatgtagtattgcgatagttttggtcaaattatatgtaattttgtaaaattttactttaaatattactttttaatgtataaatttgaatattatttttaatgtataaacttgacaataaattctttggattttggacaataaattctttggattttggcgatgtcaaggggaaaaaaatcccatgtcacaagcttaatggctcttttaaaatgacaaagaaatttataaaatctaaccatatcatttataatagagtaaatttcacaaaactacatgtactttggtcaaattattacaaaacttttgtcaaaaaaattattacaaaactacagatttaagataatgtatcatagaactacagatttaacaataaatttatcacaaattacatgtttaaggctaagtatcacaaaaatatagatttaataataaaattatcacaaaactacatgttttgggatttaaatcgttagcattaatgttatgttggacttataattgttcaagttttgtgattaaattgtaactaaacctgtagttttcatgatattccattttaaacatgtagctttgtgacaaatttagtgttaaatctatacttttatgataatttgatcaaagtacatgtagttttgtgaaatttaatctttacaatattcagaacaaaccttttaaatatatgtattccgaaaggagcaatgctatacgtaaatatctatctaatatatttacggtggcagagccactgacgttttggcggaacttctaaaaagtaaaaaaaaaaattaaacctaagcgataattatattcgacttttaaaataccaacgataataaagagaagatacaatggacggccgtagaagagtataatggtagcgtttgacgggacttaacccaacacgacaatgaactctaaaaactataagatccaatttttaaaagttccaagaaaagtgaatagaaacagtgaaatatcgagcaaagcaagtagggaataataattgggtgacttttaaaaactataaaattagaaacatgataatgataaggtttgatattttaaagtcttaagaaaacgagatatctatttaataaattttaagtaaaacataataaaaaatatataattttatagggttactagcccgcgcaagcaagctagtttttattaaaaaagcaaaaagatgtgagataataactttaagaggtttataaggcctaaaccttcggtaattatccacatcgacggatcctcatcctaatccgttccctttgtcctgttcccccatcttttacactgttgcactctgcaaccgacgcatcaacctccaccgcccttcttccccgccgtcccgagaaaggaaccggaaaaaaaaaatccccaattccccctacgccgagcagcggcgtgccggcaatgtccctccgcaagcgccagcgttcggcgagcagctcccgcctcagcaccctctcctcctcgccggctccccacaccgccgccgccgccgcctccgcctcctcccctccgctctccttccccaacgccgacctcgtcctccgcctccacctcgacccctgccccgacgacgacgcggacctcgacgccggcgaggatcaccgcccctccctcgacctccacgtctcctcggcgtccctgctccgctcccgctacttcgccgctctcctctccgaccgctggagccccgcccccacctccgccgcgggggggcacggccacctctcgctggccgtggccgctccgcgctctgcctcgcaccctttccacgcccacgtcgaggtcgtccgcctcctccacaccctcgacttcgccggcgccatccactcgcccgccgacgccctcgacatcctccccgtcgcgctccagctcctcttcgacgcgtgcgtcgaggcgtgcacgcggttcctcgaggcggtaccctggtcgcccgacgaggaggcccgcgtcctcgagatcgcgcctctcctccccgccgatgaggctgccgacctcctcgctcggatcacgcctcccccagccgcctccgcctccgccgccgggggcgaggccgccaggtcgccctccgaggcgatgctgcacggcttgatccactccgccatccatgggcacccggtccccgccgcaaccaaggcgttcgtcgcgatgctcctcaaggactacccctcccgtgactgcgtccagaaggtgctcgacgaggcgttcctgtcacggctggagactgtcaaggagctcatggggaagtatgccagcccggatttcagggtcgcggtggacagcgatgagcgggacgcgatacagaggctgaacctgcagtccgcggtattgaatgtgagacacttgctctggctcatcgagaggatggtcgaaatgagggtggccggtaatgcggttaagctgtggagtgagcaggctgcactgactgctgatctgcagaagttgctgaatgatgtggatatgtggaagaatattactcctgggcttc

SEQ ID NO: 18169 - DNA, 15804 bp, Oryza sativa
tgtttttgggaacaattttaccacgaggatcataggtgtaacattcctttatatttttagtgcaataaactagtggctttttctggatagtttgggtgcatacatgtgcatttttaagagttccaggttgttgcttgaagtcttgagcattagtttggagttgtttgcaatttgcatccagtaaacaagtgctaaatctaactgaacgaatgtccatatgagcaaatattattttgaaagtagttagtaggctaaattgagcttacccagagttagtacctagatagttatttccaattcccacaggttgtcatacttcttctatgatcattttgttctgcggacagatttttttattgctcctctgtaatgtattccatgtttctttttcttagcgctatgcttgtaatcactcatggttttaccatttttatgtatgatcatttcattccatgttcacagcttgtttgatagtttctttgtattgacctctatactatctacaatggctgtctctggttggttgcaactcacttttaagtgtgcctggaagtttttatgtgtgtatctgtgttggatcaactcgggtgggtctatagtttaataagacagtaaaacttgaaataattgtatcttttcagtgtacaggagcagaaaactagacatgcatcaatctaaattcgattcatgtggaaattactgtgcatatcagtttggtgggttcaataagatttttcattagtaatactttaagaggttgagttgtgagttggataaaggttactttgttgtacttgtgttgttgtttaacttgatgggtctctatgagtaaaaaaagcatatgtccctgcctcctcagatagccaagctctcaactgcgaggcctttgtgtatatgttttttttcttctctctggccaggcagagttggtctaaaagcatttggcagatggtaggccagctcttttatgaataactttggcaagaaaagctagcaggtcatccaaatgagatgggtttttcccgtagatcagtgtattaaagaaatgctcagatctgctattgtgcttgtctaagtaccatgtcaatccactaggtacacaatcaacatctagttgtatgatggcaacaatgacaagcacattttacaaccctgaactttcatgaatatatgcacaagaattaaaaagtaaagctcaactcaaactatactatcaaattatgaactatcagaactgttcaattttcaaccatggtacagatagttttggttgacataacattgatggtgtgtggcctgaggctgagacagttttttttgggactcagctaatcctcttgatctctggcatagctgaacacacaattttatctgatgatatccttgtagctctctgtctagtattgccagattttccatggagagctcatactacattataatacacgcttgtagctttgttcttgtgtttaattgggtctgacatatatgacatttctgcttctcaggtgaggacgaagcttgtcagaagttggcttcctgtcctaaacgtctgcaggaacatggttcagcctatgcagtgtggatacaagtcaccaaattgccaagagctagaggagacatttcttcagatcatctccaccttgcctgtcccagatgctcaggagttgctgcaacagtgcctcgggttctcgactcgcaacgtcgacgactgcccgcacttgatcgcagccttcaagacatggttcaggcgtgctggccgggctcctcaaggtgcagaaaattgagatgagcgctgcagctagtgtctgccaacagtgggtgctgtcttgtgcgaaatctcacatctagttcaatgtagttcctaacgctgtttctgtacattgttgtactacctaccctatctattgccatgtaaggtatatgatatgtacataacaacatttttctgttcgtgtgaaacatgttacccaagtgcagatgaatgatgcactaaactaactattcacgcgtgcaatgttcttcccttcggaatgtgaatataacttgacgacaaatgtatattcagctgatgatttcttctgtttatctgccgcaagaacactgcagtccagtgagtttatcggtttctcttgtctacaactgagaattgcggtcccggtgtatcactcaaataagctcatattttgtgttctgcgagtttcagaattcagaccattctcttcaaaagaattcagatagtactactgaattgctcgtgctattctctcgccaacgtggcaaagcagtatcctctgatctggtttattaattctttctcgtttgctggaacatttagtggagaacatgactaagttcaaaagtcagaattcggtttcttcctcattccattcagaattcttttcatataaaatagctgtggtaaactcctagtctctgcagcaactaaagtctccccttaaaatataggattcaaatctggaaagaggtctacgcacgaaatgtcactatttcagcacaagtctcatgttctacgtaagacccagaatgtttagttctagaagggacagtgattatggaagttgttatgaacctgagttttaatctaaaaggagattaaagatttaagacgctctcatctttcactcgccaaggacacgttttctacattattacagtacattacgttgggaaggttgatacttagcccaacccaaaatacaagtggccaaaagcaagccaaatttgagagattttatctcgtcgtcttccttcacatcgacattacacaaaggaggaggagaaaaaacagaaagaaagaaaaaaatggaagaaaaattggaacgaagaagaggaagacacgagtgacacgccatgaattctagcaccgaattgtacacatgtgcgacgagctgcggcgacgacgagccgacgggacggtgagagccatggcgtgcaacggcgagctagtagaagccctgcaccggccaccggcggtcgggatcggggagccacgacgagcgcttcttcttcttgtccttcttgtccttgctgccgccgccgtcctcgccgtcgacctcggcctccttctcgccgtcggagctcttggagtcgccgtcggaggagctgcacccggcggccacgccgccgccgcctcctccgccgccggacttgttcctggaccgcacgtactcgatgagcctccacgccgccggcttcggctgctgcgaccgcggcggggacgggggctccttggccggcttctgcgccttccgctccgccgcctgcagcttcggcgtccccgtcggcgtcggcgtctgcggctgcggcagcttctccgcgggcggcgccggggcgtcgctcttcatcagcgggtccgcgtcgtcggggagccgcgccgactgcgacagccgctcgtactccggcagcggcaccgtctctccgacgacgccccgccctccttcccgctgccgacgcagtccatgagcagcagctgctggtggctgcccccgcccgccctccgcctctgccgccgcgccctgaacctcgatcccctgccgcttccgccgccgtagcgcttctcctcctccagctgctgctgctgctgctgctcctcctcgtcatcttccgtgtgaaccaggacgtccatatttatctcggctactggcgccacaaaccatgcaccgtctctctctcccgatctcgcgatctcgcgttgggagtataaattttgcgcaagtgatgatgggggtgcaaatggatggcgagagagggagggggaatggggggaaaagctggggaatgccaagtttgacaaggatttttggctcgcgaaatcgcgtttttattcaagcgtgtgggcgtttgacccgcgcgcacggaggtcggggtcgtggtggtggtggtggtgggcgccgtggcgaggtgatccagccacgcgcagacgcgcccgcttggctcgcgtcgcgtgccgtggcgtgcgcgttcgagggcggggcgcgtaggtggatttggacagttttgacggcggagaaacggcaagccatggccttctttacttggtgaaaagaaaattttttagttacatcagacgtgaccggatatcagaaagggtttttaacacgaatgaacaaactaatttcataacagcacatgtggttactgcagcacttatggttaatcatggattaattaggctcaatagattcgtctcgcgatttccatgtaagttgtgtaattagtttttttattttatttatatttaatgcttcacgtatatataaaaaagttgatgtgatgtttttgaaaaaaaaattagaaactacaccaggcccatatcgtgatcatcagagaggccgggtagtacacaaagtgtgcgttaactagtgacacttgcgaatttcgggaggaggcaggaacgaacttggtcaagtcctgaactctgaccgcattatatcccaggtagtacttctgtttgtgttgcaaatttatacaaaagggaatataaaatcacatttcaagtttcaacacatctcactaaacgacatccgcttctccgcttatcagccataaccgaaatttaagttttaaatttcatttgttaattttagagttgattttgaggtttttattattgtagtttatttttagcattgacttttaaccattggcaacacatgcctataaactattctttatttggtttattcattttttccattttgtattcacggtagttcaaacatcagagcgtttagtagagagttaaaaccgtcgttttgtgagacgatatgtgaaaatgaaatgtagatatatagttttgtgaaactaattttcaaaagcgtatttttcttttatttttttttcatttacaacgtagactaatgaaaggggtaaatgactaatatcatggactgcctattttttccacttcacaaatattgcaagtagagtaaataattacgtagaaatatattagtgatggttatgtcaactaggtttaacaaaacgcggtttccgtgaaaattggactttttgaaccggctcgggaaaaagtgctcggttttcacttttcagttgagttaaaaaaatagattgaattttagaacttttttttgaaattttctgacaaatttcaccattagtcaatggttttcgtgaaaaaaagggaaaaatctttggtccctttctttaagtgattcggttcatgaacctgttgtcaattatatatatgtaaatggggagagtacatataccacctccggaattatcgacagtaaaggaccactcgcctttcaccccagttgcaaaatacaaacataacaaatttccagttgagctaatcaaaaaccctattttgtacgatcattggatctagacagaatggatcaaattaagcactcctcgatcgctaactggccactccacatgacggtggtcacgatctctggggacgcctcgtgtcgctaaacaaatgccaaaaccacgagacgattatctctctataggatctggtaatctggtatttctagtcctccaacgctaagccgaaactatattatagttgcatatggcatctgcttggattagaccaagcagattaagaaaacgagaaaggattttacgcggcgagtcggcgtcgatgcaggcagtcgatgccgtgctcgcacgctggcttcgctgcctttacacgccacaaggcccactcttggtcaataatgtactgatcttaagactgaattaatagggaaaaggatctcatatgcttagcatgatcagcctcgttaatcgcgtaggagtactaattaatcacccggcccagttcgtcattgtgtcctgaaaattaaagataactgtagcgaaggcacatctgatcggcatgatgatcctctcctagattggcgtaattaacatgtaataatccccggggaatggtacggttgcaggctgcactccgtgcatgtagcccactgaatcttgggtgaccggtttgataaggagttgttgtcccccgtattcaccggcaggcagattagtttgatgctaaacacgccggagatccgctgttggacggcggcatgttcatcgttgcaagcgatttggttggaccacatcactcgagccagctgccggtagcatgtgcatacagccatgcacacgcagcttaaaccttgcttagttagcgagatgaaagttaactttggagtagtaaccaacttaaccatgagctagctaagctgatgagccgtgtatacatacaattttggacgttggaagcaacaaagcaaaccgatcgaatagattgtaggcagcaatcgacatgatgcaatcacactcgtggtccttgccgctttgcttcgcgtctcaccgcgtgggtggtcgtaggcctagtccacgccggtcgccggaggcgagaccgagaggcatcagttgtctcccgtaaggttgtgatcgagttgatcaattatagatcgagttacctcccacttaagtctcctgcacacaccttggtcagggatcagcttccgtcttccggttgtagtacttgtccagcgtacgtctccctcttcgccggtgcctgtccgaccaattcaccttcaccatccagaccatcgtcccggcgcgtcattcgggctcaacacaaggctgtttggtcgctggttgcgatccgtttcggcccagtaaatatgggcatgcagcacgtaagaaaaagatgatcgagtatgttttagtatgttttaacatattgatcgaatcaatttgtatctcttaactgtcattgatatgtgcctgcaaggatgtataataagagagattcaccaagattggtaaatttccgttcgtcgcacttattttcgtctgccaattgttcgattccttctcccctctcgcacgtgcgtgcgtgacgaaatacatgtcgcatcatagtacagcagaaaaaaaaagagggtttggatagggctttattcctaggtcgataagaagcggatttgctcaaattcttagaaaaacggaaagaggaggaaataaggattgaaacccctcaatcaatctatctattatattattaaaacagctttgaaaggagacaccacgttcgctggggagactagaaaatcccacattaatcgaagaaaaagaaaaaaaaagaaaagtagagtttaagtagaagtacaatattaactaatttttttaaaaaaaataaattctgaaattagaaaaagaaaaataagatttcaattaggaatataatttataactaactaaaatatgtgataaaaataaaaactattgaaagaaaagaccatataaaacacatgacgagataaattaagtaacaggcctataaaagagtagagtggtggcggttgatataacatataaaaattgttaataaaacaccaaatagaatcctaatgacgattaaaaggagggacattaggcaggcggtgaagctaacaaataaggcggttgctgggacttctagaaagacaaaaatacattgataatcatattcgatttttaaaatttcaatgacaataaaaatgagaagcaccgggcagggtgtataagagtatagttgcagagccgccgacggttgacgggacttttagaaaataaaaaatgaattctaacgatagttatgttcgatttttagaatcacaatgacaattaagagtaggcggcggacgggctgtacaggggcatagtggcatcgtttgatgacttctaaaaattataaaaaaataaaattacaagtccaatttttaaaggttcggaacttctaaaaaataaaaaaaacaatgataatcatgttcgattttaaaatctcaatgacaataaagaatggaggcagcggacgaaccgaagaggagtacaatggcaaagccactaacggtttggcgggacttctagaaagtaaaaatgaacacaaacaataattatgttcgatttttaaaatctcaatatcaataaagagaagagacagtggacgggccgtagaggagtataatgacaacgtttgacgggacatctagaaattataaaaacgaaacccaacgtgacaataaactctaaaaactataaaatctaatttttaaaggttctaagaagaataaatagaaatagtgatagatcgaacaagcaaataaagaaaaagatgacataaggagtagcaactggtgtgacttttaaaaactatataattagaaacacgagaatgataaggtttggtcttttaaagtcttaagacaatgagatagctatttaataaattttaagtaaaatcatactaaaacaatatatgattttgtttgggtgctagctgcgcaattgcgcgggtcacccagctagttatctccaaagatacgatcggatttcacagaggaggtggcttcagggaggcatcgggaagatgaggaacctcgacggaggtaggggaagatactgtagcgatgggtccacaacacagttagaggacatggggggattagtagacttttggttgcttgctgggctggatacgtgattgcgggccgaggccgacgggagaggaataagttcacttgagatccctcatgttgacgttgagtttgaaatacatccctaaaccgcaaaaaccgggaagaacgcatccctcatctttcaaaaccggtgcaaatatagtcccaaaggccaaagcagtattgaagatggttttaggtgacgtagcgctgacatgacacaataagcaaaataaaaaaataaaaaccacataggacccacatgtaactatgtaagggtgtgtttagttcacgtcaaaattgaaagtttgattgaaattggaacgatgtgatagaaaaattgaaagtttgtgtgtaggaaagttttgatgtgatgggaaagttggaagtttgaagaaaaagtttgaaactaaactcggcctaagttatattctttttatcccctctcgctcctgtcaggcggcggccattgctgctccgagcaaggagcagcggataagagcgacggcgggcagggcagggcgagcgtcgacacctcgatctgggtcaccgccgtgcttgtcggcaaccacgaggagaggaaggagagggggccaatatgtgtgttgttgaggaaaaaaaattatgcgtagaccggctgcaaaacccgcagcgtgcatacccgacttaaatgggcggcacatggacgagggagcaatccgacggcgcccctgcgcagctccatccgcaccaagagaaggctcagctcgctcatgtcgactcccacaaccaaaagcgcgcatcgagccgagcgtgaggaatggactggctctggcttagcgactcgctcgcatccttttcttccgcttttctttcccccgccgccgtcgcgatctccttccccatctcgcctcatctatctggatcgtctctcctcggcgccgtcggctagccggtaatcccctccgttcaacaaccgatgcggtcacctctctcgcctgctaccgtcgtcgccgcctcccctgtgttcccctccgcgcgcctcccccctggctacgggcgccattggtgacggcggcggcggctgggtcagctaaagcgagcacgaggtgtgttcccctctacctccctcctggccaggggcatcgggcgccttcggtgaaggccataggcccacagcggctgggttggcgaggacgagcagaaggctatggaagaacatgcatcgatctggactgcaaatctgcaatgcaacgcgtcgccggaagtcaagcaacgaagaaagtagtagttgatatgtctgatcatttgcccatgtctctctgtctttcatcaaaatgctggggtgttggtttctgcaatttcgctattgtttaaccaaattagttcctcagacctcagctagtcttgctgaaagtgatgggatgtatgatgtatcgctcgcactgagtggactgtttgcagcaatgacaaaagcttatgaactatacggcatctttggtgttatgtaatctagaatgtgatggattgatgtgtaaaaaagattgtgattgtttgtctggttcctttcaaattaaaatgaaaactgaattatgtaatctgaaatcttgaaggtcaaacctggaatgtgatgtccagaagataaatcattctcaaacaatattgttgatcatgcataagtgtaaccagaaagtattttctatacctggaggccatggcatctaggcgtatgcatgtaatttaatcgctcatctagttatttgatcgatagtcatgtttcttcctattagttgatctgtgactatatatatgctatagattgcacaagctagctttgatcattcctcaagttggatggctttagattttatttccatttacatgttgcactatgttccttaactgtactcttttattatgttacaccataatttattttcttcgcagtgtcttccagaaaatactttcgagtcgagcatacatgtatttgtattttctgctcctcatcggctccacgatcccaggcgactacgtcgttcgcacgcacaggtgagagaaacgggtccactacggcaggcgaatcccggcggctaggtcgaccttctcctgtcttcgatctggcgctggaagacgaagccgaaaaaaggtcgcttttgctgggagctgagtccgcgtcaggcgccgtccttgccgccgcaaagcgaagccggccgatcgctcgagtgggagtcgacgcgagatcgcgagcgagccgagctgagccttctcttggtgctgatggaacacgaagtcgtgagcgagccgagctgagccttctcttgatgcggatggagccgtaagggggcgccgtcagattgctcgctcgtccacgcgtcgcccatctaagtcaggtatgcaccgcgcttcgtttgaagccgatctgcacagcatttttttttccgttgttgctgttgtcgacgtagcaacagagaatacaagagagttcgttggcgctgcatatataggagtaggattcattaaagttgtagtggcacaagaagaagtagcagcagcgtcgtgttccacttccagtgacactgccgcatccctgctgctgtcgactgcatgcacgaaacacgaacattcgtcatctccggcggcatcccttcttgagctccgcctcgcgcacaacgccttctcccgttctcaaggttgtcgaccatctccgggaacgacgaccttgaaggtgtttcgaaagtttgacgtcggcaagttcggcagcaaccaataacctctcctatgtgcagacctccgaccggtagtcgtgcaagcgcgagcagatggaggccagctcgtccaagaggtgcccatggtgttcgccacgctgttcgccttggccgtcgtgatggcgctcgtgcctgccatgcctgtgctgcaaccagacgaagccacgtccgcgacttcgaccgcggcggcgacatggaaggcctcgacaagaggcccgccggtgtacatggtgaagctggcgccgacaacagggaagcggagcacgtacgtcgtcgctcgatgggcaccggcgcgccacatcggccgcagaggtggacgaactggacgtcatcgtgaacaactgcaagccgccggacgctgctcttgctcggagcatggggaaaaagggagattgttgtttcacttacaggtggatcccacatggttttttttttatttttgtttattgtgccacgtcacccaaaaccaccttctatatttacaccggttttgaaatatgagagatgtgttctatccggttttgtggtttagtgatgagatttaaactcgatgtcaagatgagggacaaaaggtgaacttattctgaggggagaagaagagatgaaagcaggtcggctcggtcgtgggctgagggagacaatgggctaaaaatggcccagagtgtaaggagggtttttatttaaataaatactgaaatgatatttgtattattaaaattagcagctctaaaaatttcagagagtgtaactaactttggagagcttaataaaaataaatttagccatattatttttattttccacacttactttacttttaaattaatttaaacatctacctatttaaaaaataccaagtattccagaaaatttgtattttagttaattacataatgtaaatctttcttaccttatcctcaattttctcatcttttcttcccgatgtaacacacatgctcttttctggtaacttttaagttcaatatcttgaacgtataatgtatggtaaagaacggaatgttgggtgtggttgtgaatatatttccgtttgtgtttttatgaacttatataaattaatccttgatcttcttttttctgtatatgcacgaacttgtacaaattctccaatgaatttccttgatcgaatcgagtatttgtttactactagcacgcatcatgtgaggcaatcccttgtcactccatccgtttgtctgtgtcgtgacggtgtaacgctttgagctgatttatcggctctcggccaccgcgccgcgcgccgtgacgttgagctcggccaccctcactttcctcgccgcggcggcgtcgttgtcgtcgtcattcatcagcctgaccaccgctctcgccacagcctccgtggccgccttgctggcagcctcacgtacccgcacaccaacgcggagcacgtcgacgaggaacgtctcgttgaggaactgctcagcacacagcggtcacatcgcgagtggcacactgacggagacggcatccagcatcgagttctagccataatggctgaggaagctgcccaccgtgcggtgcaccaggatgtccgcctgtggcacccaccgctcggccaccaccatgcctcttattttgggagagatgatgcaattgcgcgtgggttaaggtccaggaattcgcggctataggaaggttgtgtttagttcacgctgaaattggaagtttggttgaaattggaatgatgtgacgaaaaagtttaaaatttatgtgtatagaaaagttttgatgtgatggaaaagttggaagtttgaagaaaaactttggatctaaacacggtggaaatgcaggcacgacgactcggcgcataacatgtgtgtgtttttgtgttgctaatctgcacttctgcagacaaccttcatttcagtttcaaacattttcttcagtaagggagttttagaattcttttttctttagcaagtgaagtgaaaccagtgacggagtcaactcctgagcagtttgggcagctattcgaggtggtgaacccataacaaaaaaatacccgaggttagtagcggatccaaaaaatttacttaaacccgagcaaacttaatagtacataataattcataaaaactctacggattataaaccattgaaacggacacataagattaggtttcatgtgagtttgattaactaatttagcaaataattacatagtatcaagtactaatcaacaactatacgcagcgcagcccgtgcacctggccgtggtggccatgccttggctccgtcgctgctcggggttttatacatactaagtatatatactaattaatatgatataaattagttataattagataataaactcggaatcctcgggaagatcaacgtaggaatgcccctagctgttcaggctccatcaatgacgatttcactatcaacctttcgtcaatcatcgaaaaactctaattgtagtttgagctgcacggtgctactagctgtgctactcggaatgacgaactcccggtctttctgttttggtttgagatagatcagatttagaggtgaaaactactgtcatgtaaattccagatgttggtggttcgtgcgttatattgtaaatactaaacctgagcttgggattaatttacatgtgaatgatctaatgaattattagtacggccattgatacttgtgttcttatgaaatattgatcctgatattaggtgcatctatgtgtgctatgtattgtgaacattggtgggcataggtgctggaggtgcagcttcactaatatttgtattttccaaacggcacacacttgtgacggctatctacgtcaggattaattatcctgaagacgactgtttggcaaattgaaatttctccgacaaaccagtcctaacaggatttcctgatggtaccacggcaggatgtatttccctggcgtgataatggttttttcctgacatttgtggctgtcaggtgtaatctggttttttggtagtgttgagttgctaaattgctcattgatttttcggtaatctatcggtgcttgatggtgtttcatcggattgtcaccgtcactgtttcctcccgatcgatgaggcagtcactggcaaattctattcaattttgaggttgtaccgactaccgaccaaccacctgatgaaccttgtacagttatttaatctcgtataccgacgtgctttaatatttcgataatgacttaaggttacattgctcgtttgctagttgcctttcaaaaattcacagctccaaaaaggaagaaaaaaagaagatagagcggacgagctcggaagtagctcggtttttattactccattacagtgtagcttctctcttatggaaagtcagagaaatgtgagtcccactatcatgagcccacatgtaagtggtctacgtcaaaggagcctcctctctccactaccgatgctatgttaatgctggatttcctttagaaatcataagtttcttcacagcaacaggacctatattaattgttgtcaggtgtgacgattcacagttacacaaatccaaaatctcaaggaaaatccacacaaaaagaaaaataaatcgcaagcaaagactaccagtgtgccataaaacataaatcataggatggtttaatacttgcacaagaaaataattcatcaatatttcataacgcgtgacatcatccaccatatatttgtgtcatcatatcaacttccgtttttgacaatgaagtatcacaccttaaattgctgatttgtttccgtggagacacatgagcattagttccttcctagcttgtgtcaaaacagaaaaccggggcttcttccgatatgtttatacaaataaagtgtgtgttcatagaagtgagtgtgtataccttgtgaaccctacgtttgtactgtttctagaaaaactaaaaggaaaaccgttgcttctcatcagctcttatgcacggagtgtccgtaagtccgttccatctctcaattaattagctaatatgtgaggatatatagcggagtggttattacacaaaattgaattccagttaaggttcatcgcaacgaaaccatatggtgtcagcgagcggcacaagtactgcagatgctgcggggatggccgatggcatgcatccgtcgaacgaaatttgtttggcatcgaattatttattggtttggcatcgatgcatcacctcatacagtatatagcccatccaaaattttgctcttgctatctttttcttgtcaccatctcaaactgtatatagcccatgctattgttctatctctatctcagtctctatcttcttattgaacagaaaatggtctgctcataaggttaaaatgatatttttcatgtgagcaaacacagtgcgatggatggaaatatgacgtcggtgatatttcttagacaaaattcgtccatatgatagcattttgtagaaaacttgctctcgttaatggccaaaaagcgtagaattgaacgcttgtcaatgctatttgttaaaatttctccttattttaatgcgatcggttcaacttgctggaaggctggaagcaata

SEQ ID NO: 18170 - DNA, 10148 bp, Oryza sativa
cgttcgttagtgtgtgttctatcttctctcgtttttcacgtacacatttttcaaacaactaaacaatatactttttttaaaaaaaattatatgaaagtggctttaaaaaatcatattaaactattttaagttagttttagctaatatttaattaattatgtgctaatgatttgctccgttttttgtgcggaaggagaaggttcccaaccaaaacaaaagaacgccggaatgaggcttcctcttatacatgtagcagccacctccatctatgttcgtgttgatgtggttattaatataatgttctttccaaatcaaccgaaccgtaaaaatgatgattgtgtaaaaccgcaagaatgatgatggtcaacaaaagtacttttacagttgctaccgtccaatactatagtatatttagggatggtttggtttgtggtctaaattgatcttaccaatttttggcaatgccaaattttgataagttttgacatggctaattttggcaaggtaaagttgtgtttggattgaagccaaaatagcctaacttaactattgaaatggcctattttcttaggcatgccaaaatttggctttaagccaaatagacactaaacactattgaaattgccaaatattggtaaggctaatttaggcctcaaaccaaaccagcccttaataactttgtaaatactactgctcaaacttatagttagggtgtgtttagttcacgtcaaaattgaaagtttggttgaaattagaacgatgtgatggaaaagtcgaaagtttgtgtgtaggaaagttttgatgtgatgaaaaagttgaaagtttgaagaaaaagtttggatctaaactcggccttaacattgtctgttcgtcgccatattcccaactttctatcacatcatatcacatcaaaaactttcctacgcacataaatttccaactttttttttccaaactcccaattttcttcatacttccaacttttttcagaaactaaacacacccgaagataggagatccgaacatcctccccaaaatcactgcaccgctcgcctctaactttattcaaataaagacaaaaggatcgtaatcccatatagctggagttggaaaggggataataaattcatccattttacatcactataacaagtctaaatctaaaatacaacaagcatttaataaaaaagttatgcatgaaatctgactaaaatagaagatacaataacgcatataccaattcctattatactcattgttgggttttaaccctaaattattattaggtttaacttttatttttggtgtcgctcataatctataacgaggctaaggataggaatataatggactctattttcatatatgtattatatatgttacttctataccgttagacttttataaatcatatcatcaaccatgatcgtacatttcagttatacgagtttataatataataatatctggcacatatatgttagccacatgcaggagcggatctaacgtgggtgcaggggaacttgagtcccccctacacccacaaaacccatggataccctctaagcccccctttaattttttcatcatagttgataagataggaggtgctaaaggtctcataatagtattttagcatagtttaatactaagattatatgtttatatcggtgtactcagtatgttgagtcctcccaactttttatttttggatccgcccctgcccacatgcccacatatatataagattaattcaaatacaaccgtataactcaacagcttatagcaggtacaataataaaaataataaactataagttagctacaatcttatatggagaagataaaagagaagagagaagataagcggattacagatttgtagccagttgcggcatgaactccaaaacgttatgtgtgcataacatgtgggaccaattattaatgagtagtatatatttgaagttaactattatatgaattggctattagattaactatagatgatttgaagctagtaattgcctatactattaaacttgctcttatagagctgtctctataaacaaacctagctacttcgcatgcacgatttccgggatcaaaacacatgtctcgaatatcaactccttgagttagattgcacatcaatcgtaccctattacgtaatactttcacactttactataattccaacactcgtatgatacgatattacggtatggtgcgtccaccgtgcacaccattagggtcaggatcaggcatgggcaaactagagcttgagtatcatgcctagctccataaaccttatcatgtcacttttggattgaaaattcgtccaaacaagcttgtcattttgggagtatcttttgtaacatcaatcacctctaatttaaaatgttctccatcttatcctcaagtactaaccatatattacttaatagaaggcactatagtgatttttcctaaaccctaatctttgctaaataatctagaacgatgattttgttggaacggaggtagtatatatataatttatgaaatatttaagcttccattagctcagtccactactaggagaacggtttttctatgtggttaaatttaattttcacgtgcggtgggctacccgcacacacccaggggtctgagaaaatcgtgatttttgcgtgtgggtggcacaccgcacggaaaaataaaaatcctaaaaaattaaaaaattaaaaaattgaaaacctagaattgggcggcgccgccgcctcctcctcgtcctcgtcctcgtcggcggcggccgaggacgccgctcccgcacggaaaaaatcaaaaatgagcttatttttccagacgcgaccagttataatccgtgtgtaaactaaatgcctccctatccaagaaaatagtttctttagagcgggtacaataagtgactaatagctaaccttcgcctacgtggaagagagaaagtgttggagagagagaggaaagcagacgcttgcatgagagccggccaagcacaagcgcctaggccaattccccaatctacgaactgctgcatgtcagtattctaatatggcccaaagggagcaatcctggtggtcccacacatacataaaaaatggttctgtcaagatgctttgaatgacgtggatgtaaattggagctgatgcttactccactattaaacctgctcttagcagtctccaatgtttatgatcataagtagcattaaggtgggtcccattattcttatagttattaccacaatgtttaaagcaagagtaacctttaagatgggtcccacaatatactattctagtacttcttttattagccatgtaaatttttcatcctcacattcattttaccctattattttattgcttgtggtcaagccataagcttaaagctttcttttgcatttaatgccttatggctttgtttcacaatatatatggtcactataaaaccttatggcgtcttcttatggccacattgtggctgccctaagggcctgtttagatccatttggaatagcaaatggtaaaagttttggtggcaaaagttttgtcattgcaaaagtactgcatgttaaagttttgtcattctagcactaaagtgagagagagaaagagagagggagtggtcccaaagcactttttggcacaatttgctactatggactagcaaatgccaaatgccaaattgccaacttttactactagtatttagatccaaaatggcaaaaagtgctacaaaatggcaaaacttttcccattttggaggatctaaacagggccttacaccatatcacataatactttcacacttattactataattctaacacttttctcactaaccattccgattttacttcggtttccgttagcacgtttttcaaactactaaatgatgtgttatgtgtgaaaactttatatatagaagttgctttaaaatatcaaatatataaatttgttaagtttataataattaaaaacttaattaatcatatgctaatagctttctcgtttgacatacgttaatttaatattcatcttcatcatcagccacctcacacgatgcagtaggccaaaattttattccattatgttaaaagaatcagccacctcacatgatactattatgatatggtgcgtgcgcactaccgtgggtttgatcgtgacaaactacccaaaaaattgtacagcctgctgctgcgtacgcatccagaagaagcccatccgtcggcttctccgcggccgctcgtcccacggatctggaaatcgcatccgcatggtgtctggtccagtataggcccatgcgacgccacgccaggtcccgctcatctcttcaacagaaattagatggagataaagattttcgtgacacgttttttaaattactaaacagtacatttcatgctcaattaatctaaaatatcatattaatctatttttcaaattcgtaataattaaaactcaattaattatacattaataccaccttattttacgtaaaaaacttaattttcatcttcatcttcgtctttataagaaaaaaacaccacccctctctctctgcggcgcctagaatttcttaatctgagacctagaccctgtttagttaacaccaaactttccataaactttcaacttttcatcacatcacatccaaaacttttctactgagtttattttcaaactatcaactttccccgaacttctcttcaatttcaaaaaaaaaaaaaaaaacactgccctactggatgccccggccacgaaaagagattcgcaatcgcgattgctgctgcagctgcatgctgatcccactgtactctccaggtaggaggacgggggtgcgtggtacagttgacatttgatacttctctcgcctttctttattattctcccgctcccgagacgacaggaggaggtggagggggagagccatttcttcctcttcttctctcgccggcggcaaccctgcgagcctgcagtgacgccgccgccgccgctgcgtcggttctgagtttgcttcgtctccgggctcgctggtatggagactttttcttggtttccctcccttccatttcttgttcttggtgttcggcttgggatgcctgggatcgatggctgctgcgatgcgagagattcgtgcctcgttgattcatcgcctggttaatacgagggttcttgtattgttcttggtccgggaaaatgttaggtctgtttggtaattgtaatcttccatccatagcaccgtagaggtagagctcaatcttcggctaaaatcttgggtattttacggttctgaaaccaaaaatcttgtttttttttttctttttggtgatttgttcttgcggtaattaggcataattcatcttttgaggggcaatatgggtagtctcacaccacaggacgtcacaaaattgcgaaatcttgatgatgaattccgttgtatcatggtatcttgtcagatctatgatttctgaccgtatctgtatttagtggggtatgcggtagatgttagattttgtttttgagcagttgcagatgttagaattaacaggttctaaaaccactattatctttatgctagaattaacaggtcctaaaaccattattatcgttggtgaaatttctcttagtcaaagtccaaaagaggatgctgtcaatgctgcctcggtagtcatatacattgatcggtacattccaccccccttttctttgtccatggagtacatttcattgaaatgtcgaagtcaacaaacagaaaattgcaaaccaagttagggtcacaaatgtaaagcaggatccgtgcttgccatgttgtccttttctttttctgacgagcgaaatgcccgtacattgttacggaattaaaaaaaaatcatatcggcacatgtcaaagaggaaatctattttgaattaacatcaaagtttttgctgttttcactcccgtaaaatgggctccatttattactagcgtacaaggattatcatgattgagagctccaggatctattctattcgtgacttctactgttctaccgttattttggtttagtgggaggatagacaatgatcccgtatgtcagaatttgagttggtggttggttggtagcaaattcaccactcacgatcaccactacttcctttagatggagtatagattcaatctgatttctggcttcagtgaattgcttgcctcttacatgttctagacttgtagtgtgatgtcaattagttaggacttacttcatgtcaagtcgctggcttactgaataaatatgtgatagtcaattgaggagaggcacctgtcacagacaaaaagtatgaagtttgatgcacaaatatgggtccaaatccttttagtattatatattttattttatttattcccatctagttatggtaatgcattaatggttgcatctgtgcatggctgattggctggatgcgcataagtattctgtgaaatatcaatattggtgcacagagaactgaagatgttacaaacatgggcaaacttattgttacactaaaatattacaaacaacaagactataagtatacaggaaaaaagtatgaagtatctcacaataagagcttctaggcaaatttctgctgatgaaaatttttttgttctgttcttcggacttgtgctgtcttgtaagctggtttccccagcaaatgatgccgtgttggctttctataaatgccaggttgtatgacctactttctaaaaaaatcattgaatatccatacaatcttttttattattatttgtctagtataggtttacttctctcaaaagtcttgtaaacttctctagaagttggatttatcaagaaaatgctgttagccactattgggcatagtgatcttgtttgcagtctatatatgtatgttattcagctgttcatttagttgaacacttgcatttcatatttcattattcttcaaatatattataatcacacatgcaatattcaaaatcttatttcaaatgaatgatcaaagtggttttacacaagagcgatgaggttaattactaattatgtttgtgtgatgaagccctatatcctagtattagcgtccttaagttctcctctacatttattgattcaagtagttatttgaccactagcattggtctgtcttacaccatgatatttaccccatttcttccccttttggggtaactttgaagttgatcctcgtttagattactcatctagaaaatagtactctctgatccatgaggatgttgagcaaaggaccacattatatttgaatcaatagcatgtaatttctgtttcaggattgagctttgtcaagagcagaagaagtcatgtttagctttaggaaaaagcatgcctctcgcttcgattcagatgacattgagcaacaagaagcaaaggtactttcaaaagctatcatgtcatcttttataatgtaaaatacatggttctgaattacatcgacacactttttgaatatgttactacaatattgattttaatataaataaaattgtccaccttcaaaagtatttttttagaatgacaaatatgtttactgtggtatgaccatgctcagatgagtttaaattgcattgctcaagctgttaatttttatgggtactgttttgagtcttggcaacggagtgtttcaaatctactatgctgttgccaatttctcatccaaccatcttcaatgagcagatccaagagctcagagctgcacttgggccgttgtcttcctctggtaagaaatattgtactgaagcatgcttgagaagatatctagaggcccgtaactggaatgttgataagtccagaaaaatgttggaagaaagtcttaagtggagaacagcttacaggccagaagacattcgttgggtaaatccactattcctttttcttctcttgctcaattgattatttcccttgaaatcttgttgagtgactagaccatcctattaacagctttcttctgtaattttagcccgagatttctgttgaatcaaaaacaggtaaaatgtacagaacaagttttgtagatagaaaagggaaaactggcgtcattatgaaacccgcaaaacaaggaaaaattctggaccaacgttctttttaaccttttcgccttcaaaaaaaactaatgcttcctattcactgtttcaaacattcaaaacacatcgtcccatgaaaggcaggtacggtttcttgtatatacgttggagaatgcaatcctcagcttgcctgaagatcaagagaaaatggtttggttgatagatttcacaggatggaccttggcaaatgcgacacccataaagactgccagagaatgtgcaaatatcctgcaaaatcattaccctgagaggttggctatcgggatcctgtttaatccccccaaagtatttgaggctttttggaaggtacaggctctgattcgttttcataaatgaaatattgtgctatggatattgttctactcacatattagaaaccaagttatagtgtttgatacgggggaaaggaaatcttgattctttttgtaactcaaatgtttcaattgccttcaggttgtcaaacatttccttgacccaaaatcaatccagaaggtgaattttgtatacctgaagaacgaggagagcatgaagatcctgcacaagtacattgatccagaagtccttcctgtagagtttggaggaaagaacaatgtggtgtacagccatgaggagtactccaagttgatggtgaaagatgacattaaaatggcaagcttttgggcatcggatacaaaaactgaccatgttaacaaagtcattaacgagcactccgtccccgaggttacgcaacagtcgtcgctggtggctgcgaaagcgagctgaggagtatcaatctgccatgatgggggttataaaccaaaacaaattctaaaagacgatgtagaggactattggtatgttcatgataaataaatggaactgcagaataatttacctgggatgttacagctccatgtattactgctaaaaatctttagctaaagaccagtctacaaaaaatctttagctaaccgacctgagctacagattcagagattatagcgagttcattacaaactatcaccagtaaaaggaaataacagactttaatttgcccggtattatgtcttgtctctggatgtttttatcttaactctgccattatttgtctatttggatgttattctcagtgttctactttctttaattattcctattccgaacagcaccatgaaactaggatggacaattcggattctcttcaggcctttagtggaaaaaactttataacaagttgtagggcatcacctgtaaggtgatgcaacttctttcaggcccaatgtctttcaaccattccctacaatcatttacacaagatgctttttaagaaatggtataagaaaatttgacactgttaaatacttcatccgtctcataatatagtaaactagtactagtagtagtagggacacatcggagacacattattgtactacaaatatccacatttataataccatatgtcccacaagatatttaaaacttggcattgtttaaataagatatttgcattaaaaaatgccgcgccaggaagggttcgaaccttcgactttttgtttaggaaacaaacgctctatccactgagctacaggcgctctcaatgatgatatggccaccacttcttcttgggccgggccggcctgccacaaacggccattgcaattttggccttttctgataggccgctgtctcagcttggccttttctgaaccctgaagacagcagctcacctagaattgtactctcaaatgaacaaacaaacagattacacaccatcaaactatttacagagaaccaaagagacgaagattctgaaaagcagcacagaaaccaggcactgccaggcgtgaatggaacgaacatttctgctatgatcaacaatgaaacaatcaattacagtagggaagaagaaaaagaatcagctcgccattctttctttttaatcaagaggggaaagaaaaataacaacattgccaagccatttgtccagatcatgcattgggcaccaaccactaatccactatacgatcgcttcc

SEQ ID NO: 18171 - DNA, 10438 bp, Oryza sativa
cattcgttgcagcatcatttgatgcactgatacctagccttccagtcaccagctccaacaaaacttttccaaagcaatagacatcatatgaacatgatgcagatggagaacctggttaaattagaggtttgtcaatgcacttgcatccatgaacctaaaacatctatagatacagttatacaacacaatttaacagtgtcatcatcagtttcaaacattaggcagctaacacttgaaagaaatgaaagcaagcatggatgcatggacttaccagaagatccttgatccgcagtcctacatttcccagaaaacaacacaacattagaaaatgagacgaatttcattcagtgcagcaaaaagaaattacataaaataaactggcagcagaacatgagccatatcaggatctgaaatgctaggagaaagtttccaattactttcgctaccaacgggcctactagcactatttttgtcctgtgcatatagaaaccaatttggaatttgcttagctgcaccctcaatacatgggagaggaaggataatatagtataattgactaatatatattcggaactcaaagcacaagtttaattcaaatgttagcaaaatgaataggcatgatgaactgaacagcgaagtgcaatcaagcattttatggatattcgagtcttacacgtagagctaagaaacagagtatgcagtgctaaaagttaaaacttacgatgaaaatctcaacagctttgtgatgacattttggtggccttccccttcttgaggacacacctcgctcaaactcccaaggcgcacatcaaatttatcatcaagaagaatactgctagcttgcacgtccctgtggcagatcatgatctcattagttcaacaaccaagattactcacatggtttactgcatgtttcactttaataccaaaacaatgctttcctagcgaaatgaagccaacaaagaacttctgatgcatttgcatgatatcaggaggggtgctcaaatctttaacattgtctagttggtagtaatatagtgcatagaaacatctcattgaaagtcacataaaaggatatttggaccaactgaattacggacaaggtgatcacacatattcagatttaacttgactataaaatagcatgataataaagaagtgcctatatataagatggaggatctagcaagtatacctgaacatagcatgccaactcatcagaattgcaacgtccaataaaaaacaatgctacataaccgccctccatttcccgcgaggtggataaacaaaaaacagtgctgttcatattctgatttttttcggtttaagtaagctatggatcgtataattagtacacagcagtaattcagcaatatccaaattcattaaatatgtggccagagcattccaactgaaataattttttcattcacataaatacaaagaagtttatacccgaaaagcaaacatccaactgaaataaattttgtattcatgtaaatacaaagaagtttatacctgtgaaccattggtggattacactcgtggtggagatagcatagtgcctctgccactcctgttgcaattttcagcctctttatccagtccaaagattgcaggccttcctcttcctcccctgactttctgtgcagtgcacttgataagtcgccattccggacaaatatatacacgagaaatttctcctcctctttatcaaggcaatgccccatgatcggcaccagcctttcatgcaatcctttggcaaataaatctagctccgccatataagcatctttcttagccatgctggaagttatcctcttcacaaccacagaggtcccatcatggagcgccccaaggtaaagatcacctgagtgaccatgcttgataagcctatcatctccaaagtccgtggtggcttcgacgagctggtcataaccgaatgaatcaccgacctttgccaagtttgcaggcgatgcagaaggttgcgtgccagcagtaactgcacccccaccagttccagacgctcccaactgtgtgttccgcacgccactttcccgctgatcattcctactcccattcctcctactcccagagcacaccaagcaatacaaaatggcagcaatcacagctaccaagaggacaccgccgcaaatggctccaatcagtatatacttcaaattcttgtgcccctttttccttcccggtgaagctggcatcgcaggctgcggtgtgggtgcaggacctgaaacattatacggcaaaccacgtgcagcatagaactgctgacattctgcctggctacgctgtccagtgacatcaacgaagcaattcaactcaaatgagaaattcccaccatcaccattggatacacccagtttgccgtcgaagtaattcccagagatattggccagcttcgtcctaccgaaaagttggccaaaggatcccggcacgccaccatagaagaggttcccggacagatccaccacctgtacattggatggaagcgcgagccctgtatccggcaatgcgccggtgaggttggtccgagacacatcgagaacgctcagctccgggagcgaccagaccgccttgggtagctcgcctgagaaggcattgccagagaggttgagagtcttgagccgagcgagcccggcgagagcactgccagggagctgccccgagagtagattccccgcgaggttgagagtggtgaggttgctgaggccggcgatggccgaggcggggatctcccccgtgacggcgcagccggagatgtcgaggagctggaaggtgggcgcgagccccgcgccgagccacgccggaagggagcctggcaggccgaacccgggcgcgctgaaggcctcgagccgcgtgaggttgcgcagcccgtcgacggcgaaccgcggcgccaggcgccccagccgcgtgcggcgcagcccggcgaggtcgaccgacacgacgcggccgccgctgcagcgcaccccggcccacgccgtgcaggggtcggcgcggcgcggccagtcccgcgcgcgcagcccgagcgagccgcgcagcgcgtagagccccgagagatccgcccgcgacgtgaggttcccctgctgcgccaccaccgccccgggcgccgccaccaccgccacgagcagcagtagccgcgcccagaccccaccaccaccacaacaacaaccaccagcccgcatcatctcctcctcctccatccaccaccaccaccaccaccacctccgccgccgccgccactccccattcctccccactccaaactatggatggaatcgcggagaagccaggcaggcagcggagagacggaattgggagggaaattaaacgcaataaaggagaggggcgcagagcaacgcagggtcgcaggtacagaagccaccaccaccaccaccctcctccttgggggctcaccttctctaccccgccatcaatgcccaaagttacactcccccaactgcctcccaattattaccccctctcctcctcctctctccgccgatccgaacccaaattccactccactccaccgccgccgcggtcacgccaccgggtgcgagcagccgccgccgccggagccggcgaagagagacgacgacgacgaggaggtcaggaggaggaagacgaggagatgggaggagggagagagagagagctgatatcgtggggggtttcggttgtttaaggaagctgttaaatgttttttttgaaatcaaatcttccgggctgaaatggcatgcgatttccccgacgatttccccgatttccctgtgcactggctggctcgctcactcacaacttgccttttctccctggctgcgttgcgttttgacggcgctgcccctggtgcgcggggctcaattgccggcggctgccactgagagggtgagggtgagtgaacccggccgcgcgtggtgggtgggtctcgctctcgcggcgggtttggttcggtgcgtggtggctgcacgtacggccggttgcgaggagggggggtttggtggggtttttcgggcgggtcaacgagggccgtgggcgcgggcgtcgtgcgcgttatctttgggtgggttgaaattcagattttacgtgattttcgttgacatgctttttaaattattaaatagtgtatttcgtaaaaaaaactttctatgtaaaatttattttaaaatattaaatatatttatttatcaagtttataataattaaaacttaattattcaaacaccaatttaatctttatctatgtcagtttcatacaccactaaccatcgtagatgtcgattctgattcatttttgaattttctttttttctttgtgcttcagataagagtgaaagtcggatgtataatctgtgttgtaatccagagcaatgttagatttatgttgtgtgctgtgcacgtagagatatttttctttattttgggaggacattataacgggctaaatagatatgatatgatatgatacgagcatttgatgggcggcagcatttaggaggcgaaaatacgacagttcgtttctacagttgtttacgtgcaggggtagtgtcaattaaccacagccaggcagccagcctcatgctagctagcacgtgagcattgaatgtaggatttctccttttaaacggatggaattgatgtattactggatttgcaccctgcaggtttgccggactgggaatgagatgttgtagaagaattgcaaaatgcattggctgctgctgtacccgcaagcgtttcatagcatccattgatttttccttcttttttttcttcttttcccggctggctttgacacggcagtaatgagtaatgacaggtctagtttgtggtggccactggacaagccactactactactacgcggtggagccatcgcgacgggtggatcccaggtcggacgcgtcaggtaataaaaacgaacagaagagagcgcggcacgtcgcgcgagcccaccaccacaggcggcggccggcgtcgcaaaaccgcacaaggcgaggcgaggcgcagcgcaacgcaatacccttcacgtcacgttcgttcgttcgttcgttcggacgccggcgccgcggcggggtggaggcgtatcccattcccatccaccgaaccgtagtccattctgttagcaatgtttcatgcatggcatgtctgtcaatatgtttccttggattaccaatcctcatgattcctctcggtgctgttccataaaccgattgagcaatcttagaaaggttttcgtgtatatgtactccacatctcaatcaatggatttgtgcgttgagtcaatcactctaacatggtatcagattctctttccgcttccgctccccaaccctagctctcgatgtcgctccctatgccagccgacgccatgtcgtcgcctcctccccccgccgcgcacgacgccgtcttcacccggatcgtccaagccatcgccgactccatccacgccagctacgacgtacccgccggactctccgtcgaccccgacgtcatccgctccgtcgccgacgccgcggctgcccaggccaaaacggcagctcacgacgccctcgccacccaccttcgggctcttcttcaagtgacagaacacgacgcgtcgtcggccctcgtcgacaccacgtcgccggccgccggccccgtcgccacacccacgtccggcgccatgcccacgctggtgatcttgtctacttccgacctggcggtcattgcggccattgagcaatcttaggaaggttttcgtgtatatgtactccgcatctcaatcaatggatttgtgcgttgagtcaatcactctaacacattcgtgcgccgcccgcgcgccgagagaatgtctcggtttggctcacggtcgcctgcctcttccttggatttttgcagagtgcgcgtgcccccgtactttgacggcttctcccgtcccgttgacacaacacatcatggaactatctaaaaaaatgctagtacaattttttaagggaaaaactttcaaatctaactataatataattgtaatataattttactacaactataatataactcgtacataagtattaaaataatacatgcaactttatatctaacttatatagatattacaatgtagttatagtgcagttacaatataactatagtataattatattataattacactacaaatatactatacttatacttacagttacttacatttaaaaaaaattgccaaaaaaatttgcgacagttttttagcaattccttagattaataggtacttctaaattatatgtagtatattatacatataatttttttctagaaaacaatatgggtattatcttataatagtgtctaaatcaaacttatttacatctttaaataattatcacaacccattcagcacaaaataacacaaagaattaagaaacgatcagaagtgttacgtaagcgtagttcaactagtgtttttctctttttttaactaatccacctgagttcaaagtcgtagtgtttaacacggatacttatatttacggttaataatttttattgtatttaaaatatcaaaagtatttttttaaaataaaacttttatacattttttcagtgattatagcacaggactgagaaatagaaaacagtgaaaaaaaaggcacaaaactagttccattcttcgactgcttctgcagtgccgtggaggcgtggcatcgtctcttggatccttctgaaattccatctacttctatcttcttttatcatgagctgtattatatataaacaagaagggacatcgatctgttgtactagtattaaaatttctatgcgtatcaacaactgccactagtaccgatactctacttatgtctgctaaaacaaactgcacttccaacaaccatgctccgattcttcccgtatacatacagctcggatgtgcaactgtgggtgggccccctgcacgcaagtattacaccactagccgtggaggcggcctcgtgttagttagaaaatcttgggtaaataatatggtcaagctgtggatgatactgcactattctaacctaaaaaacaaccaaacctacctatacgtgcaatgaaattattgagctatagcagtagctatagcagtatatgtagcactatctctcagattattccccagttgtaaagtgagcgatcgatcgaactgcgccgtttcagtaggtgcggtctccacacagtccatatacctgatagagtgagctgtccatctctctgtgtaccctagtactgtattactgtaccagtcactagctcgatcctctgacttcgggaagataaggcatgggtgaacaggaggtgcaaaacagaaatagataaaaaaaaccctcaattattatactacatccgcttcaaaatatatcaacctaatattaaatgagatttatacatacttctaaacgggtgttttgtgttaaaaaaaggaatcgctggaaaacttctgcaagtttttacacataaaatttttagatttgtggccatccaatcaccttgagatttgtgaatgaagaaaaaattactagaaagaaattctcacgcatatcacgcgtaagagcatagtgctagccaaccaaatcataggtgaataaaagttttatgtaagttatatctgggttacattgtaattacactccaattttaatatagttttatctgaaaatttttcactcaaaaaacttattgggatactttactagaacaacatatcaactgtgtaggaaagaacaacatatcaactgtgtaggaattatttcactcgtttatgccctcaagtaactataaaaaattagataatccatcaaattcaactatcccaatcaaacggggcagtgggagatttagttaagcttttgaaacgttggccatcaacgattcctcaaatgctaggtaaaagaatgtgcagattagtgtaaaaaaatgcagtatcgtagtactataagatctttttacaaacttattataatataaaatttaaaatcttgatcatattttgactacatatcaaatatgagtattatttacgaccagggtactatttaacaatgtgcacccaataatgattccaaaattaaaacaccgtttcatgggtactgtttacaattgctgtgccgtgttatcttggtcgcccaccatgaatcagacagctactctacatccaaattcatgttatatggtagtgcttctcttgacttgtttctgtgaagttatggaggagtactatacaaatcctcacgcaataggtaaacaaatgattctgctgggatatatatgtgggtgtgaatatcaatattttaaatagcgggctaaggtatttagcggttagcttctcaaacagttatagcggcagctatagcgggttaaatagagttatagcggctaaattgtacacgagagcaaatagctagaacccttctcaaacagctatagcgggatagcgggagatttaaaaccctggtgaatatacgatgatatatatgactgcattattagattaattattactaggcactaattagcatacttatgcttaacctaaaatagatgatactggctattgcaaaatgcaagcaggttgttgacaagattagaagcttgagccaattataggagactctagtcgctggtataatagcatgcacaaagtactactagcccagtggcacagtacagccagtaggttaatttgcttatcaatgcaaccaatagcactagcatcaacggttagaaggaagttgtacagcattacataggcaagctagccaagtagcgagacgttgatctccaactagcaagaaattaactatgttggtactaattaatgaagtctattctaccgatcaatcaacagtgtcaagtaggtaaatgcgttgagaattttgtgaagacgccaattaaacaattgcgtggataaatagtttgtccaatcgaacagtatgcaaccatccgataattgaaaatttactttaatttgcacgtcttctacttgtaagccacagctgcttggtaatctctaaattaaagtataataagatgtgattctatcctagctcatacccggcctccaatgaagttccatagatcttaaagcacttacttaggggtagttaatagtcaacaacaattgaagcaaagcgtgagtgtaaatcacttaggaatactactcagcaaatttgagagttatatttcaaatgacattaaccaacaaaaaaaaattaacctccatgtagaattattcttgacattatatctgttataatttgatttctaatttattttttgaattcgaattctgaaacttgaattgtagagacattagtactgaactactgatgaactttctgatggtgctatcaacgggacaattaatcattcaccatgcttgctgcttcaaagccaaccgttgatccattccaataaaggagggaagaataagaataaacacgtctgatggcatatcgtccttttgaaaaggaatcaagcgctgtacaaaagtcaaaatggctataaagcccactaaaagcaggtacaatagcatgctataagccagctgcaaacatattttaagaagataaatgaggagagaagggcagcggggtacagatttgtagccagttgtagcacggattctatgacacagcgtgtgtatgacgggtgggaccatgtattaatagtgtagcatataactattgtatgaataagctattatattggctatagataaattagagccagtagttggctatactattaaacttgctctaatgatagtatacttttaagatgatttaatttcacacgcatgcgcctgctataattaatttaatttcagcttaggagacaataaaatgcattgccgttctgcaaagaacactagaacgaacatgccagtttttcgaagcatcaaactaaaatacgatacgttatgtagatttttgttaactttaggtggagatttacaaataacttgaataaatgcatgtctcctttagtgttagagcattagtctttatatcgtgagttataggattgcatgtgctctctgttgaacaaattgtgtaataagtggttgtaacttcgttgatgcaaaggccagattttattccattatctaaaaaatctaattaaagataacgtggaggagtcgtgaacaaattatttctctcgtcagggtttgaagccttatgcctatgaatattatgtacatgtggctatttcagtgattagttttggtttaccctttccaagaggaaaattttgagtgcattactatttgtttggtacacatttagccggcacgtcagtttcacaggataggatataattgaaaacgagcatgatataattgacctgatcactctctctctctctgtgtttttcttttgcagcaatagaccatactaggtag

SEQ ID NO: 18172 - DNA, 3346 bp, Oryza sativa
tggtgcaaattagctagctcactctatcactgcgctgcattagcttagcatgacacgtgtctccgatccaaacctccatgggcccacccaatcaagtcctgatggcgaataaatccttctctatctggtcacccatcacacgtgtacagagcccggctagctgcatgccctttcagcaacttggctttgttaattagccgattaattagcgtcgattaaccacagctccaggttctacgtaatcgtgagattaacctaactacaattttaattacggatttgaaaaaaatgtgcacttgcttacccatgcgtacacagttatatattctcaaaatattgttattatattccctccgctcctaaaatataatggattttggttggatgggacatatcatagtacaataaatctatacaggaagcctgtccaaattcgttgtattatgattcttttttgttagataatgaaatatactttcagtatttgctcaacgagctacaaccaattattacaccaaatcgctcaaaagcgttcacaatctaatgagaccaaaacagaaagcaacacaaactaataagcatcaacacaagattaaatatctacaattattgaaatcttattcgtgaaccttcattcgaagttggcaaaaatgtacatattattcattgtactataatatatcatatcaatcaaaatcttttatattttgatataaagagagtattagttaaagatagatcgatcctggttggacaaatccaaccgcagttcaattccggcataatccagggaaatggtattcatgttctaaaacataggtagcgtgttgctagagctatctatctatctatcttctacctgtcgctaatgatcttttcaactgtgacatttgtgttactcaattaatccaacaactccccagcccaagagtaattaaactaaaccacgtaattagtcatgtaattaaactgcctgcagtccattccggtgtgacacttgcgcaaaacaacgagagaagcttcaatatgtttcttcacacgtgtgcgtacgtagcgccaagtggatcctcaatgattaatggtgatcaatttgcatctaataattgagcatcacggattggtatggttctcatttaattacctttggataaatgtgcatgacaaccgaggcatgtttgatggtggagttgtatgtgtaacttaattaggccttttttttcttctaattgtttaaaatttagagtattattttaatgggtatttagggtttcaataattatgggttctttatcttgtatttggtgcttattcgtttgtgcttgcgttttgttaaatctcggtgtgttcgtgtgaaactatctgtgtgcgattgctttagagcgaatttgtataataatttattgtagttcattaagtaaagactggattttattttattatcttaaaaaaggtatttagggccgggatctagtcttaactgttctactctcggttccaccctgcctttaattacgtttactaactaacggatatggtgtttgatttttacaggctctccgtctcttgaccatgtgtaaggatcagcacacgctttaaatggatatgtgtttggtgacgtgcaatcgaaaaatgatatagttaatagccatatgtcaacaatgttctatacagtaattagcatacaaatggaaacggaactttattagccatgtgccacattggctacctgcaggatggagaggatgcatatgcatgatatgatgttgtacgaaccttatcataacgcgtaaagacaaaccgaccaaaggtcaattacgcaaccggagaattaattccaacacctacaactctccgttttaaatgtacatcacttttaaacatacgttttatcattaaacttatttaaaactttaactttataaaatacttactcagtctcaaaatataaaagatattttggacggatgagagatttacttagtagtataaatctggacagactccatatccaaattcattatactaaaagttttcttatccgtccaaaatttcttatattttaaatccatatccaaattcattatattaaaagtgtcttatccattcaaaattccttatattttaaaacggaggaagtataagttatgcatgcttaaaatactatgaaacaaaagagataataattgtataaattttttcaataaacaaatgattaaatatatatgtcaggaggaaagtactaatacagtacatatatgtatacaagatcacaatacacaccgtatcattggttaggtatatatatgagagagatacatgcactagtataatacacattcacagtttcacaccaagtagcttccaagatcacaacacttcatagcatttgttaggcacgcatgagagagatacattcactactctactcttagattttacatttttacaaagtatatgtatgactttaatcttttctatgaacagaactatatgtacatatttccctatataagcatgattttgatgaacaacaaacataaaagggaaaacatttacatgatcaatgcacgcgtatatatatatcccatatttaattagcatgtgcatgcagatgcagtgcaagaaaaaaaactgcaagctaagacctcacgacgtcgccgatggctggcggcggagcaccggcgggatgacggcggcggcgaaggggccaaaatgaggccgtctggcgccgaacaaagcggcggacgacgacggcggtgagccagcgcccggagacggcacggcggcggcagcggtgatggcggcaggggcgccgccgccggcgaagacgcgcggagagaagctctcagaagctgccgcagcaacgaccttgctatgctcacatgaagggcacacccggaacaccgtgccggcagcagctggtaggtggtggaggccgtacagcggcgggtacgacgacgtggtggttcggagagtgccacgcagctcggccacctccctctgcagccgccggttctcccgcgtcagcctctcgcagcagcgcttcagatgctcgcagtccacctccgtctgcttcagcttcgtcctgagaatgatatatacatatatgttgagatgattgattcatgaatcatgatatagtttggagaatagctagctatagctagcatcattcttaatttggttgagatattggagaacacagcaaattaaagggagattagtagtatatggtatggtttgtttgttacctagctcttctgttttggaaccagacctccacttggcgcggtcgaaggttgagccgattagctaaatcactcttttgtttctgtatacgaaatga

SEQ ID NO: 18173 - DNA, 7166 bp, Oryza sativa
gtcaagcattgacaaagatttgtcatttgtggatgttgatgcatgagcttgtgatcacaaatcacaattagacgccggtggacaacccattttcttgcagtggttgcctggcagctcgtttctgaaccagccaatcatttcacaaagccaataagctttgagccgggcctatataattatgattagattctgcaccaaagattctacatgcatggaccacaatcgcatacatatatgatttgatgtcatatatataccagtactttattatgtagggagatgatttgcaagcttaacattgaccatgttaggtagtagaaacattctatctaaaatggatactagaaggtcaggttaggtagaaatgtttggtaagtttcaacttgcaaaactgaatgttctttttggaagtaattgggctatggcatgtgactttgtgacactagaggtttcagactgttcaagtggcatactggagctgcttctctcacttttgacattgtttggtagtgacatactaatcatacccatgatctaggaactatttttcccccaacccaacagagtacaccctctgtaggctatgtccaatagacaattcatgtataaaagtgaacttaatttgagacagagaatatagtaacttggaaatggcgacatgaattttttttttgttcaaacagcccccctaagtagtactacagtaatgtcaacaaccaaatcccaattgaaaatgattgataactgataagcacaggagtggcatggctaatactttgccagaaaaccatgccttgttacaccctatcgtcttctgcatcagaggtttggttggaccaatacatcaagtgaagtcttcagaaaagggacttctttagcttagaaaagccccctgcaaatcaacaccaactcatgaactgttaattagaatccacgaatatactcaggacgtgtattgtaaggcaaagaaaattcccactgttctacaaagatgtgtatctgtcagtggcctactggtcaagctcaagcaggataacttcagacaagtctatgcatacatctccgtggaacatgtggaatgcaattgtgtaaagcaggttgtaaagttattatcagttgctagtagacttaatttaggtaggaaacgtatctaggactcaaggaagtattttctgcatgcaactacctggacttggtttttctaaaaataaagaggattatggatagcttacagatgcagtatactgaccagtctagcatttaggttggacataagcagatgatgtgatacaagagcttacttgtcatacctcacccaatcttcgaagtgaatacatgtccccagaaatatgaattattgattccacataactatttctttctgattgaatcatatttcgcattcttatcgtttaagtatcagatatttcgtattcacttagggatgacatctgaaacggttatccgcgataaaaaaagacatctgaaatggttaacatttaataataaactagctaaatgcccttgctttgctacggataaaaggaaaagaatatcataatactgcattaaataaataaaacattttttcatgattacgttacccacctttttgctacaaggaatactcacctcaatttaattttatgtggctatctatgtagatctagttgttatgtaatattaagaagttcaagggataatgtataaaaccacaatgggaataggtgatgtaatctgccaccaccattagaatctttttaaaggagtatagaaaaccatatgtgcaacaagtaaacttcatgtaaaattggttagcgcaaaaagatatagatccatatatgctatttatattcataaaggtctgtttactccaaagtaacacagtgaaactaacttgagctgcttgttatgcaattatatttacagagttactaaactatgagcagaactgtatagtgcgacacaaaatttcacatatcccgtaacaaggttatttccgaatcgcctttacattcctcgtctatcttggcatacttgttaaatcaatcttcagaatgacaagtccagtacatcaacccactgcaaggcataaatatcaccaacaccataaaaaccagaaaaataagggtgtgagggaaaatgtaacacaaagaaaggtagagctaataccttataagcacaaacacagactgtaggacgccagcaacaccagtccatgcagatggacctgtatctgtaagtgcgtcttggaccaaaaaaccaacagccccagccaaggaaacaaaagacaccacgtatgaaacaaaaagccagagtttcaacctgcaatttaaatgtaatcattgtcatacagtggataatgaatgacagacagatggaattgtattaatatggaaaagttaccactttacaagggagtaatagtagacagacacaagtacacaacagatcagacaggtttttagatatcatcatgactcgacatactggtttatgcatggccgtcttggcttgtcagaggtttgaataacagaatcatcttttaaaacaccagcatgcagaaaaccaaatcgaacattcgataagttgcgggtagtaataatgaactaacgactaatatgatgtgccattctgttcttagtttgtgtggcacaactgttgtcagtataatgtagatgtatccctcagaagagtaacagatcgaagatgaatgaatgattcactcttattccatggtaatctcgttcactcattgacaacgaaaaatcatgcttcatatatttctctgagaaagtaaatcacagtttacagagccatataccgtttccattgtctcgtatcattgccattctagcatctattcctttatatcccaaaactaaattaaagaaatatggctctcttctccacgcatagaatacaaaatgagcactactgtgttcctaatcacatttcgcaagtgtaaacacgcattcttcagaaagcaccaaaaactaacagctctgagttgcaccaatggatgcatgcgcgtagcactaaatcacaactggcaaggttaagcattattaatcttcccaaatcaagctcccagaccagtaaataatctaaccataagcagcgatagcactgatacccatgaatcagtaaatcatgactgaagtttccaacactcctgcaaaaccagaggcaggattgcagaaaccctcgcaaactaaacacaaaacccacctaaaaaaaggagcgaaaaacaaagaaaaaaaacttaaaattatcccctcacctccactcggagtcgtcgtagggcgagtagtaattgtagttggcgtcttccctcttcacgcagttgaacatgagcgcggcgaacgaagcaaataaccctaaaaaagaaaagaaccaaacccccaacaccctcgatcggttaggttaaaggcttcaatctttcgatctttgggggattagggcgagagaggaagaaggtggtgttaccggggaggtagtgaaggaacgggacggcggcggcgctgcagacgacggcgtcgacccagaaccaccagccgaccccgaatacggcgccggcgacgcccggccccaccaccgcccacaccgccgggaagctggtggtatccatcgccgccgccgggaagaggaacggagaaagttgagagcttttttttcagtgtggtccttgcaaagctgctgcttttagccctcctgctgcgggtgtatacattttcttttaatcgcaaaaagaaaatacattttcttttacgcattggtccttccagtttgtaaaatttgatgtagtggcaccggttagacaatgccatctttacagaaatttcacggtaaatatgtatggagtttctgcaattcaagcacgggcaaagctgctaaattcacatatcaacgcggcgcaatcaagaacccgccaatttgcactgacataagcagcggtaaaccaattggttcgcctgaccagccgctactctcgggagtttgttaagaacacatatataaaaaaagttttacttataaattaatttttattttctaatgaactttttttcttattaaaaatatgagcaaccgatgaggacctgaatgtccggaaggcagtctgagccaaaataattttctgaaagcctttcttccatttgccaaggacagagcacgacggatcgtcattgcttcatctatgtcagacgtcgcaactcgcaatccctgggatcagctcgttgaaagcaaaaacacatgagccattgttgtctcagatcaggacacccactcccattggacgtgaagagtggaaaagtgcagcatctgcgtttatgaacattgttccagtctgtgctggaatccatcctaaaactgaagtagagtcgtcacactagagacattcacaggtttggagcagtactgtacaatgatctccacatacaccaaaatgaatagaaaatccacgtatgaatagaagcattgttgttcctggcatcatttcttgcctcccaaatgtgccaaaaggtcgcagcaagagcagtattctgaatgttggatccacgcatcaggaagtcaaaaatctactgtctcatgtttgtgatgtttctcctgcacaagttggggtcaaacttttgtctaattgcctcccacactgcatcagcaaacgggcagaacaaaaatgcatgtttgatcctatcatctctgttgcaaaagatacgcatctatccatagctggaatatgttgtctgaaatagctggtttagtccaattcacttcatgaatcatacaaattcagtcaagatttcattttccttgtaattttggacccaaaactcaaaattcagggtccagactccagacctgaatgcatactagcaggaaccaagtttgagaattaacaagcaataagcaaatttcacactctattgcaggaaatacagatttttccaggaaatgctagaatataagcagctacacagatactgttgaaattcatgaaagggccaacaaacagctccttcagtctcatgaacactgacaatagttgccctgatctatgtgatcaaatacaagagttaacacgatcacggcactatttgccacttggttttgatttcgatgagtgactatcctcggaggggcgtgagcgctggagttcctcaactattgccgtgaccgcacgatcgcccctcactaagaggcgctccagcaactctaccttctgcagcagctgctcagcatcaatactcgcacagctcaccagcttatctgcggtcttcagagccgtgcacagctggtggtagaaacaatgatgaagcaacatcgtcagcttaaatggctggagtaggcaattacagtgaacggcatacaaaaggagatcaagatacacaccttcagcatcaatgaaggccatgaagggtcattttcttgcagcgctttcatcaaattgtcatagtgctcctgataagatgatgaacaggtgcaaattttagttatgaacagatgatgaacatctgcaaactaatgccgtttataacctgaagatcattcatctgtactatagatttaatttgaattttacagcaaacacggtcaatttgaagcacatctgaaccaaaaaaaattcagttcgtggcctggcaaaataaataaataaattcagttcgtccaacatctgatctgctccacaagattggcaaagtcgccaagcaaaattaagcacaaatatgaatccaagtttccaagaaccactctatctaacccttgcatctatcatcatcaacttaagctcgcctgaaagtagagtagactatttcctcaatctcataaactgtatcaggcccattaattcttcacctacttaaccagaaaataccggcacccaacagatagctcaggaaatcgaaccaattgcaggacggacgcatgattagggaactaaatctcatatggtaggatggatcgatcgattggtgccgaccaaatctaggaacggggaggagaggaaagaagaggaagggagccctaaccccgaatagccggttcagctcggatgggtcggcctcctccgcctgctgccccgccgacgacggcgacgacgggacggacacctccccgccggcgaggtcggcgccgccgtcgacggcgaggtcgctgaggaggtcgccgatggtgagcagcgggcccccgactccccgcatctcgccgcgtctccccctcttcccctgtgggcttagctcagtttctagtcatgagtatttgggcctatttaggcccacattagttcatgggcccacactgcaccagcgaattccgggagcagggttgacgtaaacccacatttacgccttcccgtgttatagacgtaatttgaaccatgcgccgtaaaattcatttttccaaatgtctggagttactctgaactgtggaatcagctaagtttttcttttctttattattattattaagggggaaatgtacaccccgtaggaatggtacaattgtgctgtagcacaaaagatgcagcagtgttaactataagtctataactatagcggcatcctctttgtgctgaacaatttaatgatacactggcctatatagaatgccaatttcttcgttgtagtgagatcgctaatactttgagttcagatcatgacacgcaactcaaccctgtgtggaatcatccctcctgtgatggctcctctgatctgcaatgtgaaacggatagcgccatcaaagcaaagtccaaattaattcatgtttactggttttcattatattttttttagataatggactggttttcattatatggtaaatcatgtaaacacactgttagaaagttagcttttacggtgcaggcggaattatcagctccatcgtttgccactttgccctccagcttgtctgccgcaggcgaaattcaaattcatattactagtttgaattttaaatttacagcattagcttttattatttatgatttcttaaagctgtgtgtttctatcttcacgaatccattaatctagatatacgattacattgataacatttgaataaatcattttattctcattttagattaaattttaaaattttaaccactacaattttataggcaaaatttgttatatagcatcgaaagttcacgtttttggttttat

SEQ ID NO: 18174 - DNA, 1552 bp, Oryza sativa
aagacggacgaaaaagatcgagaattgacggaagtgctaaaaatgggaacatggtgaactttgggtgttattaaagtgaaccggtatctttcggtgctataaaaccaaaaacgtgaacttttgatgctatataaccaatttttccaattttatattatgtgaatagccaatacagccctgaagtttcgcttcgggctcagtttagtcctcgatgtttcaagtcgtccaaacaagtcctccaaattaaccatttgggttaatatagtccttggaccaaaaaaatgccacctgagtataccaagtcatcctcgcatgcagcggtatgaatgaaatgatcatattctaccccatatataccatatagaaaagaaaaaaaagacaaacagaaaaaataacaggccagcccaagcccagcattgttgcggatggatggccaacaaaggaatttatacgatcagtgcttggctacagcaatcgtaagtgacaattctaaaacgatcatacacgtgtgaaccattcatcttctttttttatttcttttctatatagtatataagggtagaatgatcatttcattcataccactgcatgcgatgatgacttaggctatattcgtaacgtagggttgggaacccatctcctccgcacggaaaacagagcaatccattagcgcgtgattaattaagtattagttttttttcaaaaatgaattaatttgattttttaaacaactttcgtaagaaactttttacaaaaaaatgcatcgtttagtagtttgaaaagcatgcgtgcggaaaacgggggagattggttgggagcaaggagtgccgaacacagccttagcatactcacgtggcactttttgtgagtccaaggaccatattaacccaaatgattaatttggatgacttgtttggacgatttgaaacctcgaggactaaactgagctcgaagcgaaacttcagagactgtattagctatttacccaatatattatatacaagcgttaaatttgtcgtagatgtaagacctggagctgtgccaaacaaaacctacgttgctaagaacaaatatgtatatataaaaatacttatagagtttttttttggttgctagtaagcgttacggcttatttatgtacatgtatgaagccagacaagaatttactaattaagcagggatcgttgacactgattctaccatttgatggaacaacatttgatggtagctagcttactcagcaggcggcgacgatggagcggtgtacttctggatggcggcgatgatcctctccttgtcccgcgtcgcgaacgcctccagcagcaccccgttcttgtagaaatggaacagcggcaccacctgcgtacatgctcaacggatcaactcacaaaccatttgcgcaatgatcagatcgatccaccacagcaagaactcactcgatcgatcgatcgattgttccagtcagatatgattatttgatcggttaccttgatgcgaagccggtctgccacctctgactgctcgtcgtactcgtcgatgacctgcatgcatt

SEQ ID NO: 18175 - DNA, 954 bp, Oryza sativa
agcatcattcttaatttggttgagatattggagaacacagcaaattaaagggagattagtagtatatggtatggtttgtttgttacctagctcttctgttttggaaccagacctccacttggcgcggtcgaaggttgagccgattagctaaatcactcttttgtttctgtatacgaaatgaaaggtaacttttgatttcatttcggctgtatcgatcttatgcaaacaaagaactttagctttattgactttaatcgcgatatgctggaacttttttctaaaggaagcttaaactgtaaattaacatcccaatcacactcgagtgtgaaatcaaacatgtgatatgtaagttaaccactgaagtgagatgtaacatttattgccaagatttcaaaatttttattttgttacaaggatccgttgccatcagaagaccaatgtcctctggaactaatttggactatttcataatctaaggcaccgtgttagtagaaaacagagatgtgtgatgattatatagggtttcctgaagaacatatggaatccatcaaactgttataactctcaacgctttgtagcatcgaaactatatgtaactgatctcttcgaacaaagtcaagaagaggaggtaaattaagttgattgaacaatatccttctaatttatatgaactagacagcatctgcaaattaagagacctgatatacttgataggacatgcggtctgatgcttgataggtttgtaaaagttggaaagattgagcaagatacgacacataccggagtcagggtgctgtgttctttgaaactatcctccagaaacgaggactgttccttggatagcctcaacttcttcctcgcgccaccaccgccgttatcctcatcgtctgcagcttcctgatcagctacctgctgtctcgtggatgcctcctgcatagaagatggtgacgaagg

SEQ ID NO: 18176 - DNA, 2827 bp, Oryza sativa
ggagttaacgttacttgtcagcgagaactgggcctgacttcatgcatccaatatacgttcttggttttgatttatgccgagcaagggtagtggcaagcattcctgttatgttgtcacatgaagtgggttattatagatttcaacataaggccaatcggcacgtgaaaaaaaaaatatacccacctaagttcacatgcacatcatcatcaaccttcacataaaagtcagcatcccaaataccaactgctgtagagaagaaaatctttgtcttagctgagagttcatgatacccttctacatggtcctggttgaacaaatgaacacatggtaaaatgtcagtgctggttcaaggaaagcatgttcaaagctttgaaaggcaggaaagcattacttactagtctaagaaagtcacgatgctgagcatcctctgaatctatagctttgtccaatatactgttggatgtagcactgcacagccatcgaagcagttagtatttatacgaaatttaaaaagtatttcaagtttcgatatacacatatatgggaacatatgaaaacacgtgttctgcggtgatttatagaacaaggcagtatattaattctggttttatcattgaagtcagctatgcacaaccaaaagccctttcagattggcacaactgattattacaaaacagaggaagcaaaaatggatttataaagttctacataaacaaattatccactagatttcagtgcattctcaaaaatcttaggaacttggtgtattctgcacacaaactagctcttagcaagcacaaggatggaatccaaatgtccttgatgacaaagatacttaagaactacatatttttgcaacatgaggtatgttataatgttgtccactataccagttcccagttctgacatttcaggaggttatttgcatgctatttttgcaggcatatttttgcatgttatggtaataaaggtatagtggaagaagttgctatctaacataaaagagaaccgaatgtccaaatgtatgattgaaaccacatgcaaagataaaaaggacaagtgattactgattaaactgtaaaacgcactaggagtacaagaaccctctgtttacctatgccctatagtgaagcggataacaattcccttttgatcttctagttgctgcagctttgcacctaagaacaagaagttctagttaaaaaatgacgacaatgatagcttatggaatccaacaatggaagggctaacaattagcatggtgatgatatcataaatatttccaaaattactagcagaactatatgaacagaatgatcatatgcattatacatatttcctagaaagatggaccccagaaggaattttaagtgctgactcctataagagtatgcaagataccaccagcatctatcacattcgacttatgacttatctatggaagatggcgtcaacgtaaatggcaaagactaaggtcaatcttctagactaattgcatgctcgtacagattaagctaagctagtccaagtagaactatgaattgcttcctacttaataaactaattcgtagtaagtcaaaatatgttatttaaatttaaactgtcagataaaatagagagcttagaattcagtgtcatgtgccacatgacgtgcatgtgatgaaaaactagttccaacaaatatcgttatagcagcaaccattgggccactaggaactaaataatcaagctaagagccttggagatgatgatgattaaaaatgaaatgtctaacaataatagaaccgtcttgctagttcatccataaagttataatacaagaaatagcaaccttgaggcatccatgtctctcgcactgaatcacggcgcttgcggctgctgaatgcggtgtttactccaattacaacaaatgccttcttccttggttggctagtttctgaggttactggtgagccaccagcacggagaagttccagcgtgctacgcttagctgcaagttccatctgcagcgtggagatggacttatccaacaatctaacgccacaaaacaaatccaaaggagagaatcctttcagaaacaaatattcaagcaactcgtaaccataaagtgaactccaactagggtcaagtgagctcactgtatggcttcgtgggtcttggttacctcacccattatgtccttgtcttctccatgcttctgcaaatccaattgaagaagcatatggcagattacatgagatcaatggcaaaaagactagaaccatgtgaatctatttaaatttggagcccaccctctttgtattgcaatcctctgatatgagttgcaactccctatcctgcctccggcgttgagacatgatgtggttactggtatcaggtgccgtccaaaaactgtaaaaccacccaaaagaaatcgtcagggagatgaaagagcaaccaagaaaagataatctgatcatcaaaatgcatgaattcaaaaataaaaaggatcaggaaccataataacccgtgtcattgcctttccgttatttgattaatttcactatttcacagcctcgatatttgaaatgagcaactgaacctatgaactatgataccaaatcccagctagttcgtatgccaagttccagtctaaatggaatatactgaactactgaagacaattccatcaagaaaagtataacttgaacttgttgcaaaaatatatttcctccttaaaaaggttgaaaagctaaatccgaccataacactcaatgacaataatgcagttgttccgaatccaaagctatcataaatgaaaataagcccacacacagcattactactg

SEQ ID NO: 18177 - DNA, 9396 bp, Oryza sativa
aatggaatatttttagaaaaactattttattatatataaagtatcattgtgaataaaaaaaagttttcataatacttatcgttttttgacaaactgataaaaagagtgggcatgggagtagaaatcatgtgggctctgcccgcgcaggttctcgaatcctgccgaccacgcctttcttataaaaataaattgcataatttatttttagtttttattcaattttgcacaagatttgtatttatataagagaaaattcgattcatagcacaggaaagaaatcggtaccaaaaaatagcacacaaatttttcgctttcggcgagaagcacaggccaccgtttttccttcgtcccgtagcacttccatcgcattcatccatccagtgaagtgttttgctgttagtcaacagatagaaagaccaaattgcccttcttctatctgtatagcaaggcccactcaatttgtcctacgctgatatcactgcttgaggggaagagaaaggggaaaggcgacggcgacggcggcgagcagaggggagacggcgactgctagcagctggcggctatatcgcggctgcatgctcaaggctctctcacggtatgtgcaatgatgaatttgtggttgggtttttgactggggcaacctagatctgaagaaatgttctttgtttgtttgttgtggtttctgaagcaggaatgtgattttgttagactctttttgatagactgtttagatggttgctccagacgacatccctctttggtaagattgttctacaaccaaatcacaaatcacattgttctttgaaataggggttaggaatgtgtgtgctaactataggaatcaatcttgctatggcagggttgatcccttttcggcatatcgggtatgcattactatgcgatcatatactcgaaagggtgatgtcgaagtgatttgtgatgggaaggaatgggacatagttgttgatagagataaattcaacttgattgcgcttactgatgagattaaagaacattttgaatggggaaccaatcaaaaagctagcatgttatatcttgatagtacaggacaataccttccactgactagtgatgctgcactgagaagtctggtagattcaaattttctatttcgcgaaattagtgttttggttagggtggaggatattgttgaggttgctgatgccgatggcaatggcaatgccaattgcaatggtggtgatggccctggtggtgatggcagtggtggtgatgactctggtgttgatgtcaacggtggtgatggcaatgatggtgatggcagtggtgctgatggagatggcaatgtagttgtaggtgagaaagagatgcaacaaaaagcatctagtaaatggcaagctatgttttgggatgatactcctattagtaatcctgaagatcctgaagatgaaccaattggggtgaatgaagaacacttatatggagttgtagatcttgaatctcagaaggaagggactagtggaaagaagacagataaagagaggtcaagtgggaatgaggtagctactcaggatgttccaaatgattttgacccgcagcatgtccctgaagaggaagtacctattgatgagattggcaatgttgtgcccttgtttgtgcacaacagggagaatcctacatttgttgtagatgcaacattcccaaatggagaggcttttaaacttgcaatgagacagtttgcaataaaaggagaatttgaggtcgatgttagccatagtaataagactaggtatattgcaaagtgtgctaaaacaaaagactgcacatggaggatatatgcgaggaaagagaccaaatctagtgtttggaaggttatttgactctttttcttgttattgcatatcattttttatctttttattataatattggcatctcatcctacttttgttatgcattgcagatcagtcgcttaagtgagattcctacttgtgctactacaagcaagctgagtggaagatggcatcctcaggatggattgcagatagggctaaggaaataatgaccacagagcctaacattggccccaaggcacttcaagataggttggagaagaaatataatgtaactcttaggtatggcagaacttgggaaggcctccaaaaggcaaaggatgacatccatggatcatgggaggctagctttcagcttctgtggagttttaaggctgaggtagaaagatcaatgccaggtagcattgttgacatcgatgtgaatgcaatgggggaaaaggttttctttaggaggttatttgttgcattaaaaccctgcattgatggatttctactaggatgcagaccatatctaggttgtgattctagttttttgactaggaaatatacatggcaaatagcagcagcagttggagttgatggtcacaattggctttttccaatggcatatgcaatttttgacaaggaaaactatgaaaattgggaatggttcatgcaaaggttgaaacaagcagtaggtactcgagatggattggtcatacatactgatgcatgcaagggttgcaaacaacaattagtgatgtttttggtcgaacagtggaatatagggaatgctttcgacatctcatgttgaacttcagtaaaaaattcaggggtgaagtatttgattccaatatgtggcctgcagcatgaaccttttcactctacaagtaccaagagtacatggatcagattaaagaagcatgccctgctgcttatgagtacctagaagtccaccatccacgtgcatggacaagaagcaagttttcagaagcatgcaagattgagtatgtgtgtaataatcttgcagaatcattcaatgcatggataagtgatataaaaggcttgcctattattgacctagtaaataagctaagacaaatgataatgaagcagatgtcaaggagaaaaagagttgcagaaggcttaacagataaaattcttcctagtgttgttagagctctaaatgccaagagtagaggactaaactatgaaattgcaagaagtggtcttactgatgcagaggtgacagtttttgatatgaaaaccaaaaaacacaacacttatggtgtttttctagaaaagtgggaatgcacttgtcgacagtggcaaatttctggcaagccatgcaaacatgcaattgctttcatttgttccatcagaggagctagtttggaagattatgttggggaatttttctctgtagataggttcaagtttgcatatgcaagttccattgtacccattgtaggatcgagatgtcgactagagaggaggtgaataggcgatttaaaaattaaataacacctaatcaaatctaacctaagttgctaggcttggtgagggtgaactctaactaagcaactaagttatgttttgcaaacctagggtgatagtggctcaattatatctctaggaaagtaaattgcataaatgtaaatgtgacaatcaaatgagacaatgagacaagagatttttcaccgaggttcggaaactcgccggtttcctactccccgttgaggcgagcccaactccaccgctcaaccacgaagccaccgcacgcccccttcgtcaagggtgggcaaggcgggagccggcccacggagaggactacccaagcctcgatcactcggggtagttcttccttcactctgaaggtggtgaactccaaaccactcacaaaccggcgccgggccgcctccacaatcttctcggagaggtcaccgggcaactcctccataagccgtctaggaggcggcaacctccaagagtaacaagcaatgacccggtgtggagatgatcaagtgccacactagctctacaatggaagcaaatgcacttgactcttagctaaacaaccctctaacacactagatggatgaacacaaagctcaagtgagtgtgagagaggtgcaaggggtgtatgcaattgaattaggtgccaagagagcccccttgctactggtgggggagtatttatactcccacccaccaaaactagccgttggtggcgaaatcccccaactttgtgctctgccggtctgaccgaaggtatgtggctggtcagaccgtgctactctgcaacggctagaaaactagccgttgaagtgctgtcagagggccccatcggcctgaccggtcagaccgacatggggtggccggtcagaccggcctcgactcggtcagaccgccatcagctcggtctgaccgactacggctccgtcggctctgtatcggccatcccgagcagcatcatctcggcctccagggggccggtctgactgggaaagtgccgccggtcagaccgcccgcggggccggtcagaccggctagggcacgccggtcagaccgccactatgtgccagtctgaccgcccctggtcaggccgaacccagtgaatttgcaagtgaatgtgtgtataatgaaaaagagagcacaaatgaaaatgcaatgacctaatgtggcaattaaaatcatctctttgctaggtcattacccctcttaatagtacggcgaaactaaaattaaactagcaaatttgatcgccctacacctcgatcaattctaaattaaagcgctagttttaccgtcttctttccctttgctttgcgccgtcaattttaatccatcgataatcatccatgcgcacatatgacgtggacctaacttaaaatgtatagctcaaagacaacggttagtccacaattagtgcttgtcattaattaccaaaattaacaccgggggcctagatgcttcacccatgtcagacaagacccaatggccaaaagttgacatagggttcaaaatgttgccaccaaagcttggaagatcagcaggaagacctcagaaaaatcgtgtgccaaatagtgctgaagggaaaggaaagggaaagtgcaaaaggtgctcgagatgtcaaggatttgggaatcaagctagaacttgcaaggaacctgagtgcgtagacctatctgatcttgcatctgctccagcacccccccccccaaaaaaaagaaagaaaaggtctagttttcctgcttctccttctgatatcttaatctgcattttttgtactgctaacaattttttggttctctttcaggaagaccaaacctgcagtggtagttgtctcaaagccccagacaaggtctaagtccaaatgtgatgcctcatcttcttcccagctgtcggtgacatgggaccgggagtatcatgacttagagacttgaggcagacacgatcacccacgtggcctaaccccctcgggggggggggggggggtcgggcccgagggtgatacggccgcccttctctttgtctccccgaggggtcggaccgctcccgtctcggccccgagggccgaggcgccccgaccccttgtgggttttgcgccgcgtatatggggtaggtgagcatagcggggctcacctaaccgcatttattgcggtttggacgagcgcagaacgccgcatgtaacacagtgcagcgcgctcgtttatccggtcagtgaccagtcacagaccgatcagatcgtgggttaggtggcgacaggcggtctgacgcacgcctcgccccatcccgtcaggacgagagcctccaagcactcgtccctagccggagccggcgtgttagctcctggagatggcacgttggttccggtcagatatataccaggcttcattctaaccattacaggcaagatattgtatgaagaagggcgaacatgcagattgttaaactgacacgtggtggacaagaatgatcgatttgtgaccggtctgacaatggtcatgtcgtcagcagacagccatgttcccacgtcgcgcctgcttccggtggaagtggaggtaggtatgggccgtcccatcagaaggtcattcggacggcagccatacaaatctccgtccattaatgaagagaagtcaagttggagggaagagaggatgagtccccacacaaaagaaagagagggagagatggtgcatgtggtatccccttgagatataaaacgaggaccttgcccacgtagaaagggagaggagaaaaacgatcccagaacaatcgggggctggctcacactttgtagcttcttcatacacagatccaccaaaacacaggagtagggtattacgcttctcagcggcccgaacctgtatacatcgcccgtgtcttgtgtgtttccactctcgcgaactttccacagaccaggagcttagaatctcacccagggcccccggccgaaccggcaaaggggggcctgcgcggtctctcggtgaggagccgcaagctccgtcatctggcacgccaggtagggggctctgcgagagatcttctgagctctcgcactctttcgtgtgcgccaagcttttcctgttcagcccaatggccgaacaagcaaaggcgcacaacctctctccgagcattagcggtgacgatggggagccaaacccatgccgtcgagctcgtactccaccgccccctccacgccaaagtcctaggagggaggaggtgctcgagagggtcgaaggatccgcgacttcgacatccacgggcgatggggaagggcggcgagatggggagcgtcgcctcctcgtctacggtgacggcagcacgccccagggcgcgctccaagctgcgggcgcgctcctacgtcacccgcccgttgtccctgacccggagtctccagcccaacgttggctggacgacgtggccaacttggtcatgacggcacggcagcgcctaggtgctggtgggcggtcctccgccaccaagacctctggcgctactaccaccggctccgtgtcgtcaaggcggagggcgcggcgagcggcggctgttgctcgccattcggccgccactccttcgtcagcgcctccgacccaggaagatctgcgtggggggccggatgcccgcatcagtatcgagcgccggcgtaatggccgacgtgctgcccacgcaacggagggcgcctcctcgtccggagtgtcacatcaacacggacgcggggatcagccctccgtgcccccggttggtggtgtcggctgtagagcctttgtggcgagccttcggaacgtccgttggcccccaaggttccggcccaccatcgccgaaaaatatgacgggagcgtcaaccccgccgagtttctccaggtctacacgaccgggatcgaggccgccgggggtgacgacagggtcatggcgaatttctttcccatggccctgaagggacaggcacggggttggctaatgaacttgccacccgcgtccgtccactcttgggaggatttgtgccaacagttcaccatgaactttcaaggcacatatccgtgcccaggtgaagaagcggacctgcacgcagtacagcgaagggatgatgagtcacttcgctcgtacattcagcggttctgtcaagtccgcaacaccataccaagcatccctgcacacgcggtgatctacgcgttcagggggggtgtgcggcacaaccgcatgctcgaaaagatcgcctccaaagagccccagactaccgcggagctttttcagctcgtggaccgagtggctcgcaaggaggaggcctggacttggaacccctccggttccagtgtggcagcttcggccgcccccgggtccgccgctcggtcagggcggcgggacaggaggaggaagaagaggtcggcccattccgacgacgagggtcatgtcctcgccgtcgaaggcgtttcgctggccacccgaaaggggaggcctgcgagcgacaaaaagaaggaagccgacactccctgacctcggctacttggaagagcgaaggcggcgcgcggcccttcgagccgcgcgctaccagcagagcctgcggcgctaccatcagcgccacgtccgggcccgatcactctgcgtcgacgacctcgtcctacgccgcgtccaaacgcgtgctggattgagcaagctctcaccaatgtgggagggtccgtatcgagtgatcggcgtcccccggccgggctccgttccgctggccacgggcgatggcacagagctgcctaacccgtggaacatcgaacaccttcgtcgcttctacccctaaaggggatcgggtgtcaggtttcgggctcgggccaaccccgcacccccctcgggcgtgcagggttggccgggggctaccacatatgcatattcttatttctcttacatctgtatctcaataaaagcattttcgatttcctaaaggctgtatctgtgctgttgtcgctgtcgtccgcaccgtcgtcaccgcactcctcgtcggagttgaaggcaaacgcgagccgaggggccgctcattattgtcggtcggttttcccttgctgatgcgcgcgatttgcgaccgccgggattctgcccgaagagagagagagcagggaggagaggcccccgagccgaacggcggcctaaggcccccgacgaccggagctggccctccgcctgcttgtccgacggtgccaggcgcccccgacccccaggatggccccgaggccactgcgggaaggccgcgcctgtcgccctctgaccccgaggtcgtcggcacagaagccgaatgcgccccgcgtggcctctcggatggagagcgccctggagatgtggcccctgacgaagaagatcggccccgccgaaaggtgcagcggcccgtctacttcgttagcgaggccctccgggacgctgagacccgataccttcaggcccagaagatgctttatgctatcctgataacttcgaggaagttgcgccattatttccaggcgcatcgggtcacggtggttacgtcttatcccctcggccaaatcttgtataaccgagagggtactggacgggtggtgaaatgggcaatcgaactctctgaattcgatttgcgcttgaaaccaagccacgcgatcaagagccaggccctcgccgactttgtggtggagtggaccccagctcccgagctcgtctccgcccccgaggccagctcaagcccatcgcagctgcctcacaccgccctctaggtgatgtagttcgacggcacctgtaggaaccggccccacctgtcaccaggccttagaagtggcgtcacgcccgaccgcttccctcggggagggcgatcgccctggcataacgcagggggctactgtcggtgacatgggaccgggagtatcatgacttagagacttgaggcagacacgatcacccacgtggcctaaccccctcgggggggtcgggcccaagggtgatacggtcgcccttctctttgtctccctgaggggtcggaccgctcccgtctcggccccgagggccgaggcgccccgaccccttgtgggttttgcgccgcgtatatggggtaggtgagcatagcggggctcac

SEQ ID NO: 18178 - DNA, 27513 bp, Oryza sativa
ctcctggagatggcacgttggttccggtcagatatataccaggcttcattctaaccattacaggcaagatattgtatgaagaagggcgaacatgcagattgttaaactgacacgtggtggacaagaatgaccgatttgtgaccggtctgacaatggtcatgtcgtcagcagacagccatgttcccacgtcgcgcctgcttccggtggaagtggaggtaggtatgggccgtcccatcagaaggtcattcggacggcagccatacaaatctccttccattaatgaagagaagtcaagttggagggaagagaggatgagtccccacacaaaagaaagagagggagagatggtgcatgtggtatccccttgagatataaaaggaagaccttgcccacgtagaaagggagaggagaaaaacgatcccagaacaatcgggggctggctcacactttgtagcttcttcatacacagatccaccaaaacacaggagtagggtattacgcttctcagcggcccgaacctgtatacatcgcccgtgtcttgtgtgtttccactctcgtgaactttccacagaccaggagcttagaatctcacccagggcccccggccgaaccggcaaaggggggcctgcgcggtctcccagtgaggagccccaagctccgtcaccagccactgcctacatccccttcacatcctgctggagtagtttctacatctcagccgcctacaaggacaactcctcccaggctagcaaagacaaaagcaaggacagctagtgttaggacaaaatgaaccaaaatactacctgttaatctatggacctgtatctctctatggatctgttaatctattctgtatctctctatggaccatggaccatggaccatgtaaactctatgtttgtatgcacctgttaatctatcctattatgtgtggacatgtttggtagaacaaatgcgctcaaaatctgatccttaagtattcatgttttattcctgtcacactatgcaagtgcataaacataaaaaagtactatcttgtcacataattatcatcatttcattaagattagaataattatcatcacataatctccattacttcaagtgcataaacatacaaaagtactaacttgtcacatacatcagagatcacaactaacttccagattacagcagagctcacagaaagccctttgccaccactacagcaatcatacctaaaagtacagcaccaaaaacaacaatgccaaatgctgcaatcttcaaatagagagtttgctgcttcacttcggacctcatcatcaatacaacatctataagcttcttctttgaacctaggtcttcaacttcatcctcttcagaactatctcccttgatttcttccctactagcatctccattcagcaatccatgatcgataaggtacttctggtagcattctttccaataccaaaaatcgcatggggcattcctctacaaatttaacccattcatcaccttattaggcacaatacaggtgcaaacaacaaaaataaatcacaacaaatttgtactttacctctgtgcggtttgaacacttgtagtacactcgatttgggttcttcttgctgcgggacacataccgaacaatttgctctccacaatccggataatacaccaatggcaacaatgaggagggagtaaaacgaatctgaccagtggaagaggatgatgcatgacgaggatggcggagcatggatccctcaacatgtgagccacgaacagttgagctacccgaagccgccattgccaacaagaactagggttagggtttgctgagcggaaaatgaagagaatgaacgggaaagagcaaggaaatggggaataagggagaagagacgaagggcaaatgaatccaacaatatttttctccactccgatctaacgccgttacctcgcaatgcgacggaagtgctacgggacgaaggaaaaacggtggcctgtgcttctcgccgaaagtgaaaattttgtgtgctattttttggtaccgatttctttcctgtgctatggatcgaattttctctttatataatactagtactagtatttataagacgcttcgcattcacattttcatttcagtttgcacaatatttttcagttcgtatttaataagacgcttcacatttcatttgaaacctgctcctgaactcctctgacatcggcccaccacaaattaaacagagcccaatttccgcaaacattaattaaccccaacaaaagcaatcgaaaagaagcccattaattatactttaatggctgcttgtgattttggcccgtacctgctggtaattctatcccgtggtagctcgtaaatttttgcccattggcattgaaaatctccgttcgtagttgctgataaatttggcctgtaagagtgataatttcggaccatactagaaaatgggtgcgcctttggcgcaccaactaaaaatagcccgtgaatctttatattttttcatttaggatatataaacattgtagagttatttataattagtttagtgtttattttccgacaaatatattacacctagataaacggaaaccggcaaaaaaaaatctaagctcaaaataacatctcaaaatagatgcgctttgccgcatattggatcaggaagtagaaaatattgatgtgctagcctatagaatgttttaatggtccaaatttgtaaacgtttcgcatgcagtactatttagcaagtcttcgataaaattaagggttaatttgatctgtgtcattgcaaatgtgtttattcagataaatatattacaattcgtctattcgtagccatgcaagtcaaattttacaaaaatggaaccataacttcgccgccacgtttttcatcttcttccacatctgcacggcacgtgagacacacccgttagattcatctttttcctctgtccttccctattttctttttttccccatctctatggaaccatgccatcgtaaattttacgatttaaaaatagagtaaattgcatccacggtgcatcaacttggcaggtgggtgcaatttggtgcaatatcttgaaaaatgagcattctaatacacgaacttggcaggtaggtgcaatttagtataagaactttataagtgatcatataaatgcaacaacttgcatggtaggtacgattttgataaagtaaatttaagagttatgcgacaacttaattatttggagcatttttttatataaattcaatttttaagtatatttatatttttatcctaataactaataactgaaagtcaattaaactggatttagaaattattatttcggttaatatttgagaatgtgaagaaaaaaattcttaaaggtaattggatgtaaattgtattactatgtgcaatatagttcttaaagattaaatgtaatatccataagattactttgtaatggcatattgacatcgtgaaaaaaaaactcacatatcatatgcttagccaagttgatgcaccaaaataataaattgttaagttcttatactagaacgcacttacttgttaagttgttgcactcggacgttcaattctcaagttctttcactatatcgcacccacctgtctgttgtatcgtgtgtgcaatttactctttaaaaatatatcattactattcatctatttgttcggtttacagtttaaaccataaatatataaccatgaattttagcatatttttttaatatatgcattcatgcgtataggttgtgctatggtttactgacggattctttaattagtttttaagtcacattcatggtgatacttaaaagcaaaatcaatttagaaattaaaataaacctcacttccatcctcatataaataattcagagaaattaatttaccatctttggaaattgaataacatatcattttaaattaatataaacataatcatatccattcaaagacatttactgataaattcttatgagacattgtacaattttacatctcacaaatcaacccacaaaactcaaaatattgataaaaaatgagtcgtgaattgaagacttataaacaaatcttgtcagaggttgtaacttctaaaccaccatcccaactaaagcatagttgccactggatagagaaagactcttacgattctactcgcaaattagcaaagctccttgtaaatcatccactcctcactacccaattttggaagtccaaggctaagtcaatgacccattaattgtgacagaaccactcagcataaaatttatgcacttcactgcgcccaaccgaaattagccacccaattgccaacccagtactaacctaggggaggagggatatttccaacataaaaacttcctgactgtatcaaaattcaatgcaaactcactactccctccgtccctaaatataataacttttagctctcaagatttatcccaaaatataataacttctacatcaacattctcttcccaaacaatcacaacctccaccattcacttttcccacctaccttcactactcaaccaatcacaatcctccatcattcacttcaacctactttgttaataaccgtgcccaactctaaaaatacttatattctgggacgaagatagtacttgttactgtaattttattaaacatttgatcaaagaaaaagagaaaacataggctatatttaggcgttggcagtgacaggctggactaagcagcttcactataggctgccgaggaatgcagaacatatgtaacattggttaggctgtgtttagtttctgaaattggaaaaaaatttagggaaagttggtaatttgaaaaaaaaagttaggagtttatgtgagtagaaaagttttggatgtaatgtgatgtgatagaaagttgggagtttggggaagtttggtgtgaactaaacaggtcttagtttcctccgacaaattacaaggcaactacaagatgaatcccagaattaccttatcccaaatcttgccttgattttttcccttcctcttggtaagccccaaatcttgatttgaactttttctaggctctccctcaaaagatacggagctattcacgtctaactataaagtaaaagtagagtaaatgactcgtctcaggaagaatacagcaaagcaacgttcgaaaaaaaaaagcaatagcaattaaagctactatgttctgctcttggtaagatcatgcaaaatcgatgccaaagaacagcacagctcgagtaatttcagccacaattaaagctttattcagagtgaaagcatgatttagtatgttgggccattgggctgaagagggcttggttggcatgggagtaggcgaggtggctgaggtcaccaagctgcacggacaaggcctgctcggcgccaccaggaagcagctgagcgctgaccagctccgacgtcatccgactgccggccgccaacagctccgctgacacctccaaaatcttctcgaactagggtggtgcggatggggcaacccctttctcctcgctggtccaccctggatccaggcatccaaccaccaagcttgcggcggcaagctctggcacctccgagctaggcattgttagatccggtaggagcagttgtcgtctggaagcggcgacgtgcttaagctccaccgagatgtggagggaggcgtgccgaggtggcgcggatggagagaagcagcggcgggggcatggaaaaggaggagtcgacggccggggcaggaaggaggagaaggggagggggtgcgggcggcgtctccgccaccaagcgcgccgtcacgtgagaggcgaaggaggcggacgatgtgctggaagactggaatatgcgcgaaaggttatccagatcgacacttggcagatttttgggtgaggtctaaccaaaattttagggcgccacgtggcccaatcggaaggcagatcctagacccagaaatcggtattagagatttgctggtaacttgggtcggtagttgctacttgctagtgcagaagtctagagttgaggcgttcactttgctgccatttatcggtgaaactatgaatatgacaaatttgggttatcgggcatgactagaaatcatgtgggctctacccgcgcaggttcgaatcctgccgaccacgccctttttggcttttctgtacgaacatccccaagactcctatttgctttttttttttgtgttcattttttttatatttttcagtttcttcttttgcattttttgtgttcattttttgtgttagtattgatgcattttactatttataccacatgcacatcccccattttgctgcattccttttatatatagttttctttattatattttcagtgcattttgcttttctgtgtgtgtaagaataatttttttttctatttataccacatgcacatcccctaggcacatactgtgctgtgctggtcctggtcagctggtgcggtggtgcctggtgtactgtactctttgtccattgagctgggccgctggactggcttgatgggcttgatgggctggcttctccaggcctccagctggtttggctagtttttaggaataagttcactttgactccattaaaagtgatccgaatctaatccatacccctaaactataaaaccagatatcttgacccctaaactgttaaaaccggtgcaacttgactccctcggtagttttgaagagcggttttgctgacgtggcgtctatgtggcaatgttcaccttgtctgccgttgacgtggcgtttgggtggcattaaaaattaaaaacatacatgtgggacccattcgtcattcagaagaaaattttgtgggtcactgacatacgggacccactgatatctgggacccgcacgtcatcccttcttatcctccctctttctcttccttctctctctcccccacgcggccacgccggcgtcatgagtccctgtcgccggcgcctccacctcgccactgccggcacctccacctcgccactgctggcgtcgtcctccccgacttctccatcggggttcatctcctcgccggctccgcatccatcgcctcgagtcagcgtgggcggtgacgctggacgagctcctccgggacgaggccgctgccgccgccggggggtggaggtggacgccccgtgcgcgtcctcgtctacgacgcgttcctcctctgggcgcgcgctgtggcggtggcgttcacgttcttcacgcagtcgtgcgccgtcaacgtggtgtacggccacgcgtggtgcggccgtgtacacgtccccgtggaggccggcgccatcgcgctgatcggcttgccggcgctggagctggagggcttgccgtggttcattaaggtcggccccggcccgtacccggcgtacttcgacttggtgatgaagcagttcgacaggctggagctcgccgacgacgtgctcgtcaattcattctacgagttcgaacccgagctgagctagtaaccccatcaaagctacagtagcaactatctgctggtgataatgaaattgcagacttgcctgcagcttgcttgccggcgtcactgttggcttgcagctggcccgctgctgtctgccgcctcccgtgcacgcccgcgcagtgtcacgccatcgccatctactgtgcgtgtcacgacatcggctcggaacacaagtcaacccaaaagatcggaccgaccatgtacccacagagtgtgtggacccggtagtcagagaccgggccacggtaagagagagagaccttgagcacattgctataaaggtcggcaggattggagagagagggatatgaaaaacattgtacacaacaattcccaattgattcaaatctctcttcctgctatcttgttctgttctttcttcctcctcaagctgctctttcctccctccaattcctcaaatctccacgaactcgctgaagaattagtgtactcatgacaatttggtatcagagcatcgatcctggagaagccacgctatacatctcgccttcagctgcaggtcgaagcgatggagaagcagaatatcgactttggcaaggtcttaatggagattcaggagtcgcttgtctcgctgaatcgggcgcaaggcgagacgcaaccgccgtcaacaagctggaccaaggcgtgaccaactggagaccgcaagtagaagcggcagtgaaggagttgcgtgaggaggtgggtgatatccgccagcaaatggacctgctcggcaaatcgcagtccgcgccgccggcgacgtcttcccctcgagttccgttgacggacgaggaaaggaaggcgccgttgcttcctacgccaccagcttcgcgcgtggctgcggcgggggacagcggagacaagtgggccagtggccgccaacatccacatgaacaccggggaagggcaccaggtgtggttaccaccgtggtcccgacctcggtcaagggtacgttcagttcacctgctccatctttgggaattttggattgggaaaatgattttgattcgggagagcgtaggtttaaccatagagtccctaagttagatttcccaaaatttgatggttcagatccacatgattggagaatgaagtgtgagcattactttgatgtgaataacacttatccagggttgtgggttagagtctctatcatttacttttctgggagggctgcttcgtggctgagatcaactagagctcacttgcggttccctaattgggaggatttttgcgctgcagtatctgataagtttgatagagaccagcatgattcgctaattagacagatggatcaaattaaacagacgggttcggtttgggagtattatgaacgattcgatgaattgatgaatcaattgctagtttatgatcctggggtaaatatgtgttacttgacacatagatttattgatgggttgcgtcgggagattagaaatgctgttttacttcagagacccaagaatctcgagtctgctctggctgttgcttccttgcaggaggaagtgttggaatcatctgactccacaccggtgaaggagggcaagaagtttgagagttctgggcagcacaagactggtggaaattttaagggagcttttcctttaccattgcctcctggtcgtcatttgggggtaattcagagtgcaagagtggatgagaagaaggaaggggaaattaaaagattgtctgcatcttcagagaaagtgtcagctcttaaagcacagcgtcgggcacaaggattatgttacatatgtgctgagaaatggtctcccactcataagtgtgctaacactgtgcaattgcatgcagttcaggagctgttttctgttttgcatgaagcttgtgatgaggcagtttgcaatcctgagaattctgttttatcggacagtcaggtgttgatggcaatctctgtacatgcagttcaaggatctgaagctagtggatgcatgaggatgttgggtcagattcaaggcaaggacgtttttattttggtagattctggtagcactgcaagtttcattagtgctcgagtggcagaagggttatcggaactttctcagattgctactaatttgcaagtgaaggtggctgatggagctactttgcactgtcagtctgaaattccggcctgtgaatggagcactcaaggacagaaattttgcactactctcaagatattaccattgggaaattatgacatgatattaggaatggactggctaatgcagcacagcccaatgactgtgaattgggttactaaatctctcacaattgaaggcaggaatccagttgttactttgcagggaattttgtcaaacactgcacagtgcggacttattccttccaaatagttgaatgggttgaaacatagacaggcagtagcaaatcttgttcaactgtgttgtgttacagacctggaaccttcagaagaatttcctcttgcagtacaacaggtgctaaataaatttgcttcagtatttgaggaacctcagggtctgccacctgtgagatcgtttgatcacaccattcctttaatccctggagcaatgcctgtcaacgtgaggccttaccgttatactccatcccagaaagatgagattgagtctcaagtccaagaaatgctgtctaagggattgattcagcccagctcaagtccattctcttcacctgtgctgttggttaatttcttcctcctcaagctgctctttcctccctccaattcctcaaatatccacgaactcgctgaagaattagtatactcgtgacacgcagtcgagccattcgtcgccgcccgccagctgctcgctatcgtcacccagcgcagcttcggccctcaccgcccgccgccggccgaagggggaagaaccgatgagaaagggagagaaagaaagaaggaagagagggaggaggaagaagggatttatgtgggccccacatgtcagtgggcccacaatttcttttttgaatgacaaatgggccccgcatatatatttttaattctaatgccacttaagcgccatgtcaacgccacataggacgaagacctagtcaatactgccacgtagacgctatgtcagcgaaaccatcatccaaaaccgccgagggagtcaaattataccggttttaatagttgaggggtcaagatatccggtattatggtttagagtcatggattagattctggtcacttttaagggagtcaaagtgaacttattcctagtttttattagctgtatagctggccatctaaggtgaaattttttgcttggagattatcactgaattccatcccaactgagaaggtgcctaagcaacgaaatatgagtacaacttgtatatgtaaagtttgtggtgctgcagaggatacttgggatcatgcacttcttcattgtactatgtcaaaatgtgtgtgggctttgatggataatgatcttgcagaactaattgcaaccacgaatattaaagatcccaaggattggctcttttacatgcttgatgttttaaaacctggagacaggacgaagctacttgtatcatgttgggcaatttggcgagctagacggagagttttgcatgacgaattttatgaaagccctttaacaagaatgcattttattaaatcatatttagctgatatggatttgattaatattcctctatgcctacaggataagaagcacttgacttatcctaaagtaccagtatggatgccacctccagaagattgcgtaaagataaatgtggatgcagcaatatcacgatggggtaacaagggagctgttggggcagtgtgtcatactgtatctggtgaatttgtggcagccagtgctatggtctgggaagggctctctgactcggcaactttggaagcacttggatgcaatgaaggcttggcaatagctatgggctgtaatatgtcagaggtctgtatagcctcagactgccttgaggtcattaggagcatctcaaagaaaccaaggtgccaatatttagcagtcctaaatgatattgaggcaagaaggaagcattttgcaaaagtagagtttcgtcatgaaaatcaggcttgtaattttgatgctcacaacttagctaagtttgcttctactttacaggaggggtgttatctttggttttcaaatcctccttgtaatatgaataggaatgtaaatgtggacagtaataaataaattgtccgctctttctcaaaaaaaaaaaagctgtatagctgaataattttgcgatcagtgttcgagggtacaaatgaatcagctattataaaattgagaactaggtcaaacacagttttttagaaataatttatacatattattttcttataaaaactacactattagaaagctaggaaagcatatcacatttacatacaatctattaacttattaaagtaataaaaaaagagcctttacatttgctccaacggcctagatatccttatattaattggatagaaagaaaaaaaataaagtctatagaaatataatttaagaaaacaaaaaattcagaattaaaaaaataaggaatattgaaaaaggatactagagtccatgtatacaatttaaaactaattgaagttcgaaattaaatgttaataaaattaaagctatatccccgcaaaaaaataaaattaaagttataggttacatagttcatatagaaatacaatataaaagtaaataaaattattttttttaaaaaaatattgggaaatagtttatagtccatatagaatataatttagaaataaatcaaattaaaaattaaaaaataaatattgagaagagtctaaggtccatataaaatacagtttataaatataaattaaaaaataaaaataagaaatattgaaagagaaatatatagtccatataaaaataagataaataaggaatattgaaagaaggggctaaagtccaaataggaatataatttaaaataactaaagtttggaatttaaaaataagaaatatgaaaagaagggtttagagtccatatgggaataaaattataaaaaaatgaaaattcgaaattaaataataaaaaatattggaatggtattctagagtccatatagaacaaaatttaaaattataaaataataaaccactaccacatatatatcacgttagtttggtaagttagtacataatttaaaattatgttatcattttaatatattctaatagtaaaaatgtgaaaatctatatataatttcgtgagaaaaatataacaatctaccgggtgtactgttttaccaatcggagaagaacccacgacgaagccgccgccaccgccgcgcatcgtcttgtccatttcgcaggacagaaaaacaggagttcgcaggtggcacgctgcgttcaccccgcgatcctagtgatctgattcaggcgactagtaactggcaccacatgatcatggttgtcactcgcggctgtcagacagcggagcagatcagcagagcaccatatgcgccatgcgacaagctagcccatactgaactagtgctaattaaattcctaacgggttatcaatagagcggttagctagcataagccttgattatagtggtaaagtgggggagtgaagtgcgctgctgttgacacttgacaggtagctcggccttcttttctctctctctctctctctctctctctctctctgggattctttccgtttgtcttgttgtatctatcttctgtctccgacatgaggtggagagctcgtatttggtggggggccttgggcaaggaagtggacggccgacgtgtcacgatgagccgcaataattgtgctcacaacgtgacaattagcagccagtgttaaagcagtgaacatcacccccacacacagctattagtattggtgtcgcagttgcaggatcctattggttacccatggtttattataaaccgcagcggtttattaataattaaaaaatagtttatagataaaacttttgcatatatattttttaactattcaaaagtaaatgttgaaaaacattaaatttaaatttaaaatttaatttttgacagcggtttataagtcatgggggttgtgtagatgtgaattgtgatcagggtttacaaaatcgtgtggttaaacttcttatttttaaaatcacgatatatctcgtgataaccgcacggtattcacggtaaccacgcggttaccgctagaccgtgggatcacggtaaacccaccccaaaacgctttggggaaacttgcggcctgttatttacacttaaatcatgccacaaatatataaagaaatattagtagtactaattaattaccatcctaatttagaccatctttatattggccatttccgggaacccgggggagaatatcacaggacccaggtgtacacagctccgaccagcttccttcaccaataccgttgtcccacctggctaactggctaactttccttgtcgcgtacgcagtccatgtccaggggccccacctgcagcctcacatcacaaagccatcaaaacccccaccaccccgactccgaaggcgaaggccagccaaaggaaaggagaaagcgcggccatggcggaagacgcgccgccgtcgtcgcttccgctgctgctgccgcggaagtcgttgtcctcgtcctccgcgcagcgcaagcagcagtacgcgcggtgcgtgtcgcacgctggggacgagctccacagcttccgctcctgcctcgcgtggatgtgcgtcgaccactccacccgcgcccgcggcgccgcgtcgtgggcggccttcctcctcctcgccgtcgccgccccgtccgcggccaccctcgcgctcccctccccggtcggcggcggggggtcgccgttcgacgggcaggtccaggtgtcgctcaccctggccgccgcgctcgcctacctcaccctcacggcgctcctccagggccgcggcctccgccgcctgctctacctcgaccgcctccgcgacgactccgaggaggtccggtccggctacatcgaggagctcgcgggctccttccgcgtcctcgcctgcttcctcctcccctgcacgctcgccgaggccgcctacaaggcgtactggtacctcgccgcgccgccgttccgctccccgtggtggtccgccgccgcgtgcgccgtcgaggtcgcctcctgggcctaccgcaccgccgtcttcttcatggtctgcgtcctcttccggaccatctgctacctgcagatcctccggatgaagggcttcgcgcgcgagttctgcaggttcgccgacgtcgccgccgtgctcgagagccaccgccgcatcaggaagcagctccacaggatcagccaccgctaccgccgcttcatactctgctgcctcgtcctcgtcaccaccagccagttcgccgccctgcttgccaccaccaggccgcacgcgcagatcaacctcgccaccgccggcgagctcgcggtaaatcttccttttctgctcctccttttttttttacttccattccgatttatgttaaaaggtaagcagtaattgcttccttcaccgagaaatcaaggtgatgcgattaccgatttggtatgaagatatcagtagcatcatgaacgatctgaatcagaaatatgcattgttcaaagatgcgattcactgcataattagtagtagcatttagcagtaagtaatcactacaaatttatctcttcaagataggaaaatgattcggtggaaatggaaaccgcaattggatacatgtaaaattgggacaggaatgatgagaaggggctgaatcgaagcagtttttagtaactgttaattctgctctatccctgtttctttctacaagctcagaaatatgaattccgctgttggggatagtgaaaatgccagatcaggttgagcaaggtcaagtggctactggctagccacactgtaagtaaagttagtcctagaagaagcttgcacgccctgaaaaggaagcacaaatgttcagataactctagaagtagaacagaacagtgcatgaacctccaccacccaccacatgtccacagcagacaactagatccacattcccatcaccactccatcagtagttgtctgtgtctcaaaagggctatacagctagctagatttgtattgcaaaatgttaaaagagacaaattccctggtagatgcttgaggaaatgcatattcctgaagttgaatatagaatgttatccttcaaaagtaagatcaggaagaacaattaggttgcaaaatggaatgttggaatttctgataaaactgaagtatattttatagtggtcattcagtgggcctttttttttataatggataaaacttggtctttgtttcagccatctgttccttgagaatcattttccatattaaacataactcaatgtgtttgctctgatagttaacccaggaacccagcagtaaatccctgcgttcatcgtgaactctgatttttaccgtgagacttggaagtttttgccgggggacttggaaattttcattctgtcagccactggcttcagtggcctcggtctgagactcgagtacctgacatctgtttgtcgcttcacatgttgtgcagctctgctcgctgagcctcgtggccgggctgctggtgtgcctccagagcgcggcgaagatcacgcacaagacgcaggcgatcacgagcgtggcggcggggtggcacgccgacgccaccatcaacgccttcgacaacgaccaggaggaccccaacccggacctcccccgcatcgtcggctacctggtgcccgtgaacgcctactggatggcctccggcgagtcctcgtcggactcctcctcctcctcctcctccagcgacgacgacgactccggccaccccaagtccaagtacatccctttccagaacaaccactgcttccagcagaggcaggcacttggtaagcgctcacaacaaaacaaaacaaacaaacaaaagaacaaacaaacatatgtgaaagctgcatttcatttcatcagttcgtcctgacctgatcgatgtggtggtggtggtgttttttttgtcagtgacgtacctggagaacaaccgggccggcatcacggtgtacggcttcgtcgtcgaccggacgtggctgcacgcgctgttcatgatcgagttctccctcgtcatgtggctgctggggaagacggtcggcatatcctgaggcctgaaggagcttttgcctcctgttgaagctttcagctctctctctgctctgcagccgtgccgagatttctgatgatcaaagatctctgcatcgtctcatattgcttcctggattgtacaatacaaaatcgagtgcagaaattgcagataatagttcagtttctgtgccatgtccggcacaaaaacgaagcaacagttctgaagtttttagctgtatgtttttctttaaaaatttttatggttctttgtttgaggcagattctgatggagcattagttgtatgaaaaataatgggatgggatagttgtccagcttgatttgatgagattatgagagaacagtgatcgttgtatactgtataggttgatttcatgaaacgattacagtgatgttcaggttgacttttttttttccagatttgttcaggttgatgttgtattcttgttgcgtaggaatctctaacgatgaatcatggttcttacaaagctcaatgacatcccttcctagtgattagatcatttctcatataagggcttgtttagttccaaactttttctttaaacttccaactttttcatcacatcaaaactttcctacacacataaactttcaactttccatcaaatcattccaattttaacaaaattttcaattttagcgtgaactaaacacaccctaaatgtttcgcaaaattcaaaattgccctgtttagtgcacaccaaacttctcccaaacttccaactttccatcacatccaaaacttttctacacacataaactcctaactttttttccaaactactccctccgtcctaaaataagtgcagttttgcattgttcatgttcaacttttgaccattcgtcttatttgaattttttttatgattagtatttttattgttattagatgataaaacatgaatagtactttatgtatgactaatttttttcaaatttttcataaatttttcaaataagacgaacggtcaacgtcggacacggttccccacgactgcacttattttgggacggaagtagtaccaactttccccaaacttcttctcaatagcaacaaactgatatgactgctgtagcgttcctgtcaaatcaacagtaacaggttgcagcatggtaacaacaaacaaaagatatgctcatggatgataataatagctaataagtcgctaggatcaaacgtgcgatccactagaacatggatacaaaacggcagcacatgacaagcaaatatgcccaataagttttcatgatgttcatgttttggaacagcaatcgctgccaaacaaaaaaacccatttgcgtcgatccaatggaaggaaaagaaaagggcattcacaaaatccatgcaaggcagcaccggaaaaaagcagcactgtttttgccctatataggcatgagcagtgccctaacagagatctccgtccaacctgtatcctcggttgctgcctgtctcagcaaagaaaaaggtactggaagaacatgatgatcctctgaaaaccaggcatcaaatgccgcggtatgttattttgcctcccttgcggatggatagaatgaacagaacccgtggtagctccctttcttagatgccatgtgttgaccttacatgagtcaccacaggatggtaccgccgcgaagtcctccctatggcccgaataccactgacacgtccccttcgagtgttagctgaatcatgctggatatcagaggcagcgaccgagctagctgtgacattacgcctaggcctctccctgtaccttctgtaagctctggtgtatgaatcaccactggcaattctcctgccatggccaaataaggatgccaagaagtcaatgctgtcatccaaactactatctgatgactcatagaagtcaagcctctcattcagagtgcgatctaaggatgtgaagaagttgagcctctcctccaagtcatctccatcagaaagtaaattgttgttgctgccaccattaaactcaaccacataatctcccataatgacagcccctggggtcatgcttctgatagtgctaatggcatcctgccgctctctttcacattcaaactttttccactcatctgcatgtgcaggatcaacttcacgaggttttgctgaaggatgcttggaattcacatgcttgcaaagttctttgtatgaaccaatgaatgagcagccatcatgcatacaggctcttttcttgcgattgagatactggcgagctggttcgaccacagtccatcctttgacatccccacgacaaagagggcatgcaagttccattgcacattgttgcttgctggctggctgagaattcaaagataatgaaaggccaggtgaagactcaattaatacactgtgggccaacttctcctttgcgtaagcttctttgaagtgttcgaggcagttagaatgctggtggttggtaccacacatatatggccggcaacccttgtggtgagaagtacagaggaggaggacagcatcatgtggatgctccaggcaaactgggcaagaagctcctttccattcttttttctcagagaccaatgctatatcattttgctcgcatgttcctttcatcttccagcagcaggaaggtaaatcactagaagatgaagatgatccacgtcgacgagctgggaggttccggccccttggagatctacccatctcttcaaaataatataagtagggaactgcaggatggaaggacaattatatgtcaatgctacatattaaaattgcgactcttgcacactattcaggtgctactgaagaatgcatggacataaaattaccacctgcacttaagtttaggacccatttatgttaatgacttaatgctacaaattaaagttgtgactctagcactctattctagtgatactaaagcatgcatggatataaaatcactgcctgcacttaagtttaggacccatttcgaaagtatgattctctcaaagatatcatacgagacaccatatccagttagtaggaatttctgttctatgtaatcccaatgctacaaacagggccttagatattcaattgccaccagaataaatggtaggaaatttacatattttgttagcaatagatatgatattctttgtacagactgctagggcaacttacttttgctgcacagatcctatatacaaaaagctggagattcttatggagggtaacaaataaaggatggtttcggcaaattcccctcccatgcatctgattaacttgacaaacatggtggaaaactgagactgagagacaaggagcatccagcatgaaggcaagctacccagtatgcattcaccactacaaccacacttatcttccatagtccgcattcaccactgcagtaaagccatacttatcttccatggaacatattagacagcctgaacatcacttggggacatgcacaaaatgggggaaatgcaataaagagaacatgaaagaagtttaggtaaatttatttaattcaatctgaagctatgggagttttctttagtgtaaattttgtatcatacctaaatgtctttaggatattaaaaaataattatttccactagatatgtcccaaaaagcgtattgggaccttcatagtttaaactcaactggcctttcacatgaagcttgctaggcatacaacggaaagtagtagagtatgatacaatcaatattgaacacacaaaacacactaaaaaaaaatcaaaaccaatcatcaaagctatgcatatggaaaataggtaaaccttcaaagctctgtaatatatctgaaatgaagcatcaaaatgaagaagaaaagagtacgatatttttcacatacatcagaaacagatttagcacataatgtaacacaaacaattgtacaggcacattcccagtggcggatctaacatgggacatgggggttcggttgaaaccccccaaacctttttgggaaccatcaaactgctactagtattaaggttaaggcaaatttcaagaacggaagctagggttaacgcaaattcgagaaagagtgcgtgggtcgagagagagagagagagagagagatgggaaagaggatctgcgtaccggatgcggcggaagcagcagggcgagcgacggcgaccctcctcgctcgctcgctcgccggatggatggatggggatcggcggaggcggaggcggaggcggcagcggtggggaagggcaaactgacgaggtggaaactcacaggattacagtactcactcactaatggtgagggtaagttagtaatttcgcctagtacttaatccccccggattgtttgcacataccatccccacgaccccaccctacccaaacgtggaaatctgaaaatttgaaataactagaaaatgagctgaccaattataactcaatatttgttatttacggtgtgtttgattcacggtcatgcatggatgggatacggccattcatattttattgaactagaataaatacccgtgtgttgcaacgggtgaagtctattttaattttgttgttgtcatatagttttagttaagatgaaattcgctgtgggagttcgcttggatatatattttattagaaaatcatgagctgcagttagtagtccgatcgtctcaagttagcatgcgagtttttttaaacatatttcttatatgattccttttgtattactaaaaagtgaatgatcttaaaaaagactcagatacggatatgtattttcaaaagtaaataaacttaaaaaccgactaatacacggatgacgtatcaaaataccgacaaaaacatcttcagtttttataatagtagagatatggcgatctaaatttttgtttggtttgtatatatatgatgaccaaatttcttgtttggttggagggatatagtatggatgggaaaagccaaaagtttgtcatatatatttttttatcaaaatataatcatccgatatcttatttaaagatttaattatagtaacaaatataattgtgtaatcaaatcataaattagataaatggtttaggagaaaaaatttttggagctttcttaacaaaaaaaatcaaaccaaccgcgaccaatcagaataggacaaaaacttgatggcttcatccaaccaaatcggtcggatgcactcatccagcacattgagggaatattccttattccgggcagccccgtccaccctacccttcaaccaaaaaaaaaaaggcggccatctcctatccaggctacatagtttctcatcatgtgttggttagcttatcggttgtagccaaaataattaattttttagtggctttagttttcttttcatcatagattattttccatcattttcttttaaacccgctactaacattgatatattatcataaattatttttattgcttagtttatttttatatgcttaccaataatagctcaaacgattaataatatatcctgattagtgggtttattgtgctatatagtcttgttaactttaataaatagctcaagatggtgttagggaaaaggttgagggatgtttttgataaaccttgagttccactttacactcacggctgttgttggcccgatctttcgatgagttgataataactacgatttaggagaaacgttgatgacccgactacaatcgtataagacgttgcattgcgccttatcgatcgatacacctctccgtgggttgttgatcttgccgatacagatcaaccttattccagcaataaaagcaatctgaattacaaataggaattgatgcagatcaaccttattccagcaataaaaagaaagcataatataatctagaatatatatccattttcttcttgtttttattagattaatttcaagtaacgttgtcggagacaaagtttatttcaatatgcagaatgaggataaaccgatctcatgaggatatacgcatttgtgttgcttacctaattggttaaaaggaaaatatttcttcactaaatcaacacttgttaaagagagttaataaattaatctcagctggtagaaacaaaggggtggtaaatatttttgcaacagcaccaggtggttttagcaacgacgacagatctcctcccgctccgtgccagtcccggcggtagcggtggcggccaaggcggaggcgaggaggcacgttgggcggcaggcggtggcgaagaagatggagagttcgtccgggtttgacttgctactgtgcattcggtttgttttactgctgatgtgtgacctacgtgtgggctactgtactgcagaggtgcaagggaaaaacagtcaggtcactatggaaatggatcctctgactttggctacaaagtcacggccgtgcagttgggtgatatcagccgttgagccaatctgacggctcttatttacgtgcctttgctgattgccgaagcaggccaagccggctgtaacatcttcaaattttaaactataatttgattgcatcatgctggcttttgactagattagggtaatttaaaaatttatttgattcttaattggtttaagtgttacttcttagaactctactaatttaccctaactattccctttattttaaaccttagtgaatttgagcaaattctctcaaattccaaacttcaaattattcccttagtttatcctattaatagtgagaatttgctatacttcaaaccctagtgaaacccctccaaactcagagattaaattcattcttttctagggaaatatttaaaaaattctgaaaacactgttcattgcactcaaggtgctcgatgaaatgcctagcccagctagagcagcccaacctctacccaatcttgcacaaagtttagatatggtccttggggaccacaatctactcaaagccgtggttttctttgtctcttcctccccttcacgcatgctgcctagcgtccgacttagccacgcgccgagccgccgcgtgtcggcctcgggaccgcttgcgcgtgcccaaccgccttggcgcaccgccagccgcacgacgctctcagaccgccgccgccacaccaattttggcgacgacaaagccgggactacctccgccgcacgacgccgtgcacgcccgtccaaagccgccgccgagtccgattttgattctacccggggtgaatcgagccaagacttgccgcacggttgaattaaagatagactgtggtttcccctctcacaattcaaaccaatcaccgccgagccggccattttaaccctcgtcgccgccgcgcgtcgcgcctagattggcgccaacacgtcgccagtcgtttctacccgtggtcaagccaatccttcgtcggtaagtattcgaacgtggcctcccgccactcaaattgatcttgcccgccctctcacagcctctgccacctttgccccatccaattcccgagctcatccatggcgatgatggcgtctgagctcatcctttccccctggccctataaataggaccccaatcccttccttgtccatcatcgatcatcaacaaccatagccccacaaccccgaagctttgcttcaccaatccatatcatcaaccattctcgctcgtcggtcgaacaccttgtgcgcgatcgactccacgccctttcaaccatcctccaccctaaataacccttagaacatcttatatcagctatgttctatcatactaagtcctaaccgaagccctgcatcgagctctacctcgccgcaccgagcggagcaccgtcgcccctgctctgctctgtttttcgccgccgagaagtttttccggccgcaatccttcatctcagcttatctcggtgagttctttcgtttaaaccatctatatactccctagattccattttagcaattagtttgcactaccatgccaccctctgggctgccgacgtgagcacgatcgccgccaatggaggcgctcgtcggcaagtattttttgcaccttgccgaaggtcggcaagctacctaaatccctctaggaacttcgtagatgctctaggagccctccccgagccttgtctaactctcactaccccgaacaccttcacagcttaaccatgtcaccgccaccctagccgccagcccaaccacataccaaattaacccctccgctgccgctcaccatcgctggagaaccctagctccctcccctcctcggccgcaaccccttctctcctctatcgccgctgcaatcccaaaccctagcgccgccggccgcatttggggatcggctggaggttgaagaagagaagagagagagagagagagagagagagagactgacaagtgggacccacacacagtgccatttcacatttaattgattttcaaactttagaagccaatatcttttaaaatatagatccaattccagtgaaacttggacaaaaattcttctaaaatcattctctatcttttgagaccccttttgctatttttctattttattctattttctctatttttcttatttttggattttatttgaattccttttgaatttgaattttatatgtctaaccctaggtcttgaggattcttctgacatactagataatatcagtcaatctcaggacattgagcaaggccagttactatacaccttttgatcatttaagcctatattttataaattatttatttatagccttctattcaatactctattttatatacacaatttaaccatagaaacccagataatttagtattgcttattttgcttacaatctggctaaaatatcttatccttagattgggacagtacgttagaattggatgatttccgggtggatagtattgtctcgatcgatatagttattaccaggtacttatgtcgaacaaacgggtacgaccgcagtttctagaatgcggacagacctatttattatgttaattagcaatgtggtacctctgtatagtggttcttatttttaagtcctcgcacaggaggcaactatagccgcgaagagcaaatttaaccattaccatgtataggtaaatggtttgtgatactcaagtataaattatatggtatatttctaaaccctgatcgagatgacgtggtgtcatacgatcagttccctttgaatacctcaggaacgccagaactcctcttgctgctgttaacattacgttcagagcatatgaggatataagttcatggaacagttgccacaattgttaataacctaatactgggccatgactaaagctgatgattatcatcaagtcgtggactgctggtaaatcgtacatctgctgcagtagaatatctttgaaactattcgaatagccgtactcatggaattgagtaccgggactcatatggtaccctggttagaaatttaaagtctacgtatttataaattcttgctataattcttccaaattgtttattactgctttttgcaaagaaccctactatatgctaatgcataacatatttccatgataacttgctgagtattgtgaatactcatccttgctcttataacccctttttcagatttgggtcaagaggaggacccctatgactattactacgatgaccccgataacttagagaatccctagaggttatacctccctagtcagaatgtataaaaacttccgctgtgtattagttctacatatgattaattaggtgagtacctattattgtaaaacccttagtattgtaaaactttaacgtatgcaatgaagaaccagctatattgtatgtatcaatatttactgatctagagattgatacattaattttagtcagatccaagtaattagttctgggacccgacaccggcccatcaactccacgatggtctttcgctgtacgttgttgcctgcaaaataaggggtactagcagatgagtgaacttcaatctaaggacaaaactgaatacataactaaaataaaggcgatgcattgtaacacaagctccataactaaataactagttttcaaaaaataaaaaaaccaaaataactctgtaatattaaggtatcacaaataataagcatgtagtagtcatattttactgctcgatccataatgctctctactagtcttttcttccttacttcaccacacagaaattggtccatggtaaaaattggattttcagttgactgcttcttttacaacgtagaagggaagaaccaagacaggaaaaataagatttggagtgttatattcggtgataccttttattagaaaaaaaaactctggcgacaaaataagaattggcgtggttctacagagctgatgggccggccaagcttgcttcagcgatcagcacaagaagcatataagagccgctggattggttcaatggtggatacaacgcggactgcacggccgtgactttgtggtcgaagtcagaggatccgcttccggtcactattatatagaatgacatgcctaaattctgtatttggtttcttaccataaaaggtggacacacacgatctcatacaatgcatcaaacttatatgttatcgtgaacgtcgagttacacttaacatgtaccagtatgcatatctaaccaattatgatctaccgatccgaagagcctaaccaaaataggtcagcatgagcaacatcaagacaatgaacgtgtgctatgtgaatcttctttatatttgttactaaaaaataatagcatcttactttggaggacaaaaatttattagaaaaaaatccaaataaccccatagactttatttgaaagtccatctagcattctaaagtttgaaaccttacatttagcatcctaaattttataataccggtcatatcggtccctaagg

SEQ ID NO: 18179 - DNA, 1039 bp, Oryza sativa
tcatctggccaccaccgtgaccagaattctaggacatcttcgtcacggatttcctcaaatgggccccgtaaacatgaccgggaccgggatggtatgggaaagtcgaggggttatgcaagttttggtagaaacagggaaagggagcgagagaaagaatttgactcccgtgacagagagagtaggtccattacagcagacggttttgggtcgtttagtacatgtagaccggaaagggatagattgaatcgttcccgctcgaggacagattcatggaataaaggtgtagttagtccaaataattgtaatacctctagaaacaatactggtactggtggctcctttgaacgagaatttccacagctgccttttgatgacaagaggcaagatatcaacagagtaccatctcctgcctctccaattcagagaactgttgcaccggatcgttggaattcactgctagcggatgtccctggctcaagtgagccaaagaaaaacctgggtgtatcttctgtattacgaccggctcctagtaaacagcctgaggcagcgccgaacagcgggatctcattgagcatggcggagactgtgatgcaagttcctttgtcagttgggcctcaggtattgcacataatgagttttttgatacattttgcgattatctcttggctttctggattcatgtgcatattcttctcctaacagttatcgatggaagcccaaaagatggaagaaatcagtttaagacagaacactctaaggcctatgacatctccagcaatcaaatcttcagtaagttatatttttccttgacatcaaaataatgattcacatttagtaggtgtctattgtctgccatcatttgtgattaacttttggtctttggcgagagtctaattgatttccattaaatgttggcacttctatttgccaaatactttagtgatcccataaatgaacttataaagagtttttattgttgggatggatatttcctatcaccattgttgcacagaaaacatttttcattgttcatggtgta

SEQ ID NO: 18180 - DNA, 20760 bp, Oryza sativa
cgcaacaggcagtcaggcaccataacctgaattcaagcataattatgaaaactgatgaaatatcgcaaactttccttgaaccgtaacacagcatatctatgtgacatgtttaatcaatcaagatctatagagcaaattatgagcgtgctatgggcatcaccgcgggagggtacgtgaagaggatggcgttcttctccttggtgtaggtaacgatctgcagcgccacgttgagcgccgcgtacagcgcgatgcaggcgaggaggacgtccctgttctcggggaacttgcgggggtagaactgcgcgaggagcgcgacggcgatcaccgccgcgccgaccgccagcctccggttgctcagccgcgcgtcctctgggtaccccttgctcttcgcgacctggcgcaaacccaccacccaccacagcatcatcagaaacaaccgagaaaaatctcaaatctggaggatctcagaagggagggaaggggattgaattagggtttagcgtttgctgccgccgttcacctcggagacggtctcgtcgaggagatgcttgatggagtaggggtcgaggaggttggccttcttcgccgccggtgagggggtggcgccgccgccgtcggtcgccatccgcgtcgtcgccggcgaaacggaggaggatgcggtggggaacagaatatgatgcggatgtttcactgacgggtgggcccgggtatgaggtggacagtgttcgccacgtcggatactgcgttggcttgaaccaatgggagaatacgtgggagtccacgtcagcggaaaacccaaactagtagttttttttcattttaactaccatggtagcattattatattttctctcatataatagcatatatgttttctcaatgtattattcaaatatattaaaatgacaacataattttaaattttgtactaactttacgaaactactaatgtgtaatattcctattgtattttatatatgtgttagttattaattatttttattattgaattttagttatttgtaaattatattcttatataatttctttttttaattccaaattttcattatctgtaaattatatttctatatagactcaaggctcttcttgcaatattatttatttttaattcttaatttttattatttctaattgtatttctacgtggactctaaactcacctttcaatattctttaatttttaattacgaatttcagttacttctaaattgtattcctatattgactttagagttttcttcccatgttttttcttaatctcgaattttagttatttgtaaattgtatttttatacggactctaaactctacttttaattttattctgtttattctgaattttagttagttttaaatttctatatggattctatactcaacttctaatattccttattttttattccgaatttctattatttcttaattgtatttctgtatgaactctatactctacttctaatattccttatttttaatttctaatttctattatttcctaattgtatttctatatggactctatactcttcttctaatattctttattttttttaatttcgaatttcagtaatttataaattgtatttctatacagactctagtctactctttcaatattccttattttttaattctgaattttaactatttctaaattgtatttctatatggactatgtttttctttttctccaattaatatgagaatttctaacccgtgagagcgaacgtggaggctcctttttctattcctttaataagttaactagctgggtggcccgcgcaattgcgcggctagcacccatacaaaatcatatatttttctagtataattttacttaaaagttattaaatagctatctcattgtcttaagactttaaaagaccaaaccttatcatcctcgtgtttctaattatatagtttttaaaagtcacgtcagttgctaccccttatgtcatctacttctttatttgcttgctcgatctactactatttctattcattcttcttagaacctttaaaaattagattttatagtttttagagtttattgtcatgttgggtttcatttttataatttctagatgtcccgtcaaacattgccattatactcctctactgcccgtccactatattttttctttgttgtcattgagattttaaaaatcgaacataattatcgtttggatttattttttactttctaaaagtcccgccaaaccgtcagcggctttgccattgtactcctctacggctcgcccgctgcctcccttctttattgtcattgagattttaaaatcgaacatgattctcattgttttttattactttttagaagatccgaacctttaaaaattggacttgtagttttatttttttatattttttaagaagtcccatcaaacaatgccactatgcccctctacagcccatccgccgcctactatttattgtcattgtgattctaaaaatcgaacataactatcgttggaattcattttttttttattttctagaagacccgccaaccgtcggcggctttgcaattatactcttatacaccccgcctgctgcttctcctttttattgtcactgagattttaaaaatcaaatatgattatcaatgtttttttttactttctagaagtcccggcaaccgccttactcgtttgctttatggcctgcctgacttccctccttttaatcgtcattaggattctatttgatgttctattaataatttttatatgtcgtatcaaccatcaccactctactcctttataggtctataacttaatttatctcgtcatatattttagatggtcttttctttcaataatctttatttttatcacaaattttagttatttataaattgtattccaaattgaaatcatattcttttttttctaatttcagtttttttttaaatttagttaataccgtattgtgttcttttaatgtttttatttttttattttcaatttcagttgtttcaaaattgtattcctacttgaactctcttttaatttttctaattttggatattattttttattctaaattttaattaatctcgtattgggttcttatatggattcttctttcaatattgcttatttttaattccgaactttagctaattttaaattatattcctatttgaactcttcttttattttcttttgctaatttcggatttatttatttttattctgaattttaattaatctcgtattgggttcttatgtggactcttctttcaatattgcttatttttaattctgaatttcagctatttttatattgtattcctacttggactctcatttcctttcctaattttgtattttattttatttttattttgaattttaattaatctcttattgggttcttatgtggaaacttctttcaatattgcttatttttaattccgaatttcagctatttttatattgtatttctacttggactctcatttcctttcctaattttgaattttattttatttttattttgaattttaattaatctcgtattgggttcttatatggaaacttctttcagtattgcttatttttaattctgaattttaactatttttatattgtatttctacttggactctcaatcctttcctaattttggattttattttatttttatttcgaattttgattaatttcgtatcggattcttatatggaaacttctttcaatattgcttattttaattccgaatttcagctatttttatattgtatttctacttggactctcctttcctttttctaattttatattttagattttattttatttttatttcgaattttgattaatcttgtattgggttcttatatggaaacttctttcaatattgcttatttttaattctaaatttcagttatttttagattgtacttctacttggactcttcttttctttttttctttttctccgattaatgtgagaatttctagcccccacagcgaacgtggtgcctcctttcaaagctgttttaacaatataatagatagatagattattttatttttgtttcttaattaaaattgtgatatttatgtctctttgcctccctagagtcgaagagaatgtattcttttaaaattttcaaatatcagttgaatttggatttcaatggaatttctttctattttggtgacattcagaatgaaattccatcttttcttttctttttttcaaactagcttgaagaagaaggaagaaaggatatccgatctccagtatacctagcaattcgtaaaattgaccaaattcatgtaaaatttcactcaaatatttttacatttaagccaaataacgtatatatactccactctccactacactgtcatacattttcatagccgccgccgtctcgcggcgatcgaactccacaactcacgccggcggtggcgcggaagaggaggacgccgccgccgccgcatcctcgctgtcgcggggcttgccccgccggagctggcgagcgagcaacgccagacacgcgccgacgagggccacctgcaatgccgcggcgacggcggcgagcgcgatcccgaccctctcgccgaggttgagcttgagccgccgcttcctctcccctccgtagccccgcgggggcggcggacgaggcgcggcgctggtggtggtggtggggtggaggcggcctcggccgggggacggggagggtgccgccgacggcgcgtgggccggcggaccactgttggcgccgccgctgagccgtctggtggcggcgaagccgacgacggagctgggggaggtcgtaggtggccgcgggaggagcaccagcaggaggaggacggggatgatgacgaggagtgctactgctgctcgcggtcgcggcgccatggccggcggatgagacgacgccgccgctgcgcctgcggaggcggcagcagcatgggccttttccgcgatgctggtgtgggcggggcgatcgatcgagcgtgtggccgcggcgcggcggccggtcaggtcagtgtgccgtgcacgagagggaggggaggggaagcagctagcgagcggcgggtggtgtcgcgtcgtggcgctgcgctgggaagtcgcgagagtcgcggatggcgatggtggatgggggtggggaggtgggggggggggggggaggactgatggtgatttcgcctccttctccgccggctcaggtcgcagggggtggttgcaacttccaactcctaacagctcaagcctacgacgtacgtcaagaattgatagcatatcctaaagggtaaaaccagtgatcccttgtaacaagaaagaagaaactgaatgatcactcggttcgatcaaccgaggggttgttattttgttggtgtctaagtttgccacagctaactttagataaaaatgtggcatggctcgaaaccgtgtctgtgaattagtatgctataagtgtggcttagttcaaaagaaaactaagtaagtaaacaacttatgggcccaaaatataaaaaggagtgataaagtctaacttggggtctagcactctccttcgcctcgtcctctttaggctccagcaaggccggcggctctggtgccgtatccaagctccaagacgccgggagcaagccatgcctgggcatcgcctcggctgactcttccataggtcgtcgctctgagcttcctctaccactgactcctccactggttgcggctctgagctactctagtatggcgtatcctcctatcgttgcctcctccaccggccgcgagcgtggccactggcagttcctcgatgccggctcgctcgctgtctcttcgacgttgttgggccctggatctgttgccgtcccgcgctcttgccgctatttcccggaatagacgatgaggtggagaaaatgaggcaagagaaaaggaagagaggggaagaaagaagacgaggcactgatacgtggacccagtatgttgagtcaaccgtttagaccaagtcaacgtgccatgtcaactaaaaccaccctaaaaaaagttgagcaagtcattttacctggttttaatagttggagaagtcgatatgcccagttttatggttgagagataaaaatcttatccgttctatttgagggggtctaattggactttttcctttttttagcccagctcactaaggaaaaagtacaccgaaagtccctcaacttgtcatcgggataaaaaacgtcctcgaacagcaaaaccagatacgcgaggtcccttaactatataaaaccgatcacttgaggtccttaggcgattttgaccctggttttgtcctacgttactgctgagtcagcgtgggaaccacataggccccacatgtcaggatgccaactcatcaccttccttccttttcctcctctctctttctgggcggcttctcggcgaggctaagcggcgatgcagaggtcagcaggcgaggtgggagagaggagggcggcggcacgacggcggccggcgcccggcgggagaagggtagggcggctgcggcggtagccagggggaagcgcgaagaggacagggcgatgtcgcgccgtcgcctacacccgccgctcctcatgctcgttgagctcccacaccggcacgctgcgcttcacgtcgcgacgccgtcgtaatcgccgcaccccacgtgcgccaccaccccgccgccgcccggccgccacggtgagacgcatcggcgcttggcctcctcggcctcgaccatgcggtgggatgcctcggcgagtcggtcgagcgcctgttgcacggcgtcgcggccgccgataaggagccgcgtccccgaaggatgtcccgatacagcccgagcgcctcccgccgcgagctcgtcagccggcggcacacctcggcctccgccgcgtctctgtcgagcgccctggaggaggaggatgagggggacttcttggcgacggggagagcggcgcctccgtcgcccccatcgtcaatggggaggcgcgggtgtgtgcgggcgtcgacgggcggccggaaggcgcgggcgtcgacggggcgaggcgggagaggaggaggacgacgccgcggcttcctccaccgcgcgcagctggggggaggggagaggaagaggtccggcggccgtcgtccccgcagaacgacgacgacgaggaacgggccgctgctggcctccccgcctcctccctcttcacgtgctcgctgtgggagttgtggggaaaggcggcgctctagctgcaagtcgactccatccttgtcgccgtcgcacaaagttgccgctgccattgtgtagctcgtcaccggcgaccagacctcttccgctcccgccgaccggctcgccaaaacgaggaagagagagaggaagaagggagagaagagggggggacccgccaaaacgaggcactgcctccctcctttgcgcccccggccaaagcagtcgccacagcgccgcccatcgccggctgccccgccagcctcctccgcagtccgcacctgccggtcagcctgagaaaagtgagagactgagagagaaggggagaggaggggaaataagagagaggtgatgagttggcattctgagatgtgaggcccaccgtgggtcccatgctgactcagcagccacgtaggataaaactgggtcaaaaccacctaagaacctcgggtgactggttttatatagttaagggacctcgcatatctggttttgcggttcgaggacgttttttattccgatgacaagttgagggaccttcggtgtactttttccgctcacatccaaatacttctgtcactgaggcccatctagcaaacaatattccggcccatgaaaactcccgtgcggcaacgcacacagcttcgcaatctccccaccttatcgtcgtcgtcgccactgtcccccgtgcccgatggccgcgcccgcgcccacagcttcgccgccgccgccgcccgccatgtccggcctcctctccttcgcctcgtcccgcccctaccctcccctccccgcgcccagacccgccgccgccgcccccaggccgcgcctccgcatagcgggttccgccgccgcggcccccaacgccgtgtcccaccgggcatcctcctccttctcctccggagaccgcctccgctcgctcgtccgccgcggggagctcgacgaggcgctccgcctcgtcgggtccgcgcggaggcccgacgcgggcacctgcgccgcgctcatcaagaagctcagcgcgtcggggcgcaccgcggaggcccgccgcgtgctggccgcgtgcggccccgacgtcatggcgtacaacgccatggtggccgggtactgcggcgcggggcagctcgacgccgcgcggcggctcgtcgcggagatgcccgtggagcccgacgcctacacctacaacacgctcatccgaggcctctgcggacgcggccggaccgcgaacgcgctggcggtgctcgacgaaatgctccgccggcgatgtgtgccggacgtggtcacctacaccatcctcctcgaggccacgtgcaagaggagcgggtacaagcaggccatgaagcttctcgacgagatgcgagataaggggtgcaccccggacattgtcacctacaacgtcgttgtcaatggaatctgccaagaaggacgggttgacgatgccattgagttcttgaagaacctcccgtcatatggctgtgaaccaaacacagttagctataacattgtgttgaagggcctgtgtaccgcggagcgatgggaggatgccgaggagctcatgggcgagatgggccagaagggttgccctccaaatgtggtaacttttaacatgctcatcagtttcttatgccggaaaggattggttgagccagcactggaagtccttgagcagatccccaagtacggttgcacacctaattcgttgagttacaacccgcttctccacgcattctgcaagcaaaaaaagatggataaagcgatggcgtttttggatttgatggtgtccagaggctgttatccagacatcgtttcatacaacactctacttactgcactctgccgcagtggtgaggttgacgtcgctgttgaattgcttcatcaactcaaggacaagggctgcgctcctgtcttgataagttataacacggtcattgatgggcttacgaaggctgggaagacaaaggaagcactagagctgctcaatgagatggtcagcaaagggctccaaccagatattatcacatactcgacaatagctgctggtctttgtagagaagatagaattgaagatgcaattagggcatttggtaaagtgcaagatatgggcataaggcccaacactgtgttgtacaatgcgataattcttgggctttgcaaaaggcgtgaaacacacagtgccattgatcttttcgcttacatgatagggaatggctgcatgccgaatgaatcaacttacaccatattgattgaaggcttggcttatgagggattgatcaaggaggcacgggatttgctggatgaattatgttcgagaggtgttgtaaggaagagcttgataaataagggagccattagactgcttgattgaactatgaatacatataagaggatcaactgagtatcgagggtctgagaatgagattttgtgcatcttcgctcttcagcaggagaggagattttactggatgttcacctaattgatgttgctttcttgacaacatgtgagtcctttcatccacttcccaccttacaggcttacagcccacttcagtcttcgagttgcttggaatttctgcataactcttgtcttatttaacatactttaccttattgttgaacatggtctcatgtttcacattcttgtccttacatgatatatcatactagtgtgagatacatattagacctgttttgattgggcatttcttgcttcaatatgctttagcacttcatatgaactagcggaatgaagggatatgctaagtgatgagcattaggctacctgttctctctactcctgtactgtaagccagagttgacttatcttagtcattgacacggtaatgacaccctaattggtttcaaactaaacatgccgctttctcagctgcagttctacagaattgacttgggataaatctaagactgtgagctacagaatttgccaattcaagtagaaaacatgaaaaatgaccagttgattactatctgaaactccctatttacatctaaattgaatgacaacataaaatttgaactaaattttagaaaaggctggaagtccagatttccctttggattgtgggtaccatcagaaattggtcagtgcccagtgatgtgattcaaaacttctttctcaatgagttattttccatgcttgtgatgggaaaatgatgaaattattggattcagtccttcaccactaagacattgatggcacctggccactttatgtcaaatgtcagaccagaaacatgattttcacttatgcagttaccatccttaggcgtaacctttccaatgtgtcatattatactaaagtcgctgatttagtttatattttaattaatttgctctgtttttattgcagtcttgccgtgctcaaatgctaatggaggtccttttctcagattgccaccagaaggtacttgaacaaacagtgaatctgagcctcactgtccatcaaaactgatctgtttatatatatgcaaggcactgataaccttgtaagttgtgaacctttgcatataaatttgtaatgattcaggctcaccagtatatgatgccctcctgtagctaatagtttttcccgtgtcaaatcaaatgaattttggtttaggcataaccatttagcttattattgtgtgtcttcccaattatgcaatgtaccaaaaaaaatgcatcttaggtgtacatctatgcaatgtgcaccatttaatctccatcctggccaaaacctgaattcaggaacaggattttagccccagctttgtagttccaacagaaaaaaagaagaagaaaaactactattaattccaaagttctatacaaatataagaaaaagaggcagccatggaagttcttgggaatgcatcatgcaatccttggttctatgcaagcttttgaaggaccttaaaattacaccatgacacgacaaagaataacttaattcattacaccagttagcaaaataccccctctatatgtaatataccctgtggtaccaatggatcagtgttttacaaaaaatcatgccgaattggtgctcctccaagttgcatggcttcttaaaacatacactgcctgatgtgaaaacacaggaaaccatgcaaagtttgtgtggttttttttcccctgtctgcctagagcagaactcccatacaatctgatcaggcaggtggtggctctgcaggcccagctggttttgtattcagaagaggctggattgccttcacgacgatcgtcatgttcggtcggaagtcggcttcgtactgaacgcacaatgctgcaactgctgctagctgaaaaaaaatcatgaaagaaaaaacaatggcactcactgctgctttctgaattttgtcagatttgctacagtatagctacctttgcgacagccttcggagggtaatcattgttgagctttggatcgacgcactgcttaactttatcttcgctcaatcttggagtagcctgcctcacaaagatcatggtatatgtaagatcattggaaatggaaagattgaaataggatatattgtaataagttatcttttgttgaaggataaaacttctccttacccaagtgacaagactttgttgcccttttggcatggtgtgatcaactggtttccttccggttagtagctccaatagaatcacgccaaagctgtaaacatcgctcttctgatttatttgccctgtcatggcatatctgaacatcaccataatcagaccaacaaatcgtcagcaagtaaatcctgcaaaaggcaaagcatgctgtacagtctgatacgcgagaaatcaatcattctctcccttactctggagcatggtatccaaatgttcctagcaccctagtcgaatgcaaccgggcagcggtgtcggtgccctggttcgtcaggttgaaatcggcgatcttcgagctgaactcgtcgaatataagaacattgctagaccgaacatctcgatgaacgatcgatggctgcactttctcatggaggtactccagccctctcgccgccccataagctatcttgacccgttgcgcccagttcagaaccgggccgggctccgcgccctggactcccttcttacctgcatcacatccaaaaccattaattagcttagccctacgtgtggagattttttggctccgccccctgatcacatgggcgtaaacttgtcgggattttactgttgctctttatctcgtgtttgctttaaatttgggagtgtttttttaagtttactttgaagtacacttgcttcgagtgatttggtgtaataatcggctgtagttcgttgagtaatgactgggatggttttctattccattatgtaagaaaaacataaggtagtagtgaaatggaaaagacttattaccgtgaagaatgttgtgtaaagaacccatggttgcaaactggtaggccagcatgcggttgccgtcttccaagcagtagcccaagagctccaggaagtactcgttcttgagcttggacaccatcgctatctatggcgacgagatgaagatgagcaaaaagctaagatggctcatgtcgcgaggaggaggaagaagaagaagtggggtgttttggggcacacctgggcggagaactcggagtcggtctcctgggaggcgccggggtcgagcttcttgatgacggcggcgcggccgtcgctgagcgtgccgttgtagacgcggccgtaggagccctcgccgatgagggcgcggtcgctgaagttgctggtgatcttcttcagctcctcgaacggtatcgccggcacgtcgatgttcaccggcttcggcggcccgcccggccgcgccgcccccggccctctcggcccgcctctattccctgcttccatccgccgtcgccggagaagaagaccaagagacggtcacgaaatcggtcagcaaaggaggagaggaatgtaggaggccgccgccgccggagaagaggaatgtggagacgcaccgggagcattgacgttgggcggcggagcggcctggttcgccggcgggccgtagctgtcctcctcggcgcctccgcagcaagacatcttcttcttcctcctcctcctctcgccggagttggatgcgcgggctgatctggtggccgccccccgctcagcggatcatcgcgcacgacctgcaaaccattttcgattaattcctcgcgtgcacaccaacagattaaatccctgaagaatcaattcacgaaacggatcaatctctttccgaggaacagaaaattaactgaaaagaaattaaaatcaacgcacaatttccagatgatcaagcaatcatcggaagcaatgaggggatcgtggatcaagaaaacagaggatgcatgcatgctccatatgcgatctggatcggcatgcagaaaacggtagaaattcttacctcccccaaagattcccgcacgagatcgatcgcttcccgcacgagatcgatcgatggcgatcgatcgagggggggcaaagggaagaacagcggtgttttgttccccgggagaagaggttaatggtggggaatggcgggagctccccctctttccgcgccaaaggagccacacccccctggccccctctcccacccgttttaaccgccacacgcacacacgcacgcacggacgcgtcaattaattggagtaattaactaacctctgtgcttgagcaccttccccattattattgactattgttagcacgatcacatgatatgaaactatggaggtgtgccataatctttagagttaattggatccatatcattataaatttactcgttttgaaatacacagttaatattcattataaatttactcattttaaaatacacagttactattcatgaaactaaaagcatgccatcatgattttacaggtattccaaatataccactgtttacctctttgaagtattatcaatttttttgaccaaaatgcatgtccctttcttcttcctttcccttttcctctcttccttccactggcaccgcagcaatgagcttgggcgcggagggcatccatcttagcgattgccgcggccttctatcctcgaggcgtcgttagcggatgcagagccgccacttcatttcatactggagctagagggattgaggaaaacgattcaaatagtaggtaatggttgcgtagaggctgacatgtcttctggtagggaagaggaaggttaactccattgccaccaaagcccctcccatggctcccatcctcggtggtcggtgtggtggagtagcatggacgcgggaagggtagatctaacgcggcggcgggaagaggcccgacgaggaaaggaggtggagctcaccaccatctcgccgtcctctgacgtcactggagaagagatgtggtgcttgagctcgagcattgtctacacgacggctatggtgtgcgccaatccgtgcttcatgggcattgcctcctctttcagggtaaccacgagctcgcatgcactgtcatcgcgttagcttcgctcgtttcgctaccgatggcacttgtactctcgctgattggttcgccttgcgctcactcctagacattgctatggcactggtggaaaggaagagaggaggaaggggaaagaaggaagaaggaagaaggaaggggcattttggtcaataaatttctgacaatgcttcaaagaggtagtaatagcacatctggaatgcctataaatttgtaatggtatggttccaatttcacaaatagtaatggtatatttcgaaacaggcaaaattataatggcatgaatccaattaaccctctttacttaggagctcattaaatgatgactatatgtttgataatacaggaaatacaagcatatacaaactcttctagtatgattcgaactcatatgcaggtagtatcgagtattcactttaattttctctctcccgtatcctttccacgagtctaatatctaacgttttgaatttgcatgaggatactaacgcactagaatagataccatcatcttaatcggacggtaagccccatctcaatcgggcacggcgttcgtcacatgctagaagtaacagatatgaacagttatctcaatcgggcaaacggccgtcacggatgaacctatctcaatcgggccctaattaaagcccgtcaccaatagctttgacccagattaccagtcaaactatagcccgtcacggatgatctatctcaattgggccacaaatagcacccgtcacagatgactactaacctcaatcgggtctaagctagagcacgtcagggatgatactcatctcaatcgggcctaaactatagcccgtcacagatgaccatcatctcaatcgggcattaactatagcccgtcacagatgacccttatctcaatcaggcactaagttatggcccgtcacagatgagtataatccacaaaaaaataaattttgttttttggctaacctcaggcctttgctagccatgcccgttgcaaaaatgacagaaacacatgcatatacaatatccccagcatcacccattcatatacatgcactcacatacacagctatcaatatatttcacacaaccatattcacagaacatctattttaatctcatatttcacatccattcacatattttacgtcgattcacatatttaacatatttcacctgcaaaaccgagttaattggatgaaatatttatttagcaagtattaacatagacataagaaatatatacataaatataaacatcatagttacataatcaaggtcttaatcaatgttcatcattgcctaaatataaaagttcaacaatattcattattttagtttaagcctaaacattcctttggggttaattatttcgcggaggatgaagccggctatctcctcacgaatctcctcaaagttggtaggcagagacttggtaattttgccctacattgtcataattcaagattagttgatcgatcatatatatgtacatcgatgtagttagtatatcacaattaagaccaccgacctcaaattcagccaaagtcttcaccttttctctgtatatatagaaggcgcatgttgtggcacacatggaatccgtgctggtcacctatttgttacttcaccgggaagtcttttttgtggatgagggtgtcatgtcctatcttcctgaggcctcctctttacacgtattggccccacacttcatctatcgttagttgaataggggtccaatcatatgcctgcttatcaattctggagttcaggtagtggcatgtactccacttaggtgttatgaccagaaggattcaatgggcactgcagcattaatatagtgaaagttaaatactaaagctatatgtgtcacgctgttgtgtatatttagggaacacacttactattgattataggcgcacataatgtactccttgtctcagcgggaccacaaggtgtcgtagatgtagttgaacattccttgacggttattctcgagatttgtgacagtgaccacttatggatcaaggaaggcgacttctggtgcatttttctgacaccattgccaacttaacctacacgcaagatacacgggtacccacttttctatcccgtatcctttttctcgagcctcatgtctaatgggctgactagccgttttcacaccctaagattaattgtttctaagttctaacaaacagtaattcaactgatgtaacagaaacctttttaccattgtttctgacctgacaagcatccaatttttttgtatcattgcaacgatcagaaattccactggggtgacagacaaaatacatgaccttgattttttttctcccactacaattagtcatctcctatgctctatcaatacatatgaggtaaagcttatgctctcttattttcttaagaaaaaaaagccatctcatatcctttcttcagttttgggcctccactgtgacgcttgaaacgattggggaccaacaggtccacaccttctgtgggccgcatgggccgggccgtaggcaacgtcagcgcgcgcgatgcagcacgcgtgcgcgcgtcaacgtcgccgcgcacgcgcgtatccaaaacctgcaagttgcgcttattgctgactcgggccatatatctatccaacttatgcgttggttgaatatatgtgtgcttgtataccaaaagggaattgatgtgtctccatcctattctcacttttggaagctatatgtttgatttggagaacaagttgtgtagtagggctcgtttttttttccatggtttagaattaattttgaagatagttccaccgcttgctcttaagcttaacaaccacatctaaaatttaaaatttagaaaatccaaatttggttgtagcttatagtcgtccattaatgataacactgaagaaaatcatcggaaaaaaatatctacttgattttaaaattaagtactaaaatccgaatttggttgtaccttataattctatatattgctctaggtgtggttgttttcgaaatgtaagctgtattagttcaacttgtgtcacaaggatgaagaaaataaatcaaatgacttagttgcctttaatttatagtacaacattgaaaaatatgagtcatgtacttttttttaataataacatttatttagcaagtacgtacaagaagaaaaacaatagtgactaaaaattccaaaactacttacatttacattttgagttgagaaggataaaacaacttaattaagtacaaattcaatgtagcttttagtttttttttatttacaggattaatctagattctttttatgctttaatttgttaggttatagtttactgtttcatatttagcaagatccacgctaaaaatataataacattctaaaaaataagttataatttcatttgtataaattaaagaaaaaagttaatatattaattgtttgagcgtggatctagtagttaaaaagtgttgaagaaataaggaaaaaaaatctttcaacaaaaagatggccggtgaaaacggtacggaaatttccgagatttccagctgccatctccagtttgcatcgatcgtttcagtcggtattggtaaccgattatggtggaaatggaaacagtaatatcttctggaaatgatagtgaaaatgggatggaggtttttccaccgttttggtcggtaaccgtagttgtacggtattttttgtcaaaattccgaaaagatttcaaaagttccccagcgactcagccagctcaacccatcggaagcccataaataaaagaaggctggtaagcttgcagcccgaaaaaagaggaagtgacaagggaaatgttgttaaccctatgacatggctgacatggcatgtggattttggtgaactttggtctcctcaacttatcaatgttaaagtattgttgaattttatttatagggaaaatttgaaccatgccacatcaattttgcaaaatttttgatatgccaccctgacccacatgtcattgactcatgtgggtcctacatgtcattgagatacgggtggcatatctcaaattttgcaaaattagggtggcatggttccaacaaaccatttatattgcttgtcaaacttattatcatatcattaatcatcatataacagtgttatgtggagtgtgacgatgcaataataaagttaaaaagtcatctacgtgcatagttaaatgtgtgctatgccatactccgttgattccgacatgaattttcgatttctgaccaatagtatattccgttctgatggtattgtttccgatataccgatattattgatatcgttaccgttttcgggtctaccattctaattccatttttgagaaaaaaaaataaaaataaaaatggtacatagtttttctaaccatttccctccttagatggccccatatttttcagccgtcggaaatactgtgtgtccatattacgtcgtccccagtatcatccggccggaacccgtaaatgcaaaagttaacgaatgcgacaaaacaatggcaactccattctcaaatcgtgcgattttacttgtttttaagcatcacacatatcgcaccattcttttacacattaatttacacacgtacgcttgaaaattaccgaagtcaaacaaaaacatatcacttaattaattactatacacatgttttcccatcaaatgcgcacgtcaatctctgattaattattctacctaaccttaggtcacattttgagccattaggtaattagacatttagaccccaaactgtaatatttaattaagaacccgacacgtatgtgtcatttggttagctaattaatatttgacagaattaaccatgcgacagcagacatttttttttttgtgtgtgtgtcaattgtatcaatcgatctgttgctgtcttgccagcataaattgtctttccatgataatcatcatcgttggaaaatttataaggcgtgtcaagggtttattcctgttggtgattaattagtacacgtacgtgcgctgacgcgcgcgtgctgcatgtgcgctattagcagtttcatcttttctgctagctactcctactatgcatcaataatcgttggcctattgctggtatacaggggtggagccaaaaaaatttctacgcctagaactcgagtagggcttaacttataggatatttgctctctcaaaaaatacatagtgatttaaaaggatttaggcatgtttatagagacactgcccctgcttgtaaaaacgtgcaacactctgtgttcgtttctccaacaagacatggattaaattttagatactcgtggcatatttttcaaactactaaactgtgcgtttcgtgcaagaactttatatatgaaagttgctctaaaatatcagtttaatctatttttcaagtttgtaataattaaaactcaattaatcacatattattaccacctcgttttacgtgaaacaatctttatcttcatcttcatcttcaggagattcaaacaccacaatatatgtatttatgccactaattaccctgcaaatatttttggatgagcaaaaatgctaatcacagtatcggtttttttaaccaatagagaaaacttctatcaatattttttaatgaaccggcaaaaaaccgagtcaagccgagccgcatgtggggtgaaatatcatataagtcgtgtctctccctctccctctcttccttctcttaattcttctctacagatctaaccacttcattcggaggtgtctacatttctaaccgtggctcgactttggcttgctcttggtaggcaactacatttcagcatctcgatgctgaagggtcatgttgtagtggcagcgggcgcagataatatgaattgcctagagaatttatgtggcgagctggcgactagggattaacggagcaggcaacatggttgtcccttcaacaggcataccgctatactgagaccgttagatctggtcaccatgagctcaagggtaaacagatttgtaaccaacacccattataaacgtaggcgaatatcaagattaagtacgagcat

SEQ ID NO: 18181 - DNA, 670 bp, Oryza sativa
gacttggatctggacataaaaccgaaattctggagccagctgcagcgcctgctgaagagcatgttggcagctgctcgaccggcagcttctgtcggccaggccaacgccagcaacagcagaggagacaccgccaaactaaaagagatgtatcgtctgtcgctcaaatcaacctctctgggccagctgcacgcgttgcacaagatttgggtctcctaacacatctctgttgtacaaacatagacatcagattgctctacaaacgagtgttgtacatgttgattacatcgtcatcagcatctttgagcttgtaacttatgctgtcttttatgtttttatccatttgttatttattttttaaaatctctgggatgacttacatgctgattgtaaatttgcaattgtagtaatagttgtggaatgtgttgtaacttacaaataccatcggcttgcattgtaactttacaacgtggagttgtactgctgcctttgaaatgaaatgctcgttttcttcagaatgtaccacaccatgttcccatagagcccgacaagcataaaaaaaagtttgccatcatgatgctgcaaaagttataaacatcacacggaagagagagcacgcaatggagtatgctggctatcgctgaacaaagcttgctactagatgcttttaaac

SEQ ID NO: 18182 - DNA, 1336 bp, Oryza sativa
ggagcactcaagtagtcaagtgatgccacaacagatctagtatattcggattatggacaataacatacattttctctgtgaacctcgtctctattgtgttaaggaggtgttgcattggactagcaggtcaacaacttcttatcgtgcatactgatcaagaatagagcgtaccttgttcaggtaaactaactggacagctatgcatgtaattgaaatcactgcaaacagccacgtctgaaagtagccagcctggtttatgccctcaattgtaagcttaatggcaatgcccacagccttaatgctcattacctgacaaaacaacatagcgtgcaaaagtcatattagtgacaaaacgacaagataacataagcacaaactcatataaaacatttaccgtcaatgatccaatcactgagcaaattccaacatacaccattatgttcatctgcccataccgtggagcacaatatatcatcaggaacagagatactgctactgcagcggtagcatagcaaaggaagtctgcaccaatattacaggacatttgtgaaacataagtcaattccaatgccatgtagctaacggagaaagtatggaaacttaccaggttgtatcgccaagtgccaaatctcatccactgagcttggggtcctctcttggggagcatggaggatgatcaccgtcgacccaacaatacaaagaacacatcccagcacgcccacccgctgtaacttctcattcagtgtaaaatgtgccagaacagcactactccccaacaaatcaccagaagcatacacatgcacataccagtaattcagtacaaatccacacaaagaaacaatgaattacaaatgatgtggacaccaactaaaacaatttcaattctagtattctacctcacaattatgctgagtgctcctagcggcgtgacgaggacagcaggtgcaaacatgtaagcaatgaagttggcaatctccccaacaagcactgataagatttcaattttaccaaaatattcaaacctattcccacatgaatatcaagaaacaagtccaagataaccatgaaatttcacttactagtgaccatcccgacccaccagagcggctccaagaggtacccatatcctccaacacctgaaatttccaacaagacaaacgaaggtcacgacgcgtgcgacatgaaatcgacccggattttggacacaaaagtagcttagcttcctttcatgcaacccacagcatgtaggttcgaattagcatccagcaaccagaaaaagacctagcaatagcacctgctcgggagcccgcggcgccggcgcggaggagccccttct

SEQ ID NO: 18183 - DNA, 5011 bp, Oryza sativa
agggctccaacaccaactccagcccgtcgcccctcccagtccagccgcactggaacccgtggaccagctagattcaactctggcccaccgcaggtcttcttgggccacgtcctggcgctgtcccacggcctgctgcaccccagtcctacatgaacacaccagggcatgcagcccatgccgttcggcctccaaccaccaacaggtctgcccatgcatgccatgcagcacccgccgccggcgccgatggacttcgctgccccagtgcacgccggcactccgtctactccgacatgggacgccaacagcatcgccaactccctcaatgccatgacgctgcagcagccgtccgaccagtggtacatggacaccagcgccaccgcgcatatgtcatccggctctggtaatatatccatctctgacaagccccctccacacacatgaattgttgttggtaatggtgcttctcttcctgttactgccactggttcccataaaatatccaccctctcccagcctttccacctccacaatatcttggtcacacctcacatcatcaagaacctcatctctggcaccgtcacctcggacatcccggacatcacacacaacatcacctagctggccactccagtattgcgtctagctcaaataaagatagcatgctttgccatgcttgtcaattagggcgacaagttcgcctctcattttcgttgtcttcttcaaagaccactgttgcttttgaaataattcattgtgatgtctggacctcgccgtttccagtgtttctgggttcaaatattatcttctacttttagttgattttactcatcacctatggacgttccccttgcgtttaaaatccgaagtttttcagattctgtccaatttccactctcttgtacgcacccagttctccactgtcctgcgtgccattcagtgtgacaatggtagggaatttgataactcatccatgcaccaatttgctgctactcacggcatccaacttcggttttcctgcccctacacatcgcagcaaaacggcaaggctgaacggatgatacgcaccaccaatgaggtcgtccgttccctgctgttccaagcacatctaccaccaagcttttgggttgaggcactcaccacagctacacacgttctgaacataaactttctccccgttcgacggcttgcgtcttccttggctacccgcccaaccaccgtggttaccgctgcatggatctcgcctctcgccgcgtcatcatctctcggcatgtcgtctttgacgaaaacatgttcccttttgcagctaccaccactgcctcgcctgatgaaacatatgactttcttgatatcctagcagtacctgcaccgccagttgcaacccagccagcagcagccactgccatgctgccgaccgcgccgatcgcacccaacaccaccgctgcataggggtgaaaacggtacggaaacggacggaaacaacctttatcgttttcgttttcattttttttttcggaatcggaatcgaaatcggaaaccccggaaacgaaaacggaaacgaatattatcgaaaccgaaaacggagcaaaaacgaaccggcgcggatacggtaacgaaaatttatcggaatacataaacccctcaaactgagcctcacagcaaaatatattcttctataacttcaaataatttgcataacaaatattctaaaagaatacagcaaaacaaaatggtataagcctataaggtatacacaattcaggtgctatactgctatcagcctatcactccaggaaatgggtttgagaacaacaacagaacatcagtccatcaacacttagttcatcaatcatcacagaacagcaatagttcatcaatcatcacagaacagcaacgcacatcagtccatcagtgtttcagtacatagttcaatcacaaaacacatcaccctataaatacatagttcatcacaaaacatagttcaatcacaaaacacatcagtacatggttcaaacatatctcatccacttgtgcagcaggagtacactaatttgaaatggaaacttgaaattagatgtaacttgaaaattaaattgaccaacattttcttcaaacatccattggcgcaatgccatcctcattagaacattccgcttctactgtctctgtctcttgttccgttccattagccttcaaaaaaaatgatagagcattagtaaaagtgcaaagtcaatcactatatacacctgctgctgctggttgctcagatgctgccgctgggctgctggctgctgcgaggcgaggagccgtcggcgttggtggcggtgaggaagagactgcagtggtggtgtcgtcgtcgcctcgtcggtgtggtggttgttccgtcgtcggcggcggtggtggcgacggtgaaacggcgagacgcggtgggacggcgccttgagatggcggggaccgagcagaccggcggaggtgcgagatggtggcggcggccggcggcgaaacgacgaagagcaagggcggcgcgagatggtgggggcgaggacggcgggggccagccggccaggcgaccagcagtgggcggtggggcgccggcgccacgggcggtgggcgtgagggcacgccggcgccgcgatgccgcgatctggacgccgcagccgccgctccgcctccaactcgcgagtcgcgtctgagttctgagtctgacggtctctctcctatagggttagccggttagggtagatgccgccgcgatttgggttgggctgggaagctagggagaattatggactattgaatctatgggatttttaacttcggaaattccgacaatttttccggaatgtttccgatcgtttccgggttccgacggaaactgcttttatcatattcgattccgtttccgagaaaatatttccgttttcgattccgattccgagaaattccgaaaaaattccgaccggccgattccgtttccgaaaacatgaccggaatccggaaaaattccgtactgttttcacccctaccgctgcaccatctgcgctgatcgcacccaacaccactgctgcaccatctactcctacagctgccgcagcacctcgcatgcaaacccggtctcactctggcattcaccgcagcccgcgcgagcggctcaacctccacacttcggtcactgctttgtctcttattcccaagtctgttcgttcaatgttgaatgatcccaattggtatgcagccatggttgaggaatttcaggctctcacctccaacaatacctaggaacttgtctctccaccaccccgagggaatataatcactgggaaatgggttttcaaacacaaattccatcctgatggtttccttgaacgctacaaagcacgatgagttcttcgtggtttctcccaaaaggccggtgttgattttggagaaacttttagccccgtcatcaaacctgccactattcgggccgtcctctctctagcccttacatccaaatggccaatacaccaactggacgttaaaaatgcctttctccatggccatctctcagaaacggtctactgtcgccaacctaccggcttcgtcgacgccaagcaccccgacgtcgtatgttgcctgaatcgttctctctacggcctcaaacaggctccccgggcctggttcgagcgcttcaaagcgtttgttcttggacttggcttcacggcggcaaaatcggattcttcactgttcatctttcggagctctctcggtactgcgtaccttctactgtacgttgatgacataatattgacagcatcaagcgcctctttgctgcaacgcatcatcacagccctcagctcggaattttcaatgaaggacatgggccctctacaccacttcctcggcgtccaagtccaccgcagtggttatacaatgctcctgcatcaggagaaatatgccaccgatctccttgatcgcgccggcatgacgtcgtgcaagccatgctcaactccggtcgacacttcgtccaagttgtcttccgccgtcggcgctgccgttgcagacccgacagcatatcgcagcatggccggagctctccaatatctgacattcacaaggccagacatagcatatgcagtacaacaaatatgtctacacatgcatgatccacgtgaaggtcacttgaacctggtgaagcgagttcttcgctatatcgaaggtacactttgtcacggcatacttctgtcggcttcgtcgccacacgagctcaccgcttactcggatgccgactgggctgggtgccctgacactcgccgatcgatgtcgggcttctgcgtcttcctcggctccaatttgctgtcttggtctgccaagcgccagcctaccgtctcgcgatcaagtgccgaagctgagtaccgcgccgtcgctaacgcggtcgccgaaacaacctggattcgacaactcctccgcgagcttcatcaaccgcttcaccgagctacggtcgtcttctgcgacagcatctctgccgtctacatgtcagctaatcctgtgcagcaccaacaaacaaaacacattaaacttgatctgcactttgtccgtgagcgcgttgctctcggccaagttcgagttcttcatgtcccgtcgtccgcctagttcgtcgacgtcttcaccaaaggactgccgtcgtcgctcttcctcgacttcaggtccagcctcaacgtccgtgaactcccggctgagtctgcgggggtgtgttagcgtactgtacatcttgtatagcatagtagtctgtttgcatggatagatagcagcccaatcaacctaaactacttgtttctagtcatacgtaccgtaccgagtctctcgttcggttgttatgaggctatactctcctgctatatatatatgaatgagatacgccaccaaatgtgtggcttcaccctcaaaccctttcaatatgtatcattaacgataaaaacttaatcactttaaaattaagtttaaaaatttaaatgtatctcataaaagcatccac

SEQ ID NO: 18184 - DNA, 2205 bp, Oryza sativa
acgtaccaaccaactaaacattaattgcacctggtgaaagaagtcaagaaatgaagaacaagagatcaccttgagaagtccaggacgttcctgtagatggtccaaaattgttcaaagacgaatagtcaggcgaccccttcatgtcattcatctacaagtatttttcagatgattcagcttgcaaaattgtggccagtgtagttaagttgtcaaaacataattgtaattaacattgttctattatgtcaggtacccagctaggagaagccgcactccctgtcgggctatcccaacctatgtgcgtgacatgcttgacgtcggttggataaccaatctccatttggtgttccttcaccactgcaagatggtttaagcaagatcaagaaagaaattaggttgtgcaaatcaaatgaactgactattcatgccttgtgtaacattgtagaaaagaaagtaaaatctacttgatggtcacataccgaagatctgagagatgaccttgaggcccttgaaaacccctttcatcttgtacgccattggtagatgttgttcacaaccagaatcccactggaaacagaagacaagaagcaaaggttagcaatgagctctggtttcacaacagttccattgctgaaagaatatgtatcagccagataattatgatatgttttgtccgatatgattatcgatgaatttacttacctcaagatgttatgatgggaggtgatgatgatgatgttgataccctccttggatgttctcaatggaaggatttggagtaagcaacaggtccatcacctcccattctatttctctagtatggcgtcaggaacatccatgagaagattgtatttgttaggattttatgaaggttggcagctggaatgaagcaaggaaaggaaaatatttgtttttttatggatacatttaatctggcagcaaaatcataacaatgagcaaaatgggtctccagaacttttgagttgtcagaaaatggttataataacagacaaatatgtgcaggctttcctgcctttgccagacaaatgaaaaaaaataaaaatcatatatatgaaaagtattcagaagcaatctaactgtacaagaatacaggtacattggagttccagaccactaagtcttcagctgcatacgtgctgttgtccctaaacacaaagttataataagcatgagatgcagtcacgttaaggacaggcttacaggcttgtgaatcagtcaagaaccgcgtcttgagatgctgctggtaatttgcatagttagacacagctaataatatttggaaagatcagccttgaattagctatcaaagatggataaattgggagatacgcaaacacacaaaaagctaggttgaggatatcaatgtgattcagaaaggatgtaaggggaggtatcaatcattcaaacaattacaaatcacacttttgctgctattaattcctccacaaaatatagttcacttttgctgttatcaattcctccacaaaatatagttgttatgtccctacaaaaatatatagttatgaatcaaattaagaaggttgcatagtgggagactgttgacaatttaggccatgtagatactagtgcaacattccctattcatatatatatatatatatatatatatatatatatatatatatatatatgctctatgtctttatggagttagatatgaaattatccatctttgaaactggtattacggtagtcgattttttagctccttatcagcgtggtagaaaagttggacttttgagggaactggagtaagtaaatgcatagcgcaaagaaatcaaacccaaataaagatgagaaaaataagaaacggttaaagaaaaaaaaactttatcgatctgtgatcctgagacaaaacatgaaattaaggaacatttcatttgcatttgcagctgggtcacataatttcttacaaagtatagttaggacgtatcaatgaaggaagtgaaactggaacatacattataccagatacagctttaccatgttacattcttgagactggatcagattgtgaaggtgaccttatcagtggagctacaaatatgtaggctgcacacaatgtcactgcactgagatgacctttttcctatgttcatacattttagcaaagtataagaaacaggccagggacaaagcattgagcacggtaataagcaagta

SEQ ID NO: 18185 - DNA, 13431 bp, Oryza sativa
  unsure (1)..(13431): unsure at all n locations
cctttttacctataaagggaaaactgtattttctagttgcacttttgccgggttcttttttgtttctgcggatttcaccaatccattcgttcgccgtgaaactgacagctactcgtgtagtccctctctgaaacgtcacaatacacgtctgtgctagtagtaggtgctattcttttcagatgaaatgttgattgatgatctacttaaataaagaagaaccaaatattatactccctccttcccattttaagtgcaactatgagttttcgtgtccaactttaatcatccgtcttatttgaaaattttttataattaatagttttgttgttaagagatagtaaaacataaatagtactttatgcacgacttagtatgttataaaccgaacaaatagcttaaaataagtggtctacgtatataaagttgttggaaaaatcatattttgatgcaaataatctaccagtaattaataagtagtatcactgtctactctactatggtctatatatacaggcaaaataagggcctgtttattttgatgccaaaaaaaaccttatcaaattttggtggcatagttgctaaaattttggcaacttgccaaaattttagtagaatttcttatacagttaccaaaatttgataacaaactaaatgtagctattttttttttaactttactaaaatttggtaaggttaaaatggcatcaaagtgaacacgtcctaagattatacatacttacatacttggttggcttattcagggaaaaaaccaaacgacatatttgcnnaaacgaaaannaantanantncntnngtgnannattnnanannannantnntnntnttntttnaantttttacgtgttttttagcgatttaaaagcaaatgctaaaaaaacaaactacgatgaaaaaaccacaaaatcaactctaaatttaaagtcaactctaaatttaaagttgaaacttttaaattttagtttataatataagtataagcatataaacgaaaaaaaatgaggatagtcatggtacacgtaccaagatgtagaggagggaggcgcagacgatggtgcggtagcggccgagccatgagtcggcgacggccgagccgagcagcggcagcagcatcgaggtgcccatccacacgttcaccgccgccgccgccgccgccgtcggctgccggagcggcccggtcaggtagatcaccaggttccccatgatgcccgagtatgcgaacctctcgcctacctccgctcctgcacctcacaacacaacacgcctcgttacatgctactttttttttctcttcttttctttttccaaaaaaaaaaggataaggcggcggcgaacgtacgtaccgatgaggaagaacgcggcgggccaccggccggagctgccgcgggaggccgggccgccgaggtggtcgacggcgagcagcggcggcgactccggctccggctccggcaggagagcctccgcctccattgccatggctgctaacctcccaaccgttttgagtgtgatttttcaattagcgtgcgtgcaacacaaacatcaccagccgaaagagatgataatatatatatattgatatgatatccttgtagtatcaaacgccagccatttgaagggaaagggaaaaatggtggtagcatctctcaccttcaaatcatcgacggacgcgtgcaaatatacgtcgcgatcgcacgggcgtcgaggcgatgaggacaaggcaccaaaatgcgaaagaaaaaaatcaccatagtacacaactatactgctggaaattttgcaaaactgtcacattgatgctttttaatattatttataactgccataactttcacagtccacaaattgtacaaccacccctgaaaaaagaaaatcaacatttctccacagcaatttttacttgctgtggcacctaggctagatctccttctccatgcgaatcgttcaaggcttcaagcagcaacagaaaagcatcgtacgggcattcactcttgaaggcactgtacagcactactacagcagcataagcaagctgcaagccttttaccgcctgaaggtcttcgaaagtgatatgccaacaaccaacatgtgatagccaatgcattttcagcatcttttgacacatcctcactgtactgagatgcccttcttcttgtggacatacactcgcgaaaagtgtagataagcagctaaaccaagaacactgagcacagccaatagccagtagaagtaatcaagatgacctcggttcagattgtccgagaaccagctatccccagtcatgctggtcaccttgtcaattgcatacacaagaaagctgctgatgaagctcccaatcccaaatatgctcaggtacaaagcaaggcccaaactgcgcaaaccatctggtacttggtcatagaagaattcttgcaggccaaccattgtgaacatatcagccaaaccagtcaggatgaactgagggaccacccaccagaagctcatggggattgtggcttcaggattgtccaccaggccaaaatctcttgctaccatgagccttctgtctccacaagggcagagacaaccatcagaattactgagataatcaatccaattccaatcctttgcaacgttgtgataccgcgagggttctttgagtacctcctagtaagtggaacaaggattcggtcatatataggaacagagatgacgatcgacacactgatcaagctttgtagggcagcagctggtatgtgtactttacctatccacctgtctagtgtgcttgcttgcttagtgaacagtgttatccactgggcaaaaacaattgcgtaaatcaggcaggttgcccctattgggaacaatttaagcacagcggtggcttcatcaggaaagcatgccttttctgcatcattgtgatctccctgggatgatgatgcttgggtgcagtgaagatcccctgatgatctgcatgccagaggaagaacgagcaagtaaggttgtagtttgcaacggatgggctctgcgggtggtttcattgcatacatactttgaacaccatgatgcgcaccaccatcgtatctttgctagaagcgatttcccaacctggtcgaataggcttgtgttacttcttagaggatagaagcggtaactcttggtcccaagcaagaatactgcaagagaaagagacatggcaatgcaagggattccaaacccaagctgccagcctatgttatcttgaatgtaattcaagattgaaactgtaatgacattgccgccatatatcccaaagtaccaccaattgaaaaatgagctccttgaggcacattcttcagggtcattctcatcaaattggtcggccccaaatgcttggacacaaggtttgtggccaccttgagcaaaggccacgatatacagggacaagtagaagaaagctacatgaatgtccatactggaggatgcattattatctgcattatctccagattctgcttgttgatgaggtacaagaaccggtgatagcgtgagcatgccaagcccctatattgtggatacaattcagtgagaaatctacataataaaaaacatccaagaaactccacaatatcattgtcttacacagaaactgaatagtatcattttatcacagtgatgcataattgcatagtatgcccattatgatggtgatagccatatatcatgtggatggaaaggacaatatttagctgaattattgcctgaaattcctccgtgcttcagatctaaacacatcaaacttgcccctatggttaatcctttacccggagaaagtagaaactatatcaggaaaaatcattgttagcagagctaattactctgaaaattccaggtgaactcacagaatcagagtagcatatgttcagcattgtcacaggttcatcataaaagtggcagttgagtaagccacacaagaacagccgacagcgagagcactgcactgcacataccaggatgtagaggagggaggcgcagatgatgatgcggtagcggccgagccaggagtcggcgacggcggcgccgagcagcgggagcagcagcgcagctccgttccacgcgttgatggcggcggcggcggacgccgtggactgccccagcgggccggtcaggtaggtgatcaggttcccggagatgccgccgaaggcgaaccgctccgagatctccacgcctgcgatggcgaccgacggcaactgcacgcggattagttcgggagagagagagagagagagtgcggtgagagcgcggcggcgcttgctcgttgactcgccgccgccgccgccgccgccctggtttctcggggggagttttttggaggtaccgatgatgaagagggcggcgagccaccggccggaggtgcggcgggaggccggacggccgaggtggtccaccgcggaagccggcggcggcaggaggggctccgcccccgcgtccatggtggctcggtcgccgtcccgttcagatattttttcctcttctcagtaaacgatctaacggagtttcaaaaagaaagtaaacgatctgacatatttaactaattgccacttttagatgttgcaattaactatttgccaccatatttaattgccatatctaaaagtggcaaatatttaaataccctagcgcgcacgttactctcgttactatatatttgtctataaatttatatatgtctaaagttaaaacgacttataatttgaaacggagggagcactttgttggcggttgctagttgctataatnccgttccttgaaccaaacctnnaacatgntnngacacngtnnngacanantnanntnantngnccnananantnntntntnantnnntnnantgtngngnngnaantnaaaaaaactgtaaaaaaaaagttcatagaagtttgacattccacctaagttataggcaaagtgacatatttcagattaaaagttatagtttgactaaagtaacttagtacaaaacacattaacagttcacaacttacaaaaacaagttgattcggttaagcacataagcattttgggtggttttacaacaaaattgattaggttgacagtcatttgtagcaaaataacttatgagatagaataccaaaattcaaataatttatgcgatgaattttataaatttccctttattattttctgaaccttactaaatctaaaatttaaaaataaacctcacaaaaattattttaaaaatatactccctctgttccataatataagggattttaaggttttacttgcactgtttaatcactcgtcttattaaaataatttaaaattatttttttacttactttattatctaaagtattttaaggacaactttttattttttatatttacacaactttttaaataaaacgagtgatcaagaccgaccaagccatagcacggtatgctcgctaagctaagtgtttcttcttttatttttatttcttgttacagtaagagcctggcatgtattgtcaactagtactgcagattttcagaaacctcggctttgttcttgtagacatatcgctttgaaatgtacacgaacacggcgacctccaaagcgacgagtgcagtgagaatccagtagaagtagtcgaggtgggcgcggttgatgtcgtcggagaaccagctgtctactcctctcctcgtcgctcagtcgatcgccgacacgagcgcgccgctggcgtagctaccgacgccctgcgcgctcacggacatggcgagcccgacgctgcggagggcgtcggccgcctggccgtagaagaacaaataaaggatttgcaaaaacaactttacgcttctttcaaccttacattaaacacctaaattcccgtgacttgctaagtacaaaagtactcacccttactctctctctctctatatatatatcctccgtcttgaagagaagatgaagtgaagtgaaaaatagggtttcgttctggttcccagccgtcacatgtggtgttgggtgttagtccgttgattccgctactgttgctgttgctgttggtgtttgcctcgtctgtgtcgccgattgcattctcgtgttgttctgagctacaatctaagttaagataaataagtcctctatttattttaagcatcacaatgattcatatttatcaccagcgctatgtcctgagattggtactggaatcgcggtttcgtaggaagcagtgcgagaatcgcggtttcgtaggaagcggttcgcactgttttttctacgatacgttcctgtcgggtgccgttgtacggcggtgccggatcgaggagtgacaataaggtaaaccctgttcacaccacaccgctatacatcttctccataccaaccattttccagatttataaacttcaaaagaattattgctcgcctttgttcttgtagacatatcgctttgcaatgtacacgaaaatggcgacctccaatgcggcaagtgtggcaaggatccagtagaagtagtcgaggtgcgcgcggttgaggttatcggagaaccagctctctccttctccccttgtcacccagtcgatcgctgacacgagcacgccactggcgtagctcccgacgcccagcacgctcagggacacggcgagcccgacgctgcagagctcgacgggcacctggtcgtagaagaactcctcgaggccgatgaggccgaacaccttcgatgtgccgaggaggacgaattgcggcaccagccaccacacgctcgtcggcaccgtcgcgtctggcctgtcgaccagcccggcgtcgctcgcggcgcggagccgtttggcctcgacgagcgccgccacggccatggcgaggcccgacatggccatgccggcgccgacgcgctggagcgtggtgatgcccgcgaggtgccttgtgagacgcctcgcgagcggcacgagggcacggtcgtagaccggcaacagcgtgacgatggtgacgctgatggcgaactgcagcgcggcgggcggcacgacgaggcccccgccgacgttccggttcatcgtgctgccctgcttggtgaacagggtgatatcctgcgaggcgatgatggcgaacactatgctggtcatccagattttttttttcgccggaaaaggcagaaggagaccatccgagtatattaagaagaagtaaagttacaaaaaaaaaaaacacgacagaagctgtcgaggacggatgtgcacgagacaccacacgctaaccacacaagcacaaaccactgaaaaatgaaaccaagcaccaaaacgacccccgctaagcgtggccgatcgccgcccggcctacaacaacaccacaaaggcgagactccaaaaaaacgatgtccccaaggaggtcatgacatcaaggacgccgccatcgcccatctaagaaagatgtggttttcacccagagagaactcgccaagaaaggggaagaggtacccacaacagcgcccccaagagggttacgacacccgaaggcgtagccgctgctagcccggtgatcaccgagcgaggcttacgcctggaacccctgcaacctttcaagtagtttgtcgcccatcaactcattaaccactacacaagcattggcagcgcgtggcttccaccaagaccgcaccggcgcccctccaccggccgacttccgaacttgctgcagaaccctgccgccagctcgctgcatcccaccgctcctcccctgagagctggcccaggccacctccgtcccgccgcccgccggcctctcgccatgttcggccaaaggagaacccgggactagacaacatcgcttcggccgcttgagcttcctccactgaccagcagccgcctcaacccaaccgaaactccccacaaagaaggggagaagctcaagaagggagagggtgctgaccggcaacgagaaaaacgacgcaccgccgccagctctctttgcacagccgcttctcccataagcactgacaccggacctgcaatgccgaaaccggccgccgctcgaggtctccagctccaccaccgtcaagcgtcctagccgcccgcccactgcgcctcctcgtcgccggcagcggaagccaaggaacaaggcgccgccgacgccaccggctgcggcagcctcggggcgtcccgccgccgtccggcagccatggcggccgcgagctgctccggccagatacgcctgcagcggcgcccgcgccggcgcccagtctcggccgccgcaacagtgccgacgcccctccggccgccgcggtgacgccagcgaaaccaccgccgcagccgctctgccgccgagccctcaaggccccgggccgccgcgccctcgccgtcgcgttgtcgcgccgccgtaccggccagatccggcctcagaggcgccggatccgccgcctccccacgccggcctgctgtctccgcctccggccgctgaggtcgccgtcgtcggctatgccccatcctccccgcgctgagttagtggcctccgagcttgaaaggcctcgccgccgccttcccagctcgccaccggcttggaggaggagggggcggggttgtggcggcgcgggcggctagggttttcgccccccgagccgcccgcgcgagagcgacgcgggggtattctcctcgtcgttgggcttggtcatccagattggaagcacgttgacgagaaatcccttgccatccaccacttctttggatagaagcctgcacgaataacgttaagagaaatttgatgtcacgcgaagattgcaatttgcatccgtgcgcgcgtgctcaccgttctgtgcaaatggcatccttgcggcaaaacaccctcttcgtccacgcgcgcgcggccgcggcggacgtctcggcgagtcgcgcgagcggcgcgccgtcgatgggtcgctcggcagtggcacggtacgtccccgtgccgagcaggaagacggcgaggtacaacaccatcgtggcccagcacacggcgaacccgacggtccagctgacgttgtcctcgacgtagctcagcaatgtcgtggcgacggcgtagccccaggatgtggagaagtggaaccagttgaagtaggagctccgcgacgcgttcgcgccggggtcggcgtcgtcggcgaactggtcggcgccgatggcctcggagcagggcttgtggaagccctgcgccagcgccagcaggtagagcgcggcgtagaagaaggcgaggcgggaggtgggagacggcggcggcaggcaggcggtggctccgccattgcagctcgccgggcgagggtgctttggttgcagcgtggatgagaccgtcagcatccctaagctctgtagcagacattgtagttgggtaaggagtgtcagaaatggcgatgatgtgtccaatggcaatggcaatcaccctttttttttttgaacggaaaaaaaagttgaggcaatcaccttgaaaaatctgttcaatttaggtaaaacaaagtcttatagaaactatcttacaaaattcaaggttgattttatatctcaaaattattgtctagaagtttcagattcagttttattgaggtgtacttgataatgcagtggcaaaaggtgtgtggtttcaatcccgaggtcatcttacaatctcttcttagaaaatgtcgaataaaaaaaatttagtttgctccctctaaattcgttgtattaattagtatcatactccattctagttttatttattattctagttttatttattttgaggtgaatgaagtagctttcacctacagctgttggactggaccaatgtaccagacttaagcgctacgctcatactccaatttcttgccaaaaaggggagtagtttactcctccaacttaagcgaaccggatcatgatcatgacatgactaacgaagatgacaggcttgggtatccgagaggatcgaaatagggaggtgcagagcggcgacgcgcgacggagcactgaccagaaggtagagcacgccggcggccacgacggcgcgataccggccgaggtgcgagtcggcggcgagcgcgccgacgagcgtcagcaccatcaccgtcccgccccaggcgttgtccgccgcggccgccgccgccatggacatgcccatcagccccgtcaggtacatcatcaggttgccctgcacgccgtagaacccgacgcgctccaggaacccgacggctgcagatcagtgcagatcgatcacgccgcagcaaaagttagtagaatgacagccgcatgcatgggcgaggtttaccgatgatgaagagcgcggcgcgccagccgccgcggccgtcgccgtgtttggaggcggcggacgatggctcgtcggaatgtgcaagtagccggccggactccatggctgattggctggctctgcccccctctgacctttatagttacgaagtacaacttatagctgacatatgaagatatatttcttttatcagattaattgctcttgaacgagaactccctcatgccgaaaatgtggagcacacatatcgataacataaagaaacaagtatgggtcagtgtcacgatcttcagaaatttttggcacaataaaaagaagcattggtagcactcacctttctaaaaaaagatctggtaccactccatctcgtgcactaaatatttgagagtaacctaagtactcctatttttaaagttattgatggtcaaagttataaaacttttgacctcagccttgtctaaaacgtcaattaatatggaaccgaagggagtaagagcaactttaatggtaggtgataaagctaactatatatttatgtgcaatcgaataagaaaaaatgagtagtgttaactagctctatacatattcctagataaatgcattaattatataagcgagagagatattacctccgtagtcgtaaagaaagtcgtttaggacaatgtttaagtcaaacattgggaatataaatcatgaataactctcaagttgttgagtttaaaaatgtaaaatctatatgaatagatttatcttgaaaaatactttcataaaagtatacatatattactttttaataaatatttttatagaaataagaagtcaaagttgtgttttagagaccgtgtcgttgtccaaaacgactttctttatgaatacggagggagtaagagataaaagattagaaataattttatactccctccgtttcacaatgtaagtctttctagcattgcccacatacatatagatgttaatgaatctagacatacatgaatgtgggcaatgctagaaagtcttacattgtgaaacggaggaagtagctaatttattatattttttggggggaatttattatatatgttagctctaattctacttttgtattagcttatagtttgtagttagctctactactaaacttactgtaacaatgtttgtctaacttgttctcctgcaatccaaagatccaaacccaatctatgaggttatccccttttggccttttggattttttttattaaactttgtcagttgatttcacaacaaaattaatcacaatcgtatcaaacatttcaaaatgatttcaaatctaaatctaacggtattgcttttgtcacagaacccacatattattcactaattgttgttggaaaatcaaaaaagattatttctttctggaaaattcaacgcagagagagaaaatccactttggtaaatccattgcagagtactactaaatatatcaagtagaagtattgcagtaagaaatgcaaattgcaagttggtttgctccttttaatgcacatttggaacacaagattttcgaaacatgcgaacaggaaaaaaaaaatagcattggattgtcctagcatgtcaaattatacaaccacatgcattttcaataggactataattatacatgcaaatgctgcgaaaatgcaatgtatgttcaaactacactagcatacatcttctgatcttccccatgcgaaccatttttcagatatatatataaaaaaaacagaagaatcattgctcgtctttgttcctgtagacatatcgctttgcaatgtacacgaaaacggcgacatccaatgcggcgagtgcggcgaggagccagtagaagtagtcgaggtgcgcgcggttgatgtcgtcggagaaccagctctctcctcctctcctcgtcgtcgcccagtcgatcgccgacacgagcgcgctgctggcgtagctcccgacgccctgcgcgctcagcgacatggcgagcccgacgctgcggaggtcgtcgggcacctggtcgtagaagaactcctggagcccgatgacgccgaacaccttcgatagcccgacgagggcgtactgcggcaccagccaccacacgctcatcggcacggtggcgtccgccggcagcccggcgtcgctcgcggcgcggagccgtttggcctcgacgagcgccgccacgaccatgtggaggcagcacgtggccatgccggcgccgacgcgctggagcgtggtgatgcccgcggggtggcccgtgaagcgcctcgcgagcggcacgagggcgcggtcgtaggccggcagcacggtgagcatggtggcgctgatgacgtcctgcagcgcggcgggcggcaggacgaagacgcccccgcccacggcgacgcggcggtccatcgtgctgccctgcttggtgaacagcgttacctgctgcgagatgacggcggcgaacactatgctggtcacccagatcggaagcagcttgacgacgaaacccttgccatgttctacctcttcttctttcgccagcagaagcctgcaagattagcgttaaatttaaacctacgccattagaatttagcaagagtttagacaatgcacgagtcaagaacgcagtctgtaccgttccgtgcaaatggcgtccttccggggaaacaccctcgccgtccacacgcgcgtggctgacaaggacttcttggcgagcagcgcgagcagcgcgccgtcgatgggttgctcggcgcggtacgccgccgtgccgagcaagaagacggggaggtacaccgccgtggtggccaagcacgcggcgaacccgacggtccagctgacgttgtcctcgacgtagctcatggcggtgttggagatggcgtagccgcaggaactggagaagttgtaccagttgaagtaggagctccgggacgcgcgcgcgccagggtcgctcggcggcgtgaactggtcggcgccgaaggcttccgagcacgggttgtggaagccctgcgccagcgcaagcaggtagagcgcggcgtggaagaagacgaggcggccgagagatggcgatggcggtggcggcggcgagcaggcggcggcggcgtcatggcagctcaccgggtgttggtgcgttggttgcatcactgatgagatcgtcagcatgcccaagctctactttttttcataaaagaaatggctataaaacgtagggctgcaggaat

SEQ ID NO: 18186 - DNA, 8555 bp, Oryza sativa
  unsure (1)..(8555): unsure at all n locations
catagaaaatgctccgttaaacttgcacaaaaattctattggatgtctcaaatagcaaggaaatgcatgcctgagagtgcgaaatttgacctcttggaaaacaatttccatagtgaaagcgggaaaccttttcacagatttctgactccaataggatgtatcactaggtctgaaacgtgtcgactcccaagtcccaacagtgcaaaggtactaacgaaataccgcaacaaacttaatactatgacagtagagtgatttgcacatagacatggtactcacaacaattctattgttagctcaaaaggcaaacaaccatggatgggaagatacacaaaagatgagacaaggacagccttccaatcaaaataagaaggtggtatacataccaaaaaggcaactttttcaccatgtgtcattgaagcaattatctcgttcatcatcatcaccatgatggcattggcaatacaatagatgaatagacagatcaaacttaaccgtatcagctcgatcaatatccaatagctaaaccttactcccaaaattcagattgatgaatgcaattgcaaggacaaatattgccaccaagccccaaaattgagtctaaaatttctatataagcatatgcagattgcagagtatagtagagccacttcccctagttgcgagttcatgtcagtcttcgaaggcggacaccaactccggcaccggctccggcacggtggggagcaccgggtaattccgcgagaagcaggcgtcgcagagctcatgcgcctcgtcgccatagatggtgtggagcttgtcgagcgagaggaacgcgagggagtcgcagccgatcgccctgcggactccctcgaggtccatcctgtttgatatcagctcgccctcgctgggcgtgtcgatgccgtagaggcaggagccgatgaccggcgggctggcgatccgcatgtgcacctcgcgcgcgccggcgtcgcggagcaggcgcacgatctnnnnnnnnnnnnnnnnnnnnnnnnnnnnnnnnnnnnnnnccaccacgctcttgcccctgatgacgccgtgcacgggcgcgagcttgagcttgacggcgaggtcgcggatcgcctgcgacggctggatgaagctgcggccgctgtagtgccaccggatgaggccttgctggaactcgagccccgacgtctgcgagaatcccagcgcggcgtagaaccccgagtccggaacggggatgacgacgtcggcggtgggggcgggggactcctcggcgagcgcgcggccgtaggcgttgcggcgctcgtggacggcgtggccgaacaccacggagtttgggagcgcgaagtagatgtgctcgaagacgcacgacttgcgggggcggtgcgggacgaggcaggcggaggacaccgacatgtcgcggcggtcgacgacgacgacctcccctggctccacctcgcgctcgtacgtggcgtcgatgaggtcgagcgcgcaggtctccgacgcgaacacgatggcgccgttggcgcggcggcccatcaccaggggcctgaagccgaacgggtcgcgcacggccaggagcttgtccgccgtcaggaacagcagcgagtaggccccggcgaggcgctcgcaggcgtcgcagatgcgcgcgagcagagggcgcgagagcgaggtggcgatgaggtgcaggatcacctccgtgtccgacgacgtgctaaagatggagccctgcgcctccagcttgttccgcagcgcctggtagttcaccaggttgccgttgtgcgccacggcgagctgcccgaacctgtacccggcgaggaacggctgcacgttgcgcagggaggcggcggcgccggcggtggagtacctcacgtggccgatggcggcctggccggggagcttgccgaggcgggccgggtcgccgaacacgtccccgacgagccccagccccctctccagcttgatcgtgccgtcgtcccccgcggcggcgatgccagccccctcctccccgcggtgctgcagcttctgcaggccgaggtagcagagcgacgtggcgtccgggtccccgacgacgccgaacacgccgcactcctcgcgcgggtggtcgtcgccgtcgccgccgtccacctcaccgtcatagtcgaaaggcgtgacgcggtcgtattcggggaaggcctgcagcggcgcggggcggcccgcgcggtggcgcagcgcgagaggggacggcttggcggcggagcacctgaacacctggtggtggccgtgcgccggcgcgcctcccgtggcgcagcggatgaggccggaggaggcggtggcggtggcggcggcggcggcggcggccattggtggtgtgcgtgggagttttgggagggtgagggcttccgaggatgccctcccgaacgtaagtgaagggacgagatttaaggaggcccaggtgggcgtgtggcgatcgtatttcttactaaatttttttttatacgtacgcagtgtgtattgtaccgtataatatacggtccgtgttatccggaatggtatctttgggcctcgtatttcccagttcatcccagcgaaaagaaatggaatcgtttaattgtagtcttggatatggaaatttttaatcggttttccatctgctgtgcgtgatttttaaggggtttttggctgtcaatgttttgaatcaatttacagctgtgcccaaggcttgctgccgtccgagtctcttttatgggtgtgtttagttcctgaaaaaagttgaaagtttgaagaaagttgggagtttgaaaaaatagttgaaagtttatatgtgtacagtggcggagccaccatgattcttgggtattcccgggaatacccaacattttttatcaaaaaataaatatacttatagtatatacacatgtacacatatttgtacacctaaatcctcaactctttgatccaaacacagcccaactagtctcttgcgatgcttccaaccaacccgacccactccgtcatgacccatcagacatcagttgacccacttagccaccactcttccagacagccccctctcgctctccctccatgacccatccctccctggctcggctccctcgcgccactccccatttgcaaaccctaggtggtggcgcggcgagacggcaatcggcggcgggagctggaccgtgctaccacggagggggaggccattgccacggcgggcggtgcccgacacttcgccaagctaaggcggtcaggtcggttgggtggccggcggctgcgaggggcagggacgggcaacggcacagcgcttagacaagaatatccaactttgaaatcctggcgccgccactatatgtgtaggaaagtttttaatgtgatatgatgtgatggaaagttaggaataagggaaactaaacacggcctatatcccgtttgggcatgctgatagctaaactaaggcaaattttgctacaggacatcgtgactttgcggttttagctgtaggacaccgcgcgaaatgacttttggggaaacacactctcaaaatgtggttatttgctggtggacactacacccattaaattaataatttccgtgctgactagatgagagggccccacttttttacatgccttgaacaaattgccctttctctctctctctctatcttcttcctctctctccccctcctctctctctctcttccttgatggcgcggctcgcggtgattgtgtggcgtagcaccgcgcgcgatacgggcggccggcgacgcggcagagggcagcgggaaggtggagtagcagccggcgcggctcgcggtgaccgtgcgacgcgatgcaggcggctggcgacgtcctctctctctccctcgacggcgcggctcgcggtgaccgtgcggcgcagggcggcgcgcgatacaggcggccggcgacgcggcagagggcggcgggaaggtacagtagcggttgacgcggctcgcggtgaccgtagacgaccgccgcccctacgcccagctcttctctgccccgctgccggcgacgcggcagagggcagcgggaaggtggagtagcggccggcgcggctcgcggtgaccatgcggcgtagggcggcactcgatacgggcggccggcgacgcggcagagggcggcgggaaggtggaatagcggccgatgcgtctcgcggcgaccgtagacaaccgccgcccccacgcccagctcttctttgccccgctccctaaccccacgcggctgcccggcggcatcatggcgcttcctcactcgtcgcgccaccacacttctacgtggacgtccagcacgcagacgtcgctggtcaggcatggcgcggccggcacacagccccgacgacgacgacgtgtcgtccgtcctaggcagccgcgcaccgagcgaagaacggcatgcccccgccccgcgcctcctcctcctccccctccccctcccacgagacctccacgcgccgccactcacctgtggtgaggtccgccgcagccagtgcgcactccgtcgctgtcggccccttcccgtctcccccacgcgcgggtgtggcctggatgaggagcacgacctccttgcccgccccggtcgagctgcgccacccgcggtgcatcgcctaaaagcaaggatggattgagtcgaccattggggcattttggtccagacgcgtcaaaatgtgggtccgctcaatcctagtcagtgcaaatatactaaataaatgggtgcggtgtccgctggcaaaaagtgttttccccaaaagcgactttgtgcggtgtcttagagctaaaaccacgaagtcgcgatgtcctgcaacaaaatttaccctaaactaatgtagtcaagcaaaaatgtggaatgttaaaagaaacaatttaacctggaatattattagaaggcgattacatgtcaatttaataattgaacctaggccaacgcaaactattttgtatctctctgtcgaccgagctatgctccatttttaaccataataaaagaatattgggaaatgaaaatttcaagctcgatcggtttcacacaaagtcaacagatgttaccatgatttatcacaccactctcttttcaccatgggactatcacatctaaagtttcgctaccacaaagcgccacgtcatcagaaatttaggaccgttggatgcagcagggaattaaaccgatgccattgtatctaaaataaacatgagtgaaaaatcatggtcaatggtagaatccttgggagttttcacatagccaacggtccatgttccacgcagcagacaaagggtctgtttgggggagctttcagctgcagcagcttctctcagaatcagaagctatctcaaatagtacagtttttggtccagatgttgagaagttgtaattgtcgaatccaaaaattatactagaagctagaagctagaaaacccaatttttccagattctcagaagttggctatcaaccagctgcttctcagaatctcagtctccctcaaacatgcccaaaaggtcacgaaaaaggagaagcccacgttcatggtagaatatatatacaagaatcactaagcaggtataaaaaaacgcagaacccatctactcccagcagccagaacacatccaccgctgcctgtcgacctcctcgcttccatcgccacctccctgcctcttccccattccggtcgcctcctctgcctccacttccaccacacatccacatcgaccacctcctcccccgttgcagctagctgttcagttcagttgcaatgttctaactcttttcgattagatattcgtacaatgtataacccttacgatattacatatactttgcatcagcatacacctacggtgcgtgggtgagcagcaagcggcgctgcagctagcagtagatacccggggcttctctagacgggccggcacaccgagcataggtgacggccggtgtgccggccgcggttgcgcgaagcagcctagcacggaaagaagcattcgaccgagccggccgggagcgagcaggcggtgaaggaagctccgacggcagcggcttatggtgaatgtgatgaatatttttggaagattttttcaccctttgcaggtttgtgaaaacctgtcaaaaatcggtcggagtttggttacatttaacgaaatatacaatttttattataaaagtatgggtaagtgttaaaggatgtacgtgtagttttataacggagttgacacttttaagtcatcttaacatagtaggagcaaaccggtgtttcatttaaaagacgtaagagcaaaatcataaatcctagaaaaacaaaatcacaattgtatgttttagataatagaataaaacatcacgacatttgctcaacgagttacagccaattattacaacgtaacattcaaaacaagtgtagttcaataaataaaagaagataccaatcatgaagaagaaacaatccaaaaactaccaacctaaaacaaggagtacacaattattgatttatatttgtgaatctccatctaaaattgacaacaaattgtataaccatttgtttcaagattacgacatgcaacttttaaaagttcgccatctttatcacacttttatgttgtgcccaggacctgagccaattgtcaaaagtcatgacattcctattcacccataaagcacaacatataacatatgctctaagttttatacttttcttgtccacccccaaaagccaatcataaaaaatactacatctgtcccaaaataagtgcagccgtggatatccgtgcccaacgtttgaccgtccgtcttatttaaaaaatttatgaaaaatttgaaaatatttagttacacataaaagtactattcatattttatcatctaatagcaataaaaatactaatcataaaaaattttcaaataagacgaacggtcaaacgttgaacgtgaatagtgcaaaactgcacttattttgggacggagggagtatgagatatgatatatttttaaagaaaatatgagatatgctattaggaagatatagaccaaaagaaaactgaattgctctccaaataaactatgcataatgacattccataattagatgctgaatagtctcatttttcatacataaacaacctctcaaactatcattccaatttctccttgccaaattattcttagctaacacaattcctccatatgaaagtatggttatgaacattattgcctcaaataaaaactggtatgattgaaagtggaagcaagtaaaacatgccgtactgttcaaattactgccaaaatcaaccttactaaaatttggcattgccaaattgttggcaagtaggtagaattgctaaattttgtcatgatgaaataaatacattatgccaaaattttatatgagttaccaatatttgataacaaactaaatacaactatatatttatcaatttttaaaatggcaccaatcttagataggcccgtcatgtcttgtatgctgtatccttctcctgcaaacgacaaggcaaatcgatgaagaaaaaaaaagcatgacggtgctatctctaaaagagagataaaacacaatggcaatgtgaagaatgaggatttcaacaatagattatgcatatgcaaaatgcgccgtttcattctcgcgaccactcctacatctacacaataattgcctttttgacttagcaagtctgatttgccagagaatttccaatgaactatacttttcttttcttttttttttacagccgccaagctagaagactgtaaaccgactttgatttgtgtgactcgctcggtcctttgcttcagctgtccaacaaagattcagccgccggccgtgcatctaaaattcggcgagctcgaaactaaactggtggctggttcagcaatacacgtaccttgaggtatctgttttgatttacacaatttcactgtatttaagacgaattttaatttccgtataaatcagaaaatttcacttataccaaccctcccaaactagaaagtcagcaacatgggcactttcgtcttcctgtatgccaattatggatagggattagtctgttctctttgggggtgggctcgagaacagggggccacctagcgctgactcatggggcccatcactgagccgacctgacctctacagggtgggccatggtactatggaccgtggtcctttcatgtataaaggccaggccccaccaccgatcacaacttggttcgggccttctcgcgtcgcggtcagggccaagtggggatacggggcacacgtcccacgtcacgtacaatacaagtatacaaaaactatggtgacgcaaattctacattgctctgctagttcactcccttgcagctaccttgggttacctctttcaaccacaaaaatctctcataacatgctgctgctagtcaactcaaaagttgacagatatctagccggatggttgcctctttcaaaggggggaagtctaactatgatcaacgcaatcatgtcagctatcccgacatactacatgtcatgttgtatctggccggaaaaaatctatcgaagcactggacaagataaggcgtgctttctt

SEQ ID NO: 18187 - DNA, 2281 bp, Oryza sativa
ggcgcgccgcgcgcttcctcatcggtaacgtcgtcgctgacctctcgctgtactcgcgcgcgtccctgcgccgcgcgcaggtcgatcgattctttgcctcgcctgagcgtttctcggattcatggatgccgcagccgtcgggttcctggagcgcatcgggttcaacggcgtgcagggcaatctggtgatgtacctgaccgggccgatgggcatgtcgacggcggcggcggccgccggcgccaacgcctggggcgggaccgtgctggtgctgacgctcgtcggcgcgctcgccgccgactcgcgcctcgggcggtaccgcgccatcgtggccgccggcgtgctccatctcctggtcagttcgatcttccgcttctctcgatctgtacctgtcgaacaactctgtcatcggatgatcgagttcatcgatgttccaacaaagagtcgcaattttacagagtttgggaatgctgacgatctcatcagtgatgcaaccaaatcatcctcacccggcgagctgccatgacgcagccgccgcctgctcgccgtcgccgccgccgccgccatctctcgcccgcctcgtcttcttccacgccgcgctctacctgctagcgctggcgcagggcttccacaacccgtgctccgaagccttcggcgccgaccagttcgcggcgagcgaccccggcgcgcgcgcgtcccggagctcctacttcaactggtaccagttcttcaattccttcggctatggcatctccaacaccgcgctcagctacgtcgaggacagcgtcagctgcaccgtcgggttcgccgtgtgcttggccacgacggcggtgtacctccccatcttcttgctcggcacgcgggcgtaccgcgccgagcaacccgtcgacggcgccctgctcgcgcgcctcgccaagacgtcctcctcggcggcgcgtgcgtggacggcgagggtgtttcgccggaaggatacctcttgcacagaacggtgagctcgccgcgccagcgaaagcaaaacgtgcgttcttgatgagttgatctgataaccttcctaatggcgaatgttttacactaatcgtgcaggcttctggcgagggaagaggtaggcgagaaggggttccttgccaagttgcttccgatctgggtgaccagcatagtgttcgccatcgtcagcgcgcaagaggtcaccctgttcatcaagcagggcagcacaatggaccggcgcatcggcgcgcgcgggggcctcgtcgtgccgcccgctgctctgcagtccattgtcagcgtcatcttcctcaccttcgtgccggtctacgaccgcgccctcgtgccgctcgcgaggcgcttcacggggcaccccgcgggcatcaccacgctccagcgcgtcggcgtcggcatggccatgtcctgcctcgccatggccgtggcggcgctcgtcgaggccaaacggctccgcgccgcgagcgacgccggcctgatcgaccggccggacgcgacggtgccgatgggcgtgtggtggctggtgccgcagtacgccctcgtcggcctatcgaaggtgttcggcatcatcgggctcgacgagttcttctacgaccaggtgcccgacgacctgcgcagcgtcgggctcgccatgtccctgagcgtgcgcggcgtcgggagctacgctagcggcgtgctcgtgtcggcgatcgactgcgcgacgaggagcgggggagagagctggttctccgacaacctcaaccgcgcgcacctcgactacttctactggatcctcgccgcgctcgccgctttggaggtcgccgtgttcgtctacatcgcgaagcgatacgtctacaagaacaaaggcgagccatgattcttccgagttcggattagagtgtgtaataagtctgaaaaatggtccacatgctcaaagatgtgtactctttcccgtttcataattcttacattttacataaggttaaggttaaacttttataactttaattatcaataactttaaagtatttagtttaaagaaactataacaatgtatatagaattatctttcaaagtactatgagaaaagtaaacaatatttatttatttatgtatatattataatagaaaaatcaagttaaacatgtattttgaacaccgtgtcattatctaaatgttaagaattatggaacgagagggactatagtatttatagtgagagaatgcaacataaagattatggtacctctctagcagcaagatggagtacaagtacttggtggctggggcatgcttggattgtatccat

SEQ ID NO: 18188 - DNA, 5264 bp, Oryza sativa
acgtaaaacgaaggtcctattattgcgtgattaattaagtattagctaatttttttcagaaatggatcaatatgatttttttaaacaactttcgtatagattttttttgcaaaaaaaacaccatttagcagtttgaaaagcgtgcgcatggaaaacgaggcggaggagttgggaacaggcagcaacgaacagagccttagagcaagcctaataacatagccagctactggctctatactaataccatgtcacctatagccatcaggcccatcactaatataataggctgactgttaggttggctgtttgtttaactctattgaagatttagatatttaatattagcatgtgcacctgatctcctcgcatctgattggaagaaagcaatatttcctcgtgtgttgtgcttcagccgggcgatagatggagcgcccgctccatcctttttcttcccttctcactcctccacgtcggattttgctgacgggtaacgtgctagcgccggctgattaggatgtattaaacctgctcttaggagtactactctctagtcaaattgctttgacgttgaaaaagtggacatcattttttttttgctagtgggagtaattctgtgacaaaaaacagtatcattaggtttaggtttcaatttatttttgatataatcatgattttgtggaaaaatcaatcggcaaagtttgattgtaagttaccaccttcttcggtatttacaacggtgggtagaaatcccatcgcccgaacgcgtgcacacagtcgcacacgatttttggtgcactttcttttttaataacattaattaatgacggaaacaattatgctcgggcgctctgtacctaacaaaatatcgggcgtcttatcagtcaaccattccacattcctccgtggcggtggtcgggccatggtttgttgtgaccggcgagggttcatgcagctgcggtggcttgctagcacatcggcgtagctcgaggccatgagatgggaggaagacagcaacccgtgcacaaattttgataatttgaccctttacagaaactcagcctgttcatctacggttaagacgggtttccgccataacccagcccaacccggagctggctggtattagacggtttggtctagcggtttgaacgggttaaaccgtttgtcgtcttcttcgtatgagaacgaacagagagcaggacgacagccatggcagctgtcctttgcaagcagataaaaattcctgcagatgatgcgcaagcacttctgtagatgaacgaacaggctgacctggcttcgtgcggcgctttcctcgttggtcgatgagcacggccggggcgaggaggatgacgagacgaaagcggcggtgagagggatgcggagccggcggggacgacgcgcgacgctttcctcgttggtcgatgagcacggccggggcgaggaggatgacgagactaaagcggcggcgagagggatgcggagccggcggggacgacggcggtttcaacgggttgtaggttaaagcagcccaacccgtgcagaaccggccgtgcggttcggtctggttcggtttgatggtttgaccgggttgtgcccaacccgtgaacagcctgaacagaaacttattaaaaaataaaccgtgttaaaaacttattttaaaaatgaaccgtgacctcagcgccaattccgatggcgctgcgccaccaattttagcgctaacctccgagttgtcataagttagccacattatcaaggccctctaaagcaaaggtcatgggaggtcatgggtttgaatccgcgcctgtgattttcaaccgttatatgcctaaaaaatttgctagcttaaggcttcgaacccaagacctagtgctaaaaaccaatagagctaaccactgcactagtagtatatttcaggtaggcatcaccaatagagccttttaggctttgaaaaggtcagcgccaatgagagtggcgctgacccatgatgatgtggctaatttatgacacctcggacggaggttagcgctaaaattagtggcgctgagatgttggatctcagcgccacttccgatggcactgaggtcgcggttcatttttaaaataagtttttaacacgatttattcttgtaataagtttttacaaagggttaaattgtcaaaatttatggcatcccgtgtatggatctggagatggcgcggtttccgttttgcccaagtgatgacgatggcatagcgagctcccaatagcaaacgatgacagggtggtgagggcctagggaaacgacggctgctcgcctcagaggagcagaagggcgttgtaccttctcggcgtggatctccagcgaagaacggaggagagcactgagccgacaacccttggcaatcctgtgttcgtcggagggaagaagatacagtccaaaccggatatattttatttcatttttttttatgttttagctagtgtacttatgatgtttctttgtgtttggatcaaatgttgatagtatgccatattttcatctttgatgcacacggttttgtttatgtttcaataattcaaacctaaaaaaaattcaaaattaatgtaccatatgttgtagtggaatgtttcaagtgtgatttggttatgtttcatcatttaaaatgttgtgaaatattttcgtataaaaaggtgaaacaacaccaaattttttttttggaaaaccgggcgttcaatttgtagtcgtatcccactaatgatgcttgttttcattttcagcgccgctaatccctgtatcgctggacacgacacgtgccctagagcgagcttgagctttagctcgtgtgagtttgggcgcacgaactgcctaccggtgagcgaatcatcctttcacgcttagctggattatgtgacagccggaagaagatacctaaagaatagagaagagggttcgatactatcgtaacttttgaagcctgctctatctctagaaagaacacaatgactgagttttcaaccaacgacaatggaacaggatcgatattgcgaagacgatgacaaaggaagcatctctttagcctttgacaaaggttgtggttcggcagctagctacttatgtagccactatagtcctaggtcagcccatctgattagatagagtgcactcagtcccttcccctacttcctctttttttttttctgttcagttgtaattggcaactttactcgtcttattgcaaagatatgtaagtcttttacgtattaaaaaattgctcgcgagctttgcgctgggtgggcttgcatttttgggtctaccgtttaattgggtcaatttatgcctaataaaaagtttaaagaacactgtttcttctttgattaaattttacattagactatttttttcacataagtttcaagtagagattttatacatttattcagttcatccgtttgaaggaggcatctatctttatacgccatcactctctactctctattactccgaattactattgagtatattgatctagacatctagccacaatcaggcaaggccatcagcccattacgacacagaaaaatatcttgatatctgcccacgtcagctataaaaaagtatcgagagttcttccaaaaaaaagaagaagaggcggctaaaagtatccaagcatctgtctgcaactctgcatcatagcggccggggtgccactctgcagtctctcactgtgctggacatggagtccggcgggatactcccaccatccgagacatgcgccggctccggttcaccggacggccgcggcggctggcgcgccgcgcgcttcctcatcggtaacgccgtcgctgacctctcgccgtactcgcgcgcgtcaccgcacgcacgcaggtcgatcgattctttgcctcgcctgagcgtttctcggatggatggatgcagccgtcgggttcctggagcgcatcgggttcaacggcgtgcagggcaacctggtgatgtacctgagcgggccgatgggcatgtcgacggcggcggcggccgccggcgccaacgcctggggcgggacggtgctggtgctgacgctcgtcggcgcgctcgccgccgactcgcggctcgggcggtaccgggcaatcgtggccgccggcgtgctccatctgctggtcagttctttgcttccgatccccacctgtaagttagttaattaccaacatctcgagcatctatccatgtcgtgatcaagttcgcgttctcaatttgatattccccggcccggcaacactgtttttgtgaatggattgtttcacttttcttgggtatgttcttgatagcgagggatggcactaactttatcacaattagatggtagtcgtttgtattgaagataaagataaatttaggacataagaaacaagacatttttatcgcattataaattgagttttaattattttaaacctaaaaatattatatgatatttaaaaaaatcgaatgaaatgtattgtttagcggtttgaaagacatgttaatgacaatcaagataaaatatgcattttaatgttgttgatagaagcagatggattaaattaaatattagaaagttgatacgaattataattttttttaaggaaactttatgaaaaacatttttctgaaagaactactctctccgtccctaaatataagatattttggttagatgtgatgcatcccagtacaatgaatctagataattgttagcaaccaaatcaccaaacaataagaattttaccacgaacaactattcagtcaacaatgctgttttggaggtggaagatggggaaatacatggggctagaaggttctggaagctagggaatgggaggtggaggagggaataggtactcgacaaggatccagcccggacccaagccgcctaggttggtcgccgtcctgtcttttctgttcgtctttgagtgagcagtagctattgcgttatgtattgctcttcctgggtttgcttgggccgggatttgcgtagcggaccagctgtggtgcagcccaacaaggtgtctaacaatcccctctccttgaattcggcttgtctccatgccgatgaattaaaacctcccggatcccatggttgctccaaatatttggtgttagacaatagaacattattgaagaagaatagagcaagtagctttagcctcgataacttcttactccatgcgaagtcctcatgtgtcatgcctgacaatggcactgttatgaattgcttgccaacaatgattcccaacaatttgatatgat

SEQ ID NO: 18189 - DNA, 10850 bp, Oryza sativa
atccgttgatcctccgtgatctaacgatctgcaacaaaaggtagctaagagaaggtactaaaaatcgtgggccaagtattaacttttaaattaggtggagggtcagtttcaaaacaaactagagagaaaagcccagtaactttgcttgacaatagtcaataggaatccgtcaaatttgtgctttaatatcttggtgagactttgtaagtagaaacccgttaacgtaactaaccaaagaagagaatcaaataataatatactagaattaattaagtaatcaactttgcattgatccgttctgtaaaaaaaaaaatcaactaccatctaccttctgtaaaaaaaaagaaggtatatataagatggaagaaaagattgttttcagattttgtactgtttttttggtaaagatttagtaccgttatatggcactataaatgaaaattagtgatgaaaagcgattgatcgccatggagggaatatataaggccagtgatgagcgtcaactaacaatgaaatgggaaaagttagagtagtttgttggttaagaataattagaatattaataatttgctgcgcttatgttattttctgtaccgaaaataccctttcaaattaacggtagataattcagtaagagaaaggtacctactctcactttcaagcactgtaaaagctctccacttgggtacgaatgtataccacctgcgtgactcagcctagatctcgcgtgaggacctttttatttttttaaaaaaatattattattaagatctaaaccttttagctatcctcatgacagacgtgataaacaacgctgctgcgaagccaaccagactggtatggtcaaacaacactactacgctaacaaaacgggtgtataaaaaaaatagtaatcgcaagtattggtagctaacaaattcactagcacggacagtgctagctcccgagaacatccagggaacctcgggcttaattacagttacagctacaggggcaaggaaagcaaggagaactaactaaccagcaggtggagcacgccggcggccacgatggcccggtaccgcccgaggcgcgagtcggcggcaagcgcgccgacgagcgtcagcaccagcaccgtcccggcccacgcgttcgcgccggcggcggccgccgccgtcgacatgcccatcggcccggccaggtacatcaccaggttgctctgcacgccgttgaacccgacgcgctccaggaacccgacggctgcacgcacacgcagcagcagcagcaaagccatggcgagcgtggtcttgtcagttgtaagaacgattcgcgagcgagcacggcgagaggtcggcgagatttaccgatgaggaagcgcgcggcgcgccacccgccgcggcggccgtcggcgtcggcgtcgggcttggagccggcgtcgcatggctcgtcggaatgtgcaaggagaccggactccatggctagcacggtgacactgtggcactccctctctaatgctttgatgtggacaaatgcttggatacctatatatatctatatatttttttgacaaaaagcgatgctcacttgtcctagctgacgtgtggaattagcaagatattttcgtgcacctattgctttgcagcgagtcgtgtgtgcaattgtgtcctcgccattaatggctagatgtcgggatcagaaaatcaagataatatagagtacagagtgattatagaaagagataagttcatcggggttaccagcttcgtactaaaaagtaaaaactgggccaccacaaatcacaatctacgatgttgatgcatttccttacttgtacggttctctaaattaaactttgatgaggtttttaaaaaaatgaactttgatggccaattttccattgaatgggacacgcttgaaatgcaccattatggttttgtttgatgaaaaattcaccagtatggttgcaggcttgcagcttaattataagctgaaaacagaatgaacaaagggaaaatttactgtagtgttaaaacttttgtacttctactcttaccattccaaaagacaaagcgaaaaatagaatacgagaaaaaaaaaacccagattaatttaaaattcagaattaactgccacgcctgaaataagtcggtcccatgattaaattggaagttcttctgaatatgatccgacaataccactttctataaaaactgtatattattattccagatattgttaaacataaactaaagttgcatttcatgattagattataactgcttgtatttttttcattgctattcttataacatcaactttagcatttgaactcatcaagtatctaaagattaacatatagcaattattagtaatcctaaaaactaatacaagtatgtcacatcaacccgctaaacactaaaggttaatatgcaagcatagtaacatatctataatttattactctctctgtttcatattttaagattttctagtattttccacgctctcatgtctagattcattaacatctatatgaatatgggcaatgctaaaaagtcttataatatgaaattacattatgcaactcagcatatatatataaacaagctaaattatcattcctcacatcatttccagacaatatttcaacctaaattcatccatcatttctataacatttgacatttattagcgcgcgcgggatgtgccattgagacgaaaagatccatctacaattaaatatcaactgataagactttgttcttagtgtagacataaccctttgcaaaatacaagaacaccagcacatctaaagcactaattccggccaaaagccagtagaagtagtcaaggtgagcacggttgagattgtcggagaaccagctctctcccctactcctcgtcgccgacacgagcatgccactcgcgtagctccccacgccgacgacgctcatgcacgctgccacgccgacgctgcggagctcgtcgggcacctggtcgtagaagaactcctcgaggccgaccatggtgaacgtggtggcgacgccgagcaggacgaactgcggcgccagccaccacacgctcattggcaccgcgacgcccggctcgtccaggaggccggcgtccctggcggcgcggagccgcgcggcctcgaccagcgccgcgacggccatggcgaggcacgccgtgaccatgcccgtgccgacgcgccgcagcgtcgtgatcccggaggggtgcttggtgacgcgcctcgcgagcggcaccagggcgcggtcgtaggccgggatggtgaccatgacggcgaagctgaccaagctcttcagcgccgccggcgggacgagtaggacgccgccgccgccgcccgtgccgatgacgatgcgccggtccatggtgctgccctgctttgtgaaaagggtggccacctgagattacaccaccgcgtacatcacggtggtcatccatatgggaagcagcctagcgacaatccccttgtcatcgccatggcctctcggcggcgtgggcaagctgcgccggtagaacatgtcaatggcgatggcatttgcagcctctccaaaatcattcgcgagcgagctcaccttgccgtgtcgtccatggcgtcgccacgacgcgtctcggcgaacgttcgcggttgctccgggcggtaggttcccgtgccgagcaagaagacgaacaacgacacgagcatcatggcccagcacgcgccgaacccgatgccccagctgacgttgtcctgcacgtagctgatcccggcggttgagagaacgtagccacacgacacggcgaagttgatccagttgaagaaggagctccgcgacgcgagcccgcctgggttgctctccgagaactggtcggcgcccatggcttgcacgcacggcctgtggaagccctgcccgagcgcaagcaggtacagcgcgacgtagcagaacgccacgcggcccgccggtgctgccgccggcgacgagcacacggcggctgtatcctggcacaccattgtcgcttgtggtggtgctaccatggatgagaccgtcagcatgccaaggctctgtccaaccccaaataatttgttcaccatggtgactgaaatgaaatgttagagctcaaaattcagaagaggttagaggagattcaccaaccaggagatagagaacgccggaggccacgacggcgcggggccggccgatccacgagtcggcggcgagcgcgccgagtagtggcagcataaacgcggtccctccccacgcgttcacgccggcggccgccgccgccgtggacatgcccagctggccggtgaggtacatgatcaggttgccctgcacgccgttgaacccgacgcgctcggcgaacacagccgctgcattgatcatcacgaagaaaaccgcaatatttgcagaaaccagaaagtgagaaagagaaccaaaagcctcagtgtttgatcagctagatagtgttaccgtcttaccgaggaggaagaacgcggccggccacccgccgcggccaccggatttggagccggtggacggctcagcctcaggcaggagggcgcattgttcgctggattccatatcactcgttctgagttcttactcgttcacgcgagaactgcaaagtgtttggtttggcctcgtgccctcatggcgaatataaaaaggaggctttgaaatttggtttggtgacaccaatagtttgctagttcattcgtcattgtttgtaattttaagagtgaagtacacgtacggacactctcttatgcaagtgtgacatctaagttcatgaacttttaaaatatatttttgggtctctaaatttatcttgggtgttatacagatcaaaacgtcgtgcaaccatactggcacatacatatcagggagacccacatatcagtcataggaaaaacagattttaaaaacatcttttcgttttggatccgtagtacacccgagaaaagtttaggaacccaaaatacatttcgagagtttagaggtctatataacaaacctgcataattttagaatattgttcaacaacaagaagaaaatacatactcgaccgatctgatgtaatttcatatcagcgggctacatcatattctttttcacatgacaacatcataccttagatcttaatccggctcaccatggttagctcacccttttactctgttgatattgatatgcgggaaaatgattttaaggggtttgctgataaaagagtcggtgggcgattggcataggcgagccatgagcatcgaggtgtcagtgttggtgccagagccgtaggctggtgtcagtggcggggagccacctaagatggaagaaatagcgtggcggggcatcttgccgccgacggcttgagttagagcaatctatctattattttattaaacgaatagaaaaaggagtctagaaattctcacattaatcagagaaaaagaaaaagcagagtccatatagaaatacaatttaaaaatagcttaaattcaaaattaaaaaataagtaatattagaagaggagaccagagtccatatagaaatacaatttagaagtaactgaaatccggaattaaaaaataagtaatattaaaagaggagactagagtctctcctctagagtccatatagaaatacaattaggaaataaatgaaattcggaattaaaaataagaaatattagaagtagagtatagagtacatatagaaatacaattaggaaataactgaaattcggaattaaaaataaggaatattagaagtagagtatagagtccatatagaaatacaattaggaaatatctgaaattcggaattaaaaataaggaatattagaagtagagtatagagtccatatagaaatacaattaggaaatatctgaaattcggaattaaaaataaggaatattagaagtagagtatagagtccatatagaaatacaattaggaaataatagaaattcggaattaaaaataaggaatattagaagtagtgtatagagtccatatagaaatacaattaggaaataatagaaattcagaattaaaaataaggaatattagaagtagagtatagagttcatataggaatttaaaactaactaaaatttggaataaacataataaaattaaaagtagagtttagagtccgtataaaaatacaatttataaataactaaaattcaaaattaagaaaaacatgggaagaagaggagtttaaggtcaatataggaatacaatttagaagtaattataattcgaaattaaaattgaagaatattgaaagatgagtttataattagaaataataaaaattcagaaataaaaataaataatattgaaagaagagcatagagtctatatagaaatacaatttacagaaaatttggaattaaaaaagaaatattaaaagacaagtctaaagtccatataggaatatatatatatatatatatatatatatatatatatataatttacaaataactaaaatttgatattaaaaataattaataactaacacatatataaaatatatgaatattacacattagtagttttgtaaagttattgcaaaatttaaaattatgttatcattttaatatatttgaataatataatgagaaaacatatatgctattatatgtgagaaaatataatgatgctagccgcgcaatctgcgcgggccaccatgctagttttaatagtatagcccactactggctccgattcatctatagttcatctaatagccaattcatacaatagttacttactatactattaatatatggtcccatttgtcatacacatattgcgttttagagtccgtactgcagctggctacatatttgtagcccgctgctcttctctctcatcttttatctcattaaaatatgtttgcagctggctaatagtctgctattgtacctgctccaagagaatagaggggaaggaggctggctcgagaacggcgctgttcacactttccagccaatcaataaggttggggggaggaagagaaaatgataaggttattgtgcgaacggaccttaaagcacatccaacatttcataatttgtattatgtggaatgggattttctgttaaaaattgtatagacagtcaggtgtaaacagataattcgcatactaacttacatgttaaaataaataggtccgcaacctattttgacttataagtaaattcacaggttaaccacctacacacttaggcagcccatagtctaaaaactaaaaacaaggcttgttcgaagctaagatttggttgatatttggtatagtcacttcgatagtttattaagactaattctatcgtcattgtttgtatttttaaatgcatattgtaatacttcctccggttctataataattgacgttttagataaggttgtggtcaaacttttataactttgactattaataactttaaaaatatttagtttaaagaaactaataacaacgtatatagaagcactataataaaaataaacatgcatttattcattgtatatattataatagaaaaataaggtcaaagatatattttgtagtccgtgtcattgttcaaaacgtcaattaaaatgaaactggagggaatattgttcaacaacatgaagagaatgtgttcgcaggcccatccgatgaattttgttcacctcggtccaccatgctcatcagctcgccatctttgctctgattactgatcacttgatcatcagagtatatgataacgcactacaacaattcgagatttttttgtgtacactcgcgagcaatgaagcaacagagcacaaatcggaggtttacacgcagatgccatcatcatcaactcccctgtaatcacaattgccatcagcatcgttgcccttcttcttgtaggtgtacacccgcgagaagaggaagaaggcgacgagctcgacggcacagaggccggcgaggagccagtagaagtagtcgaggtgggcgcggttgaggttgttggcgaaccagctgccgccggcgcgcctcgccgtcgcgccgtcgatcaccgagatgaggaggctgctgaggaggtggccgacgccgaagatgctgaggaacagcgcgaggccgaggctgcgcacggcgtcggggacctggtcgtagaagaactcctgcaggccgatcatggcgaacacgtcggcgacgccgacgagaacgtactgcggcaccatccaccacaggctcatcgggagccgcgccttgggggcgtccgccatgccggcgccggcggcgacgcggaggcgccgcgtctccacgagcgcggacaggacgacggcgacgagggagagggcgaggccggcgcccaccctctgcagcatggtgatccccgacggcctccccgtgtagcggcgggcgagcggcacgaagaggcggtcgtacaccgggatgaagacgacgatgctgacgctgatgaacgtctgcagcgccgccggcggcacgttgaagctccggccgatccgccggtccagcgtcgccgcctgcttggtgaagaacgtcgacgtctgggagaagattatcgcgtagattatgcacgacgcccatatcggcagcagccggagcacgctcttcacctcctccacgaggtcaccggcgtcgccgtcgccgtctcctttgccgccgctcgccggactgcatccaccgtctcacatcaggacatgcacaaacagtcaaaacacacaaagaaaaacactactaaaatcgatcgaactattcttctttacgcacttggtgcgacggtttgatctccagctcttgatcaatgtcaagaacgccttggcgacgcgggcgacggggctggccgtcctggctgtgtagaacctgtacgagcgggtgccgaggaggaacgcggcgagggagacgacgatgacgatgcaggggatgccgaagccgaggccccagccgacgttgtcctgcacgtagctggacaccatggtggtgacggcggtgccggcgcacatgccgaagtaccaccagttgaagaaggagctccgggcggcgcactccccgccgtccttctcgtcgaactggtccgccgcgaacgcctgcgcgcacggcttgtgcgcgccctcgcccagcgccaccatgtacagcgccacgtagaagacggcgacgtggccggcgcgcgacaccgggaacgccgacgacatcgacagcgtgcccatgctctgcatccatggaaacaattaattctcagtgtacgcgccatggttgggaagaagaaccgaaggagattgcaccgaccaggacgaagatgacggaggcgaggacgatggcgcggtagcggccgagccaggcgtcggcgacgcaggcgagcggcagcggcagcatctgggagacgcccttccacgcgtcgatggacgcggcggcgcgcgccatcggctgccccagcggcccggtcaggtacgtgatcaggttcgccgccacgcccttgtacgcgaacctctccgcgatctccatggctgcacgcaccaacacaaacacaagatcatcatcgacacattcatccaatcgctcaaatcactaaaaaacaaggaagatttaagcatacccatgacgaacaccgacgacttccagccgccggtggcggcgcgggaggccggccggccacggtaatcgacggctccggcgacggtgtccgccatgccggagtccaagaggtgagacaccagcttgctccggtgatcggccatggtacagcttgttagggctttatacgaaaccgaaatcgacacgcggctgcttaggcagatgtaatccccctttcttaactctgaaattactgctaatcaccttccctaaaaccccctctactcttcccaaatttacccgatcttgcaatcctagttgaaaattatcgtacaaaaccccctcgaattaggacgctcttgctaatcaacccctgtcttacgctaatgcagcggggcacgtgtcacgcacgcgtggcccgtgtcgcggcgtgtacggacgagagtcgccacgtgcggagcacggttccctatcgtgcatttaggacaggcttctggtgatgcgggccggtggatcatggatggacggctgagatttcacggcttcgaagaggataggttcttcccgcgaatcaataccgacggcgactaggcgattactagtatagagatgagatgagccgttattgctgctttgatctttgaacttttggaaaagcaacggacaggaaactgttgccaaccagaccacgaaacaagctgtcctggatacgtttttcagcagcaccgcatcgtaaattttgcggtgttgaaagaaaatgtttatttacctattttctaaccatacgatttcaatacaactaaaattattttatgtatgccattatataagcatgagatgtatttttataccgtgtttgcaactttgcatatggatcaaaatgctcccgctaactctttctccccacctcattgacatgtgggcccacgcatcatcccccttcctatgttcctcatcccactcatctcctagtcgttctcgtgacattatcgccctctttggaagacactaatgacgagttcccggtggggagttggaggtcatgctctggtgacttagatactcggaaccctttgacaactcgagaatgagcaacatgactgggaggaggcagcggagaggagcagcagtagcacttgtggaccatttgacaacaagggtgcgagtgatggctcgttgatgatgccaacgggtcgagctgggcgagggtgtggttgtccggcgctggtgcaggatcacgttgataagctccacgttagatccagtgcctcctcatccacgatgcttgcgaagat

SEQ ID NO: 18190 - DNA, 2500 bp, Oryza sativa
aattttatgttccccttcaccaggaacattggcatcagaaagaataaccttcaaaagaatttaaccagaacacacatgactttttcatacttgcctttccaatcaatgtaaaccttagagtttgtgaagttaacatatggaacatactgacagaatgtaatgccaaaacaaaactgataggcttaaaaccatgcttactttaacttgtttccatccaggatcataattcaacctgagatggatgtagtactgcaaagcaatcgataaaacagccataaactctgttcctggagtaataacgttagaatcacatgtttgagattgctgttttggtggaagttttctgccttccctctcaaactcttcacgcaacctctcttcttctgcggcctggagatagaaaaataataagccataaatgcaattctaccccttgaagccgtcgatgaatgggaatttaaatgtcgacatattatcatacactgcataaaggaagataatttcactagaatactgaccgcatcagcagcatcttttgcagctctgaatcgtctagagcgttgctggttcatcttggcacgaggagcaacaccatctgtaaaaccattgtaagataatacaaaatatcaacaagaaaccatcgacaagaacaaaacatatgtggtaaaaaacaggaccctggacagcaaaagtttacaagcacaggtactatgctgccaaataaatagtttacgggtgaggattatgcctgattcaaaactcatgtaaatgactcgtcatagtatatagctaacttcaacaaaggcattagttggcagtatggcaagctgttctatgatgatgaccaacaggtaaaagagcaatgacactaaacactcctaatcctttaggaaggaaaaaggtagtaagagaattcctacacatcagatgttatacgtaccaatggccatatacataagcttccgagggcgaaccatgacaaatagcctatcgatataatcaaacatgcactggaaaacctcagcgaatgttgtcggagagggctgtaaaagataacacaatagcaagaaatcatggtcagcagagaaatcagaaagcacttgagcaatcagtaaacattaaaatatttgttcgaagagaaatgcagggcaatgacagagtagcatcatgcagtctaaactggtgcgtccaccgaatgaaaataaacataactcaaaaaggcaaattaacaaatttgcgatgcagagtttgaagattaaactacagcagcatcctcatcctaagatggctcatgtggcaatttagcagtttgtggttatttgcaaaattatgtttaacgctcaggtaaattacaaaacaggaagctacaaaatcatttcaccaaactatctcctctgccacagctccgtcgtacatcaatcaggcatacacaaatccatcacctgtacagcggagggacaccatacgaacacccaaacaaaccccagagctacgcaaacagaaacgcccaaaaaaaaaacatcgacgtaccctatcctcggggtggaagcaggggtgaatgatcccgttcatgtcgaggtagaggttgtcgaactcgaggccgttggggttgggcttggaggtgtcgacgggcaccttgacgccctcgatctccaccgcctcctcctccaccacgtccaccaccaccatcgggtacttctccgccagccaccggtagaacgccggcacacccatctcctcctcctccgccgccggaaccctaaccctaaccctagaaagcgagccgccgccgccgccgccgcgaggagccgggccgacggccgaggggaagggagagagggaagagggcgcgaaaccctaacgaagggggtaggccacgcgggcggggaggggaggggggtatatgccttttccggtctgaaaatatcttgttcgaggacgaagatagggagagagagagagagagagagaggcggttttgcggtttcgaccctggtaaactggggtaatttttggggggtgaaaaagagttttgttttttttttgtttttttatatgtacagagacgatttgatttgtccgacgcgtcaaggtgttgactacgacgaggctacgaatagtggtcgggcgggctggctcgggccggtcgcaggctaagattagtaaaattttgggccgagtattagttaggcccaagcccagtgctttgctttgtgggcttagtgaacttgtcagctgatgatgatgatgagatgttcgttacaaggaaaaagtgtttcttgttgatttggtactctcttttttttggtaaacttcaaacacttgatgacctgacccgactctaggaaagaatggctctttggaacacatgaattcttcaaaattcatgtaaaatccttccattgaaaaggaggcctgactataatgcgatgccaaatgctaaccatctgcctgaatattaatgaatgaactgtgaggactgaggacgggctgcaggaat

SEQ ID NO: 18191 - DNA, 800 bp, Oryza sativa
catgtagtttcctgtgtaaatgtttcaagtgcaaacgttttcaatcatcctgaattcctgatgctatctgctgcaccaaattacaaaacaaacgagcaaaattgtttgctataagagaatttagcagggccggaaaagaaaacaaaaaaatgtaggaacatccatcgatgtgccaactgttgagacttcgttgcaatcgggcacagatgcaggagaccaggaacaatagtctcccccatgttcctccaggcgaaaaggatggctatggtgtatacacaatgcttaatatcaccattttgacgtcttgagttggtcatggtcagttcttctggcagcgttgtaggtcttcgatcgccttcttccattgccaggcgcgctgttttgcatcctcaaacgatgacaccttctttggctgtaaacgaactgcgttagtcatcatcataggagcaaggataataccaagggatggtaacaacaaagaagaataccgtgcatatcctgaaatgcgaagagtttgatacttgcacattgagttcacttgggtcatcagaccacatgatgttccctttagtcaccatttttccaggatctacacagatcagctgtggtttgtcggtgaggatcaactgaaccttcttgttcgttagcttgtttatcttcttcagttttgatattagaacgacagattcgccaggctccaggaagtcctgcctgtcacattgttaaaagcaatatgcaccaacatgaatcacctcttgtggaaaaatttgagcatgatgccggtcatttcccctctttta

SEQ ID NO: 18192 - DNA, 671 bp, Oryza sativa
  unsure (1)..(671): unsure at all n locations
attcctgcagccctactcccggagggtccatatattcaagaactgcaatgtcacacaaggagcaattaaaataaaacaaggtcctcagcaaattcataaagtgtacttattagaccacaaattgcaacaaaggaaagagacaatattacctggtaaggtttctttggaacaatagcttcacctttttcatcaaactccccagcttttctcttaacctttccttcacagtttgctgctagatgtccaacctgaccacacaagaagcatttgtcctgctgtccaggtgtataaactacctgcaagaaaccaaaatatagtcagaagagagagaaaacaaataacataaacaagaaagcataaggaactaatccgctcttttagttagcataacatggtaaaatgtatttacacaaaaaggcattgattctaggtcctgaggagagctaacctctctcagtatagagaaatgtanccttcgtgtgtgttgcaagaaaagcttaaaccattggaatacaggtctgcatcctgcattcaagagtatatataaaaaaatgcattagcaggaccaacagaagaaacattgcccaattaaaatatataaaaaataggtttatagaacataccaggccatacaaacaatggcgagtatttgggttaaatccagggagatt

SEQ ID NO: 18193 - DNA, 772 bp, Oryza sativa
gctgctacttctcgtgtctcttctgtaccaatggttcagtctccagtctcctcaaaatctggggagatatcaagcagttcaatgagtgcccagtttggcgctgctgtgacatctgctgtaatgggatcacagaaagacaagttccctgcaaattccaatcctgcagtagtgggctatccccctgttgcttctagccctagtgattcaatgcaccggatgcagcagccttcagttgctccttcaaagagaaaatcaaattctgttcccaaaactcaaccgcctgtgagtggtgtagggtctccagccagtgtttcaaacatgcatgctgtactgaatgctagcagcccatcaattgggactgcacctatgggtgatcaagcaatccttgagagatttgtcaaaattgatgccatatctcaaaggtataaaataaagatttacagcatctgttaacacaagttattggttattgttgaccttttcttttgttttcggtgttttatgtagaagtgtgcagtctatttactattgcatagagcagttcatagctgaaacagaaactcgattaatgattatacaagatctaaaatccttttatgtccttgccgttgaattgttataatttcttttggttatagcatcattttacattgcagctaaagttcatgattgtcatgtttttctcaggtgcaagctgcacagcaagaagaacaaagttgacaatatacctcagagaaaaccgattatcaatgcaagccaagagaaagttgct

SEQ ID NO: 18194 - DNA, 58228 bp, Oryza sativa
gattcagcagcagcaacagcagccgccgcagctgcagcaaaatgcacaagcacaactgcagcaaccagcatctcttcctctcaaccagatgcagagacctcaacttctaccaacgaacccattatctcagatgctggggaatactggctccaatcttccgatggcctcaagccacatgggtaacaaggtcgctctaattctgtgcagcttcagatgatgcagcagcagcaacagtcgaggaaaatgatgatgggcctcggctcgcctgccaacatgggtaatatggttaacaatgttgttggcctcaacaatattggaaatgttatgggaatgggcaatgtgcggccaatgtcgtccccaatgggaaacatgtcaggcttagggaacaaccccaatcagatgagccttggaatggtatccagtctctctgcacctgggattcgtccaggtatgacacatgctgctattgccaagatgcgaatggggttgatacagcagcaaagagcagcaggcatttacccccagactagcatggtcggaatgcctgggagcagttctccgattcttcctggttctgccaatttgtccatgatgaatcagctaaacagaagcaacattaaccctttgcagcgggccatgatgggtccaccaaagatgccaggcagtaattacccgttgactccgcaacagcaaatgcaactccagcaacagttccaacagaacccgctgcagcagcagcaactgcagcaactccaacaacagcagcagcaacaacaacaacagcaaatccagcagcagcagcagcagcaacagcaacagcagcagcagcagcagcaaattcagcagcagcaacaacaaatgggctctccgttacagcaggcggcacaggtgggctcacctgctggttcgcagcagtcattggtgatgtcgcagcatcagcaaataagcccacagcaaatggccgcgatgagtccacagctgagctcaggcaccatgcagcaagtgaataacaatgttatcaaccacgtagccacaccaggccctcctcctagcccgcagctcagctcacagacccatgggtcggtcaacagcatcgcaaactccccaatggagcagttgcaaggtgccaataaaggaggtccagggagcatgtagtgacggcaaataattgtttctgtgatggacatacaaaataatgcaaggtataaatatcggcagtgatcagcactttttcttatttgttgtggtaaatgatgttaaagttaggtgtcctgtaagttatagccaatagatgaagatattatggaggatcagccttacgcagggatttctgatgttgtagattttagataatgaaattagtacctttaggggattggtactgatgaaagttttgttcaatgggactactttcttgtttaaattaattatcaagtttgtgtaatagctatgtaaccgtggtgcttattaataagtatcttcatttgattgtggaaattttgccctgcttttcttgtaataatctggtataacactgcgattttgttgagctgtctacatattctgtattggtattaccacagtttttggtggaagaatagacggcttgttcatagcagttcatgtgatgccatagaagtatgtgtaatgtcatagaagtgtgctgtgctgttcatgcaacatagaatgcccaaaaatgacagtgtatcaattatttcccaggtgatgttggaagcctgaattatgacatttgagtgtgaacattaatgctatttcttctacatattacattcatgcttttacaattattgtgcatgtatgcattagacaagatgtaatccataaatccaaaagtattgggattcacaaagcagcttcatttggaacttggaagaagatattgcgttccggaatagtgaagccttggtcagcacacccggagaaaatttaatggagtcaaaataagtggattacatatgaagcaattcatagtgcataactcttctagctaaatttaccccttctttttcatgatttgatcgtataaataaaatacagtccaagacatactcacatggagtttttggagcagggcattatcacttatatactttcatgagatttcttattctactataagtgaatgaagcgattacttaaaattaaatactattggaggactgcaggagcttattctagataaaattcatgattgtttaattcatctataatggtaactgcagcttgtctttgctgataacgatctgtgatgccataagaaagcaggcagattggcaaatacgcacacatcaggttctagagctttatcacatttcagttctttatgaaataaaagttcatttttgcaaacgatttccattttcaaacgagcgtcccattcgatttccatggaatcaaaatcatatatacggaccagatgctcatagttgattaagaaaataactcctataaggagagaggaaacatattcccaagacctttgatgaattcaatcattgttgcgtctgaccactctgatttccaattcccaataatgggatgtatgacaactttgcatgaaagagccgagttaggatcaccatgttgagcaaaatgtatccattttaaaaacaaaatagcacaaatcaataagataggccatctcactaaggaaccaaacttgcatgttcaaagctcttacttgagggaagggacgaagggtatcccttcaacatatgtctaagatgattctaaataggtgatggactttcacttgaaagggcaatcttggctgtttaccctgtccttacttattgggttgtcaatcttacgacttggtccgaacaatcttcataagcactacaagtttcattttcaaaaagaaaagaatcagaggattctaacatataagagctcttcttttcatgtttagttagaacaagagaattgtcataaaaatcaggtaagttgcagcaagttttgctaggaaaattcatcaatctaatgcagttaaccaaagctctatcctctacgtagctattaaaatttagacaacataattagtaggacggttcaaagtgtcatgtcaatatatatatataactgttctatcacattggtttgtctgaattttagacaactccatgtcaaaatacagcttgcttgcaattgtatgcttagaataagggcaactctgcagcaaagggctgtgcctttcatgatatttggaatgttttcccttaagctagttgaagaggttcagttctcaactccatgtcaaaatacagcttgcttgcaattgtatgcttagaataagggcagctctgcttccgttctcattttcctggtaaacattttcaatcctctaccatcccatacaagggtcaaatactctaaagctcctgcttttggtaaaatagaactcacaataacacttcataatgaatatgccgagcaaatttatttttggagtacataaagacacaaggtagacagtagcaaatataaaaaaagtgctatatcctatagctttttatatcggcagatcaccacaggtacacggaaaactccattttattgtaagtccaggtctactacacatgtaaatgatgtttggaagctgtatgcaaacaaacctagtaattatcagacaaaatgtccaaaggccagcaaataccatcagaaggagcaccatgacagcatttggcaagccacctaggaaatgatgagtgtcagtactacgattggttctatatagaaggacaaactcaatcttggtcgaatgctcaaaatgacagatgacgtaccttcaaagttatatcattctgtaggccgacaccattattatgttacatctggaagaatggatgaacaacaagattttctttgagcctatgcaagcaattcattggcagctgaccatcaaactggaaagaagccaacacattgcccttcctatcacagtgtaaaatccgattcgagcatctgaccagcacatccccctccacagaaacaaccatcgcagaccagccaagatgctcaagattacactccgggaactgcctaatctgcgccatcggcaattcgatgcggtgcttgcatgcccaagtgctcctctcatagtcctgcagcacccaaagatcgatcctcgtcgtacattcaaccgcggagaagacaagggtgctatccatctccaacaaagacacccaaccaggtatcgccgggtggcgcatccactggaatgactcgctcgctgtatcgaacaccattatcttgcagcctccatctctgtgcctcagataccagtgcaggttgccgcgcaccagcacggaccgatcgccacgggcatgcatcagaaattcccttgccaatggctgctccacagtctctgatcccattgtcattgtgatgcaccttggttcatcggagcccaatgtgaggatgtggtagacacactcttcttctccatggaattcaccatacagcacccggtactcaccggaggggttgtgcgggtaaagccccaagaaatcggcatcgacgagctgcgggatttcggcccagtgattggtggccgggttgcagatgtagaagcggccggaggagaggagcaggaggccgtcgcaggaggcgatgacggtgtagccgagtggcggccaggtgtggtcgacgacggggcggagctgcgcggcatggaggtcgatggcgccgacgcggtcgctgccgccgcggcggaagtagatgagggggaggtcccgctggcggtggtggtgggcgcggaggaaggccgggtcggaggtgaggcggcgccaggcggtgcacacggcgcggcagcggaggacggacctcgccgggaggcgcacgaggatctcgcacaggaccatctcgtcgtcgaggccgccggtgaatccccgcggcgtcctcctcacgtcctcctccaccgactcagccggcgcggagtcgaccctctcctcgcccgcctccgccacccgcgacgcccgcgcgagcaatccgtcgaacaccttgaacctcctctccacctccatcactatctccgcctccttcctccgccgcagcaagccgatcgccggaagaacggcgttcgcccgcgcctccctcagcaagtcgaggagctccccggatacgccgccctccgccgccgcggcctccgcccgggcgaggcgcgcggcggcgccctcggcctccgcctctgaggccagcaccgccgccgccgccgcctccacctcctcggcgctcggcctccgcggcagctcccggtacagcctcgtcagctcctccaccgccgccgccgccggcgagctccccatcgccgcggaacggagggagtgaagtataataaataaataaataaatttataaaatagtcgatgcgaagtagaaatggtaaacgttggagactgataaagtgataattaataatcagatgagatcccgtctttttcagccgtccgatctgggatcaacggtcgagattggtgtttcacatgaaaacatcgaattcgcctcatcatcttatattttctatttgatcaagattgacaattcgtgatctaatagttgatatgaaatattttaagtttttttatgtgagcttttccttcacggctgcctaagtgcagattaacatgtacacatgggattatgagatggttaaaagcagtggcggatttaggatatttctgtggggttagctgatcccacagctttttaaaaaacaccctataaaccttaatttttatgtataaattcaaaaaaattagagaaatgaccccacttaaatataaaccactagtaattgatcccacaggtattaaatcctggctccgccactggttaaaaggttgatttctgaagaaacgaaccattctagaaaattgagacctaagtcgatgaagacagccaaaagtttcccttaacaaacacagcgtttattaaaaaggttgttctcgttccaaatactgcactgcataaaagtgttcgatctcagaatccattcataaaccatggccaagaaagcaagaaaccttgcctggtattcatgcttcggtatgcaaatttgcaaatcatcacatgattgtgcaaataaatcagctggatagcttatacaagagcgtgagaaaccaaaaaaacgtgtagctttctgaagctttacttgctacctcaggttgactcgcttgtccaaccagattactcacccaaaagacatagtttttcccctctcaattgtcaagcatcgcatcaaagtattgcacttaagtttactacctcaaatcatgcataaatttgcagttttccccatacgggcaccatccctgttgttgataaatgaagcatggcttccatggtcgaaacctctggggattctggttatgattctgcctgtcatggtactggtttccgttcattccctggcgaccatggtaattctgatgatggttctgttggtgatgatactgatcttgagacatttgcctgtgaccataataattctgatgatggttctgttggtgatgataactctggtcctcccaatggtaatcctggtttcttgacctgagaggttgatgcgtttcgcgatcgacacgagcctggtgatgaccagagccattggaaccatgttggtatgtctttgccttctgagtgaaaggctggaaggctggtttatcatggtctgtagagccccaattgttactctgacgatccatgaagcctgttcttgaagtacttgtcccgccctgctgccaaaacgcttcattcctgtattgatgattaggaggttgctgctgtgtgtaagagactgcttgctgtggagtaggagtaggagtaggtcttgaagatatctcctgccgcctcatgttctctgatcctccatgttgtctggatggaggagcctggtgattggtaaaatcttgtctggcagctgatgtttgggatactgcagccctttgctcttgcgaaggaggaacccgcggaagcgcttgattgtggtgttgatgtttgggatactgctgtgggtatgcagaactttgctgtataggagcaggcttgattgattttggcggctgctgctgctgctgctgctgtgttgtttccacttttacggcatgttggagggaaggagcctgatggttaatgagctgcgttgtgctagttcttgatgttcccttttggagaagcacttcgttgtgttgttgaggatgagggaactgtggcaggtaatggagcaattgctctgtgggagtttgctttgatgataaatgttgctgacttgagttcccagattcaccatgttggagtgaaggaattatcttctcagctctagtacatgaaagacacgcattagagaaatgacagcataattttagatgtaaaataacagagaattccctgcatgcattttctttcctatgtaaatctcatatttagatggcaatgcacaacagtaatcctgacaaaaaatatactacaatgaagcaaaatcacactttttctaacatgagaaagtgatagcattcagaagtaccttttctgaacagtattcgtagtcaccgtatgttgcggaaaaaccgcttgagatgattttttattcatgttgtcctgtcctttgctcttgttttccttgttcctattaatcataacaacattttgagaagtcaaaagttttcttttacaatgatatgaactctgatcacaaatttaagatgtagtagataattaaataatgctactgacgagaggaaaaaatcatagcatgtgctaccattctgatttagttaagtttcagagaaagtgctgtagaaaattaggacacatggctgggatctccaaaaaaaagcagttagatttcttgatcagtcatatgtttgatatatcctagcaccatgaccaacacattgtaactagaaatctagaatcagctcaaactttctaattagtctactgtctacttgcatcttcccaatcagaatctatttccaatgtttaaacaatggactggatgtaaacttcataagcaggatgagatgatctcaaagtagcaaattttcatgctggttctgaacagaatattttctctcttttggcccttaaatgatatgacctgttaccatagttttttgaacagaagaattcattgagatgcatacacaccatgacaaaggtttatattataatcatcactaacgcatgtcacagttaataggcttacctatttaatctcctcatccgttcattctctttgtccttaatcctgacttcccttgtcttacgtgccacataccctcttgcatgtttttcttggagggctctgtttctttcctcttcatcaagccatggctgtgagtgtaacagaaattagcttcaataattaagtcctgctttccctaagacaaaatgaacctttaagaacacacctgtctcatggtcttatccttgtagagatttctaccctttatgaggagtggatggaggggaggccatggtttgtaccccctactccataaaatctcaatctgcatttgcatatttctctgttggttttaagcggtctatgatgattattgtagcttaaggcaaaaacttatgctggtaaaaagaagtaagaatttacagtgaacgtgtgctgttgcttcttagtgccatagctttctttgattattcgacctgcatttgtcctttgaccacataaatgacccttgacaccacgaggagctccttttttcctgcagtgataatcaacagccaaagtaaaaaggacattatatataaatattgtgattggagaatcatgcccatcacttcagtaaattaacactctgcctaatatccattaccttttgtaaatattttgctcaaagaccacaacatcacctttgcatgaatcacctatgatatttaaggggtgcataagaaggcaaaaagttagagcttaaacagtccaaactgtagaaagaaaaaaaaggtattgcaaatgaaaatgccattaaattatgtattcgagaactacaactctaccagaagaccagaactatacttcaacgtgggcggtgttatttcagacaaccttaagtgcatgaactacggactatccattaactgaaacaagtttagaaagctttctaattttcttgtcattcatatcactgtgaaactatagcatgaatgttagactgatcaccttgacagttcaaaacaaaacttgacactggatacttcacctctcccatagttttcaccctggttttgaagcacaagaaagtggtcaaacaaaagcagttcatttgcattacaaaatatcaacaaagttgacaagtaacatataaagaagaaggacagattacataaaggatatagttcatactcaatttgtcctctgatgcgagttaggagcacttccttgttgcctgacaatcttagcttgtgcatcctcaaatatgctttgcattcataaacctttagtttctccaactggccatctgtgaattgcaatagcacatcactcatatgatcaacaataagaatatgtgatgaccagtaacaacatggaaatttactatttcgataatgtaccccatgaaactgtagcaatgctaagatacagtttctgcaaacaatttgtctgcttcggcttaaaattacattaagaaatgaaggtttacctgaaagagctaaaacatgacgattctaaaattgtactactgatcaaatttctttggaagtagtagaaagaatgaaaccagtcgtgcacaacatacattgtatcacattacccagttatctcaaattgcgttacaaaacaaaacattttttttttacttttgctaagtcgttttttttcctctcatgtcacactcttcacaagatcacactagcaggcaaaatttcaggccctcccggttaccagtttgcatcacattgttggagatatcacagtcacacaatggcaatcgaagaaagaactgaccatgcatcagcttgtccaccatggctagaagatccatctcctccttccccatcttcggcatccgcgatcctttcctgaaaattgcgaaactcgtacaaaaaccaaaacctaaatcaacccctttcgggaaaaaaaaaagcgagattcacggaggcgaagaaccaacccaaattcgcaaaccaaatcccgattcccaatttgtgatcgcagaaattggacaaagccccccaagatcattcatcagtgtggaaggggggggaagagaggggaggtgggcgcccgaaccgaacctgtccttgcgcgcggaggagagtgacatccgggccatcctggaccgcagcacggcgtccacctcgaggtcaccgtcggcggcggggtcgaaggtggggtcgtcgtaggagcccgcgtcggggtcgcagatgccggcgaggctcgcggcctcggggtcgtcctcctccgaccagtcatatccttccccctcctcctcctcctcgtcgtcgctctccacctcctcctccgatccctcctcctcctccccgtcgtcctcctcacggggcagggcggcgcggtggtcgtcgtcgtcggcggcgggggcggccatggatggcgtggcgggttcgggggttcctcctcgggtcgtcgaccgttggtcgcgggattcttgggattggtttgaagttttgaaaatttggtagatttttggcgtgttgcgtggttggggatttttataggcgtcagtctgctctttgctgggtcagctgagaagcgagccaagcagggctgcagtggcagctgcccagcactacaaacaattttttagaggtgatttcaccatggatggattacatatattttttagaggtgatttcaccagtcaaagattttcatttacaaccatatatctttaccaaccgtcccataaaaaataaatctagtattgaatatgacatatcctagtataacgaatctagacatatgtcatatacagtcctagatttattttttttagacggagggatagtatcatatgctagacaaatgacccgtcttcataggagagagaatatgccatggtcctttgttagagtaacagcaagatgattcgggtagatttaaggagaggagttgcagtggttattttactataagaagggcacgctataacacatccatcaattcacagcattgtgagcaacttttagcaaagtacattaacaaaacaagaaggatttgttcagttaatcatgagaagagatctgataggattggttgcaatttcacctctaaccccgcccctcaatctatttggtggagatacgaaccgaataagacctaagaggtaattaaccctcttctcctcctaaactagcatgcatgaccttgctagagccacaactcatgctatcattttggttgcacggaagcaggcgacgagagtgagctactccctccgcttctataataattgatggattaaggtcaaactttcataactttaactatcaataactttaaaaatatttagtttaaaggaactataacaacatatatatatatttgtctttcaaaacactataataaaattaaacatacatttatttattgtatatattataatagaaaaataaggtcaaagatatattttgtagaccgtgtcattatccaaaacgtcaattaaaataaaaccagagggagttgagaggagggctcagtctgcatgctgctacttgttttccctcattgtttagggagcgctgcaaggagatcaagactgagtaggcgatgttgtgctcgagaagatcaccgatgaggggaaggctgaccatccggttggccagtctattggagggcaaatttgagccaaaattgctataatttaacggaaaatgcaacacatacgattttttttgtatgatcttgttacgataaaacacaacggcatggacggcaggggaacctaacgtgagcgcacggcgcacgcggcagtctaagcgtaattatggaccctaaaggccagttcacctctaaatctgactttacgttcactactccaaactctaaacctgacttcatgttttgatctaatctgcaagtgtgaaactaatccaatagcatacgccatcgacaacgaaggtatgccatcttatttacttgatttcctttagcttcacaatcatctttttttacattattctccctctttttttttgttcctgggcaatgttcatagccatgaaatgctttctttattattatggatttaatctaaaattttcctttgcaaaacatatgccattatttttaatttaatatgaaactagggttgacactatcactgtccaaggtgcaaggaacatatttgtacgtgtaatttgcttaaccctgccacataataaattcaatattgagtgctacaattactatacaataagatattaggaagaatattgcttaagatatgattgaaaagaaaattgctttggttggctatccaagcaagccaatgagatagcaggccaagacgtcgggagcttgggcttggatataggatcaactgacggagaatttttttcatttttaaatttttatttttttaatattttgtaccggcgaaaatatttatagaagtagaccctgccgcttttggaaagggcggcagggtgacgtgagggacaggcaagataaaaaagaaactagaaaaatgcatttttggtggggcaataattgcatttgcccccttgcagcccttgtagagggcggcaagggatctcagtgcaaaatgcgcacaccttgtcgccctccacttgggcggcagaggccatttctataaatattttggatggcatcatatttctgtaaatattaaaaaattaaaatttaaaaatgaaaaaaattcaacagacggatccgtttgatcgtacaaccattgtaaaaaataattcgtatgtatagcagcgctgtaatttaacttggagagtggaataagtaggttgttggagatactcttagcctgtgttcttttctatgggttgggaacccatctccggcacacggaaaacagagcggtccattagcacgtgattaattaagtactccctccgtcccagaatataagcatttttagagttggacacgattattaagaaagtaggtagaagtgaatgatggagggttgtgattggttaagtagtggtggtaggtgtgaaaagtgaatggtggagagttgtgattggttgggaagagaatgttggtggagaaattgttatatttgggataaatcttgagggctaaaagttgttatattttaggacggagagagtattagctttttttaaaaaaaaaatggatcaatatgacttttttaaacaactttcgtataaaaactttttacaaaaaacatacagtttcgcagtttaaaaagcgtgcgcgcggaacacgagggagatgggttgggagcactgaagcaaagacacacagaagttcctactaaagagaattgaggctagtggtgtattgtcgtggggcgcaaattatacttttgattctcttctctgcttcaacggcgttatactagtaaaatctagagcccattagcgtgctaggagcgggagggatctccatacctgacgacggcgcatatatagacgcaattgccttatattagccaggtgaactagaattataaaattatattcactcaattttgcttaggattcactaggggaaaaaaattctctcattccaaacagaatctatatgcatgcgcgcgcgctctctctctctcttccttctttttgtttttggtagagagcatcaggcatagtaacgttcttccatgccttggacacattcttatttgacatgaatctcagtttctctgtctctcgcccaactcgcaacttctcttgcagtaaagctaatctgtacaaagatttaaaggctaacattgtagcgagctgtgtcgtgccaacccacgtgccgaatccacggcctagaaggtgtgatgtctcgtgctagcaatgaaaagggctatgaaaaaaatctaaatatagcaaaactgctagaggagtcgtgtccgtccaagcccacaaggccacaacaagctttggcgtcggccaaggcacagcccagaacatcacgttcccatgcagtgacggaataagttcactttagagggaagaggatagaaggaagaggggagtagtgaggatgacatgtggggccccactatttttttattatttgagtgtgtaactgacatgtgggttctacaagttttattatttttttcgaatcgaattaccgcgtaagcgccacgtcaatatcacatgggatgaaaacctagtcaaagaagtgccatgtaggcgccacgtcagccaaaaccatgggcaatactgccgaggaacctcgtttgcatggttttgtaagttggggatgcgttgtattctgttttgtggtgcagggacgaatttcgaactcagtgacaaattgaaggacctaaagtgaacttattccttatgttatcccacagcaaagccctgctgccgaaacctgtttgcatatgcccgacaccaacttgaaggggctaaggttagggccagcagagacaggacaggaggcccaaccacctacgttgccccagtgaacttgtgtgtgttcatggccagccgtaggctgagaagtgggggtatcaaagctaaaaaaaagctagtgaacgctcgcgtgcacaaacgtgccatttttttaaggtagtgtttttttttctaatgacgatgaagataagttttatagcacgcaaaagaaagaaagctagcgcatgattaattaagctctaattattaaaattttaaaaatagatttatttgatattctaaagcaagttcttgtatagaatgttttcgtatgaaacacatcgtttagcattttgaaaaacgtgctaataaaaattgaggtaaaatattaatcgtagtaaaacaccacctgctgggcgcccttgtccaccacggccaccggaccgccacccttattctgcccagccgatgccgacaacccgcatccgccaaattgatcgtcatcctatcgtgtcagtccaatcgccgtcctcccatgtctgtccaaccgttatccttccgtgttcgtccaaccgtcaatctcatagctaaaaatacttatattttggaacggaggtagtacttcatagtaattgtgaagtttatacagcgaaaacatcaaattaaagtttgtacaacaaaaatgtatgtatacaccgttccatttatacataaaggttatgcatagaaaattttgtttaaatgcgaacacgtgtttgacgcggctcgacggaaaacaaacgttcgcccaatagcctcacccgaactaaacacattgcactctatatagcactctgtatacggattcaaccagaacatacaattaaatgcattgggttttgactagtacctctccagtggttttgtcaaaaagttatgataaccaaagtgggtattgacgtggatccatagaatccatatgtacaacatttgaaaagtctaatttttgtaaagcttttaattttagcctatccgattaaggccgacaatcatatcaagccgttcccgtcatatatattttcaaaatcatactgatctatagaacgtacctccagcttgctagcatcccaatggcacgagagagagaaggtatgtgctagctagccgggccgacgcccgattaagggttcttttattttgtgttagtatctattagtttgtgttttttttacattattatatgccagtgtgtgctgagtttgtttacgtgtggattttataataattggttgtaactcgttgagcaaacgccaaaatattatttattatctaaaaaaaatctctactccaattcaaattgattcacaagaaaaaaacctgatctctccgggagataatattccataacaaaagaaacccgggacggagcaaagcaacgggcaacggcacgcatgtttccgctggggttgtttcgcttggacggacgaccgatcgacagtccaagcacgtcacgttgtgggagagcacacaaaaagcgaggctgctagctagctaaacccgcacacccacaggcagcggcagctcatgctgaacccaaatcaaacacacgccaaaattccttttcgccacgaaaacgttatcgcaaataatccaagtggaaggtatatatccatgcatgttgctggttttttccccgaagtttctttatttctagacaaaattacataaaccaccctaattatgtatcctttttcttttgagattttaatccataattaacttattttgttcaaaaaaacctatccacccaaatattgtcggtccgaaattaccccctctgcagaattcaaccaatttctttcggtatggatttgcaacggagcatatcagctaggtcggatgacagttttgtttgctgtgagctagaagcaatactccattattctttggctgagaacgaccatgagtccgactaatcatatagtcatactggacaagttttggctgatatggccaggcacagaatcaagtaaaaaaagaaaaccaaatcaactactcatgtgtacaaacaggggggaagaagtggagaacttcttggttgagtgggtttttacaataaaattgattatgaaagtgggatctcaaaacaaatatgataaatgaggtgattctgtaattctgtcttatttttctaactggtcatcatgacggtgcaatgtgaaccgctctttttatctttttccgcgttttttcttcatatgaacacagaacggcatgatgatagctactaccgtttttgtcgatacgtctgaggaaggaaagagatcaggcgcgatcgaccagagggaaaaaggagtgtggccacatatgagctgcaactgctagccggcaacgagccaggcagcgtacgatcgcttgggatatcgccgtgaacgcaaacccgatcgggggcacacggcgcgtgcagtgtatatcgctcgaaaagtcgaagcagggcgagcaggtcggcgtggcggccaaaagcggacgcgatatgctctcgtccttagctggaggccttcgttgcttaattcgccaaaattcccaaccgaaatgtcggtctcaataaggatctggggaatcaaagaggccggagagaggcgtgtcgtgttgtgcgaggagatcaggatggcagggtttacacattttcgaaacgaagctcggagagaaaagaattagtatattctattttgagcataacaaaagtttatgaattcgaatccagcttaaaacacttgacaatttaattttgtcctaaaccaaccaatcctgactttaaccatcaatgtttttttaaaatctatgtagtttaacatgccaattttatgttacgaaagtatctctcactatgcatctcacaacaaaagttttctaatgttaaactatataaaattttatggataaagaaagctgttcgatttgttttaaaaaaatctaaaacagatcgaatacaattaactgtcccaaatttcaaaacttgcatcaacattcggatggaaatcttatatttttttttcgattacatggtagacgcacatgcatacacaccactgcacacgcaacaccatattcatacctccataaatacgatccctagaaaatatgctctaaaacggaaatcaatggtacatcctagtcccctaaaacctctttgcattttaaaattacgaggccctggttgtaggtccacttcatcatggaccaacatctcgaggcagcttgattaataagctatcacagcctccttggaccacttctggctaattaattttgttattttccatgttttgtgtcacatgtaactatggggtctatggaaggaagagttgaaatggctctagccatagtctttttgttattgacttcttgtgctttaggagtactattatagtaacatggtactactactagtagaattcattcacgtgcttaaaagcggatacgaggttgcagttcattattggtcaaaactcaaaaagttcatggtaatatagatattttaattctttaagtactctgttccaacttggaagatggattggtcactgtcttctttcaaatctgaaagagaagttacccaacagccggtcggatgcacatgcgcatcgatacaattcaagaaacagattggactactccatgttctcctttacaggaatgtttgattattccaaattactactccctccgtccaaaaaaaaaaaaactcaatttctgggtttctgtgtctaacgtttgactgtttgtcttatttgaaaaaaatatgaaaaaatttaaaaaggtaagccatgcataaagtattattcatgttttatcatccaacaataatgaaaatactattcataaaaaaaatcatataagacggacggtcaaacattggatacgaaaaccgaataattcggtctttttgatagagggagtacatgccaagatgatcaccggtccttcgtaatatcatccacccaccatgaaaaagagaccaaatttaacatagagatgtttgaattccatcatcgttctttcagtatttttttttctgtacatttcaactctttccaatgaaattatatgatccctagcatatgtactactactaaaactactactactacttgtgacagataggaataatcgtgcactgtacaaatgctgcaagcataagcatcctcacggcctcgttaattatgggattaaagctgacgtgtactgatcagagcgcgagcgcgaggtggtcgccgcgcgccgccgccgcggcgtcgtggcgccggtacggctggccgcgggcggcgagcctgcccttcctcttctccatgaaccgctgcagcgacgccttcctcgccaccggcaggtccgccgactcgccggcggcggcggcagtgctggcgagatcgtcgcggggcacgcccctggacgaggcggcgagccgcagcagcgccgccgccctgtccgcggggcactcgtcgagcaccagcacccgcccgccgtagaagatggtcatctgcgccgccgccgacgatgccgcggcgccgcctccttcctcctcccgctcgtctccggcgacgtcggcccccggcatgagcgggagtggccgcaccgccgccgccgccgccgccgtccgcgccctgtggacgttatccgccgccctcacgtactggctcagcgcgccgcacgccgccgcgaacctgctcgtcgccgccgcctccgccgccatcaccggtgatcgatcgatcgatcgatcaaaatcaaccagccgctgcttgctctcgatggggtcgtcgaggtgttcggagaaaatctcgggttaatttcttcttggcgaggtggctcggggggcctcgcttttgtaggcgggaggtggggtcgcgtgggctgggctgggctgggctgcgcacgaagaacacgtgaaaggtgaggaggaagcatacgacgccgcatcgcatcgcatcgcgtcgggtggtggactcgtggggtgtgagggcgacggcgccgcagttcgacgtggcgttgggagggtgggtgggaggctgacggggtggggcccacgtcgcgcgccacgccgactgggtcggggtggtcaactcgtcgcgtgcgtgcagccttccgacacggtgggttgctcaccgtcacaaaattagccgatttatttatttggctcccctatttctttctttgtttggattgtttattttgtaatcatcattggcacatgtttagggtggattccactcctgtattatggataaaaaaagtgatagtataaataatgatttggcttgcaataaacaacaacccgaatgctcctgttattattgtagtatacagtaccactaattgctacaacttgaataaaaataatatgtacgttctcatgtgttcttttatttaggaattattatcatatgaaatatgattatgagtataacatcacataataaaaggaaaaagtacaccgaaggtccctcaacttgtcatcgagctacaaaatcgtccctcaaccgtaaaaccagatataggacatccctcattttacaaaaccgttcatttagaaccttcggtagttttgactccggttttgtccgacgtggcggctgagtcagcgtgggccccacatgtcagggtgtacgcgtcagcgccctctcttccccctcttctcttgcttcctcggtttctcctctcaatcttctctgtaggccggccggcgaggtgaggcgggtgttataggatgtgacactttatagcaatctagaattggatgtgacactttatagtacaatatatctggacaagaagcatgtttggattcgctgtactatgaagtgaccatccgtcactaggttgttatattatgggacggaggtcggagggagtactagattactttctctgttccatattaagtttatttttttatctcatttaatttgtttcaaaataactttttttttctaaaataataactgtatcggagtttgtaaaattatagaataattatattgggactagataaagtgatgaataattgtttcagggtgtacgtactggagtttctgtgcttttgggctctgggtagggcccattccctgacccgagcggagctattaaaaacaccggtccagctcgactgagtcgatagcctatcggcccagaaaaggatcctctgacgtaaagttatctctgacgtggtcactgatagatgggcccgcagtcaccacgttcgtctgattttccgtctgaggatctccttcccggtcggcccatgcacgcggtcacgcaccggctgaccgccgcatgcttccttcgcgtgtcgtgctggcacgtacggacgtacgtaccgcggtgtaggagtactctgtagtacaggagttctctggaagtactaacaacgagaagcttcttcgttgcggaggtcaggatcgagacgtgacaaattggaacgagaactgtgctgaatattggagtattactccatatttcacgttaacatttgaattcaacttcatataactatgattttttttcgatggttctgcaacttttatctcttttttttaccttattaaaatcctggatttattcccagagtttaagtatgccatgtgatccaatcatattgaggtcaaggcgtcggcttcagaagattagatacattttgcatagtaaaatattttggagttttgtgcttttgggctttgggtagggcccatttgctgacctgagccttgtaaagccggtccaactccgggtgctgggccagcctctacgtacgggcaggtaggtaccggccatgccggcttgtagctgtcagcctgtaacgcctctgcctcatatgcatgaactcccaagtcccaacgttacaaaatactacccccatcttagggcctttttagtttgcgaaatgaaattttttttgtcacatcggatgtttgaccggatgtcgaaaggggttttcggacacaaataaaaaaactaatttcataactcgcatggaaaccacgagacgaatcttgagcctaattaatccatcattagcacatgtgggttactgtaacccttatgactaatcatggactaattaggcttaagagattcgtctcgtgatttccctcttaactgtgtaattagtttttcttttaatctatatttaatgctccatgtatgcgtctaaagattcgatgtgatattgttgggaaaaactcttggggaactaaacggggccttaatataagttatttttcacacaacacacataaacatacaaaagaaaaatactagaatatttttattttatcaaatcataaatcaattatttatcactttatctattcccaatacaattattccctaatttcacaaactccaatgcaagattactttaaaaaattgaacttatttttaaacaaattaaatgagctaaaaatgaacttaatatagaacagagaaagtaatctagtactccctccgtcttataatataacaacctagaatcttcataatacaaaaatctagatatgaagcatgtccgtattcgtggtactatgaagtgtctcatgattcaaacctagcactaggttatgtcacatccatataccccattcttttcgattaaatttgtacatattttacctcggtgtgcattaacaaatttttcgaacggctacatagtatatttcgtgtgaaaactaaactttttataatttaaaacaattaaaactcaattaatcataaaataataacttttttgttttacgtattcatactagcttaatcttttatttcatctcggagctataaaaaatgcgggtcattactagcagtactctacatgcttttatttcatcccggagctataaaaaatacgggtcattactagcagtactctacatggacgagaagtttcttggttgcgcatgcagaaataattaactattttattactcttacgagtaatgataaagaatttgccactagaccccatgttatagacaaatgagggtctatgagtcatagatagcgagtgaaaattttttaattgacacattttaaagtgataaatagttaaattgtcccgcacatgcaggccgcacgagactgacaagttggaacaaggattgcgctgaacattacttcctcctttctttcacgttttccttaggtaaatactttctttcaccttaattgccactattgaccagaacaagtaataattgcacgtttgcttgtcacgtttagcctgcagcttaatagaataagccataatttcaattttaaaagtgattttaggactttcattgtagtttaatttcggcatttgcatgcttttaaatcttcaaaaacatgtgtatatataaattctatatgttaaatcgttaataagccatcgcttataataagtataataagcggtggtctaccaacgctaaccaagaacattctaaaagccaccaaatatatatatacgagggaataggctgaagaaaattattactattggtttaaaaaaagatagaaaacgtgtattgggtaatataatgtagcgtgacaaatatttgtggacctgtaaaatgaccaaattaaagagacaagtaaacgtgaacgtgaacaaaagccttacttttgtttggaatgagaattgtgctgataaagttgctagtctttctttggtctgcgctatgcatatccaaccatggataaacgctatagttatgaaaacgatgagccatcgatttatcgcattgtttgcaggcatgcacgctccatgctaaattagttaatttaatactagagtgagttcgcgcgctacgctgcgcggtattgtagcatgtaatgctataactcacagaaaaaggtttgtccaagaagattacataacaacaatactcaattcctcatgtacctacagcgtgataagaacattatttaacctaaatagttctttttataaccaaagtccccagaagcagttccggatagatgataatttatacaacaatttcacgacgcatagtagggatggcaagcatagtatgattcatccaacatctatgggcacaagatgcagtttgttatgtaaaactaactgaaaatagtacatggttaagtttctcataatcttgtttgcgaggactgcagtattaaaatagtatctgtaaactctagcattggccaaaaacccagtcagatgagacaatagtattgcattgatcaactatggtacgaaaaaccaactacatttcagattcattagttttaagtagggacttgactcttcactatgagaactttctactcaagaaacatatccccctcggcaattcagatcaccaaatgcaatacccagcatctgctaaaatcattcttaaagttaagagtttggagaattaactcagcatattagagatgttactaagtagaactcaaaagtttggagacttaagtcagcacatagagagatgttactaaatcagtagaaggaactcaaattaatgaacagatcctcacttcagtctatgttatgctactaatcaaatcagcggactcttaaaatagccatgtaaaggaacttaaatataaaggttcctgaaaagagacatctaaatgcaataactgagtatccactgtgaatcaatggactgatataaatgctagaaacaaatatacatcacctatgtgattaattagctaccaaactaccatgagagccttcaatatttgtatttttctcttagatgcccctcgtattctagtatagctaaggcgttgacaaatatcgatctacctaccgtacagtatttaaaaaaaaaagatcatcatggttaacgcatgtttagggatatttccacaggtatttcaaatggttttcctgctgagcaggctacagagaccatattgtttaatttgcacattgcagcactcaactgacttggtgttggtaagtttatttggtaggcaaaagaattggactggggtgcttcagcctaacacagtgcagccttgagatattaagaccagctcatagaaaagcattaaccgttgatgtgcatggagtatttttcctgtatggtttagaaaatgatcagatggagtgctcttttttttggtcaaaatggtaattacatataattaatgaataaaaataaataataggaaggattaactttttttttctctttctctctaaggagaacatcagagagcaaatcacagaaaggatctccaatgcatatttaccttgtatttgtttgtcaataagatgctggcagctccattcctgaagatccatgagctgagcatagtgggttgcctctcccaatattaacatgagacatgaattatcatgaagtaaacctattccttgaagattgagcggggatcttgggcctatcaagattgactaaggcgacatcaagcacacatcataagcatctcagttgaaagaacttttttttggtaaacttctcttaagggaaaactaaatatttaccatttaaacttaaaaagctacttgcacagaggctgtaaaactacaattctcttttattgtaccatatatgttattcatgtgtatgaagagaacacggggagactatagtagcagttcgtaatggtgtcgcatatataaactcatgtataatcagataaatttaatatatatcaaattatagataatatcacagaatatacacatctagaaatcctcatgattttgtattgacaaaaccgaaccaaactaacatgttgtacccatccaagaatacctcttgtaggtaaattgggagtgttaggattaattttgtagatcgactatccaacaaaccataggacaatacatcaataaagattaaagcatctcctggttccccaaagaaacttcaatgcaagcatatgtagttcctgtacaaaacttgccatgttaattctgcaaagcaataatagtgagaaagccaaattttataggggactttttcacatgataagataaaaacaaggaaatactactattatgcaattactggactgagtgattgatgtctacgcctgtcatttacaaagaatggcaatatatgggcatatggcgatctgtttgcaaagttacacaaaaatataattgaatttcagaaccatctgtggccatcagacatgtaaatggcatatcataaaaaggtacaaacaatgaaaggcaaatgtttaatggtgaggtaaaaagagaaattcctgcagcttacctttttctgttgcctttgcctggctgtcatggctatcgtgttctgaatggctacataagaacatgaatcagaggttggcaaggaagtagcacaagaagctcatgcgatggataaaagtatgaaatgattgctcttaatttgggtatataataatttcattaataagcaacactaatattttacaaagctagtaaatgttgaactctaaaaatggggcaagtctagccgtctgttcacccatatgctgaaaacccacaaataatttgtgtaaaaggattctttgtagtgcatcattgtagaactacttggcctagtgatcatgagaaccatcataaattacatggtaggatgatttgcaaaacaacatagagttcaatttaatggtatttgcttacaattttttttttaaaaaaatattccatgatagcacgtggttggccagtgagctatgcaattacaactttaaaattattagcagtcaacatcttaaactacaatcttataccaaataatttgaacttagatattgtaattttaaattcatacccaccttagtattagcctcgccttgagttgtactaagcaagccccttttaacacatccttatctaccaatgataagtttctgcaatgtaaatgaaagttaagcctgcaacaagtaaatcttttgatcccaaaagatcttatagtaactattcaaattgttgtcccatttacattgaagagcttagttttttactgaaactgaaaacaggtaacaatggaaaacttcagaagaattcattgccctctgaagcactgttaaaaagataggaaaaatttgtattaaatacagcagaatcagcaagaagcaattcacatcaccctggcttagttatccaacaatcaaagaaatgaatagtctttacctaaaagccagatataatgggaggagccatgtaagcgacgcaaaaggtccagcaagcaaactgcttcatgaccatgtaaatggaaccagtgggaacaaaaatagaaggaactctttagagatgattcaacataatatagttatcatttagaacattattcttttatttagaggtaacaacaaaaattcttttgaaatatatttttgaattctgtcacacatcttagcaaactcctcgggccatattaaacatctaggacactcatctagccaatacaacaagatagtacaatttgccaaaagctatttcactaagggaacaaaagctatcactgctacaacaagatagctgtttcactaagggaacaaatgctatcactgctgttgaacaaccaagaagatgcagtgtaaaaaggaaatataacctccagctgttgaatatcaactaattaggctcaattcataggacaacaacccaaaaggtaataaatgcaaccagagcagtgacgggtctggggaagaaccaccaccacctcatcctgccagtctatcttctgcatgtgctagctgcatgacagcatacataaatcatttcattaggcaccatgtttgctctgagatagaacaaattttcagtgcaaagcgatcctgtttggcacacacctatttgcaaaaaaatcaatcaaaaagaactcattatttgctccaaaaactcacctacagacaatatgatagtagtatgttgggctgtacaggagaggcaacagagaggacagcttcttctcgtcctaatcctcctctatgccattggcctacccagtagacagtagaaactcgaaatccacatttaaatcaatgtaatcgctcgaatcacacgcccattgatgaaaggggaaaacacagggagctgctaatcacgcacctaaccgccggcggcgacagggacccgtcgaactcgatgcgtcgtcaccacgtcgaagacctccaaaaaactgttgggggagccgcagcgacctcaaatcgctgggacctccagcagcagccgccgctgccaaacccctgtgctagaggctccgacgccgccgccaggtccccgacctcaaggctatgttgaaaccgccgttgagcccctccatcgagcgcagccaccaccgtacactttagggaagcactgttggaggacgggtaaaacgacggcgctggaaaggccatggaagaggaggaggaggcggcgccgcggcggaggagcatcggcgccgccggtcaaagaagcgagaagcgagaagggagatggggattgggatgcgacgtggagagacgagagatcgtggattccacgtctgggtaaggacggaaccatctagataggagacgaacgatcagattatgtccacgggtgagatcgaacggctctgattcgatggactcaatcgtaaataccaaaattataagggcttttctgcaaaaattaatggcgtcgatcaattaggtttgcagatacgtgtgtcacgagatgattagtcgaaggagtccaaatcgccctggttgcggcaaagctaggagctttaagatatctagtataagccactcaaaacatatactcctcctatcttcgtcttaaaatatagctacacgtgcataatcataactaactattttaaaacgtttaactattttaaaacagaggtaaaccactcgaaatatgtacctatattatcttcatcctaaaatatagctacacgtgcataatcatatctaactattttaaaacggaggcagtctttagaaaaccactactctactactctgaaacctagttcctacgtagtacatatgaacttcgaatttatctttctaaaccactcaaatcatcttaaaaaggcctttgtaaacctgtagcagcgcacgatggaccaaaggtcgaacggagaaggcccctcttcactcttcacccctgtggaaacaactatagtgcgcagagagatctttttagagtggccctgtatcaatttttgcgcaggaaattgcatggtttagttttttttttgttggtgtgtgcatgtatgttcatacatgtgaatgtgcgcacgtgtatacgtacacctacgttagtgtttcgaaaaaaaaggtaaattacatcgatgatatataaacttgcgatatgggtgcagtatgatacataaacttacaaaataattgttttggtgcacgaatttatataatgcgtgtaaacctgaggccaaatgagaaattgaacattactccctccgtttcacagtgtaagactttctagcattgcccatattcatatagatgctaatgaatctagacattaactttctagcattgcccatatttatatagatgctaatgaatctcattagcatctatataaatatgggcaatgctagaaagtcttacattgtgaaacggatgaaatacatagttaatcctacttagttggatatttattaggaacaagcacacatatttgaatgatgtcacctagatatgtatgagcgcaatcaaatgtataataaatgatggtgattatacacacaaataatataaaatatagatgaagtatgcaatgaatagaaaatagtgaatgaacaaaaatatatatccaaatagaggttattcgcacctgtagcatgcctcgttaccacttgctgtttgtgcggattacattctaaatatgctctaactcagtattattagtcacagtctgctgatttggccttctatcgttggtaatagacaaattcttggtgcaaacaactcgtgttttcactgagtgattgtgtctcctctccttctctctcctactattcttgtgaacattgtgcctacatattgttcttgtgaacatcgtgcctgcaggtggagttagcatggctaacgggcactagcgagcatgcatgatgtggtaatagccttcaaaaacggaggcctccatgtcggtctggtggacaaccataaatgactggtagaaagaaggagcacacaagctcgtgccaatcatatatagccatgcatggagagctcatgaccacactatattttaggacagagtaggacttgaaaaggtaatatatatgaaagctacttcaaatgaaacatatattgttctcagtatttttctttgggagtattttctattaaaaatcgttacgtcgtttctacactatataaattattattacctacatttacgtcgttttaatccctatatatggacaatggagatggcccctcttcaggcttcttcacccttgtgggaacaactagagtgctgtatcatctgatccgacgatttatttcaatggtctgtatcaaattttgcatagaaaattacatggtttagttttactctcgctgataatttgaaatgccaacaaaactattattccaagacaacaaaacaagacgatttcgccaacctctatcctaaattgttgcaatctaagccagctatacttctaaacaagccagtaaattggccttgaatcgtacgatcgattcaaatcaaaattcaaacgaatcttggtcacacgaaagaaaaggaagagctcgaattcagtagaacgcggcgtcgtcagtgcggcctgatcccggcgtccttgccggcagcattggcggcgaatggcgagtatgtacggcgccgtcgccccgagccgcctgcgacttctcttctccacggaccgctgcagcgacaccttcctcaccaccggcaggccggcgtcgcgcccgcgcgccgtcgtcgtcccgcccagcgcgcgccgcggcgcgcaccagctcgacgaccgcgccccccgcggggaagaagtcgtcgaacaccagcatccgcccgccgtacatgatcttcagctgcgccgccgcagccgcctcctccctcacgtccggctcgacgtcggctcccggcatgaggagcatcgtggtgtggtggtggtggtggtggcggcgaccgttcgccgccgccgccgccgcctcggccttgacgcaccggctgagcacgccgcacgccaccacgaaaccgccagctccggccaccgccgcaatgatgatccgacactgccatgatcgatatctacccggccccggtacatgatgactctgagcacgcgacgcagcgtgctcagagtacggatataagtacgtacgtacgcggtggatgggttgaagagagcgggtggtggggcgcgtggtttggtttgaatggatggatgcaacccaacaagtggccacacgagacaccatgcgcggcacggggggatgtaaactacactcgcgagaagcggacgatgtcgtgcgaattgagcttagctcaatggattatactaagattttttcttttttaaacctgtctacctgggtttaaattttaacactgattctcacatctatggtgaactattttttttctatgttagacatgtagaaacaaaatattatgtacattggatttcggtatttaggaatagaatgttatgtccattggatttctatagtatttagaaacaccgacaagtgtcgaaactttttttttgaatggcacataggaaatagtacagcattagagaagaagaaaacctgaggtctcacttcatgattatttttctcccaaattctcatagaaaagccctttcgataggaattttaagaaaactggtaggaatcaatcttttttttagaggacttaaacaattttttttactatagaatacaaatcctctagtatttctatatttttttctttcattcaaaggggtcctaagggtttgatttcctatacacacaacaacattgtgaattaatgtttttttttaaaaaaagtgaataaacagtaggttttggagaatacgcaacacagttaacacccaagttaatacaatttgcttcaagtagtcatatgttttacaatttgcttcaacttccatgaataagtaatttactcccatcgtgttacatgacactacacaagacaataaattaacaaaacaaataacataattaatcactagaccaggcttttctaaacaaaattattaaaccatgtttatgttatggacacaatttaaatgcatggttggaacgtttctgttggtgttcacagtcacaaaggagtagtgtattgatcaagtgatggaaagaagaataacgtgcaggccgtgcgtgggcgacttgcatgcaaaatgcaatgaaacggctaacaacacatgcaaatgcaatgaaacggctaacaacacaattggtgcaaacaactcgtgttttaactgagtgatggtctcctctcctactattcttgtgaacattgtgcctacatattgttcttgtgaacatcgtgcctggtggagttagcatggctggacaaccataaatgactggtagaagaagaagcacacacaagctcgtgccaatcgtagccatgcatggagagcacatgaccacactatattttaggacagtgtaggacttgaaaagctaatatgaaagctagttcaaatgaaatatatatgttctccgtatttttctttgggaatagttatatttatggcactatattttccattaaaaatcattaaatcgtttttacactatataaattatttacctacatttgcaatccatttacattgtaaatttagaaacttacactcttgtcagtgtacaaaatatggtataccctagcaacaacagaaaaatataattcatgtatagaatacctcatttccatagaatggaccccctcccacaccaaattatagatatagcatcccaaataaataaagaatactgtcagggttatggataccacatacccaatagtaatcgactaagctcggtaggacccatcatataccaagtcttatacggaacaaacctcgtatatagaagaagttccggataaggaagtactaatagagttctatatgaaaacgacaatgattactcggattgtatccatattggtctccctagttctacttggacaaggggacatctatgggtataaatacaagccccctagaaggagaggggacaagccacaagacacaacatacacacaaaccaatacgtggccaaatatcgacattagagattagtctagacataccccatctggtgtctacggagatcagtaagagagatctagcgccatctctgatctcgacaggtttatattcgaggaggaagactaccatgtcgtcgactacgagctggttatccatgccgccaagttgatgacagttagataggttatcccaaatattatacttgtgtgatccagatgaataaagagcaacaccggttttggccaacaggatgtaaggctattacctgtcagataaggggcacgaacctgtataaaaatccttgtctccatctcttttacctcaatctcgcatataccctagtaccaacgatccccataccatccaaataccgtagtcacgatctcaaacgtcgacaaatacaaaggccatagagttctattcagacttgccccagtactataccgaagatttctaagattatctccatgagtcccttatgaaaatggacctatgagtataaatatataaccccgtgaaaggggcgaaggacaagtaactctaaatcaatattttctgatgttccggttggatcgatattgtcatcgtttctaactcttgcgttccaatatcatttccgagaaaaaaaaatggtaacagaaatggtttaagcatttttcctaccgttttaatccctatggacgaaggtccaatggagatggcccctcttcaggctttttcacccttgtgggaagaactagagcgctgtatcaactccgacgatttaattctatggtctgtatcaaattttgcgtagaaaattgcatggtttagttttactcctcgttggtaatttgaaatgccaacaaaactattcttcccaaggtaaaaaaaaacaaaagtattattccaagacaacataacaagacgatttcaccaatctcaatcctaaattattgcaatctaagccatatatacttctagacaagccagtaaattggccttgaatcgtacgattcgaatcaaaagccaaacgaatcttggtcacacgaaagaaaaggaagggagctcgaattcagtggaacgcggcgtcgtcagtgcggcctgatcccggcgtccttgccggcagcattggcggcgaatggcgagtaggttcggcgccgtcgccccgaaccgcatgcgacgcctcttctccacgaatcgctgtagcgacaccttcctcaccaccggcaggccagcgtcgagcccacggctgtcgccgactcgccgccgtgccgcgcccgcgcgtcgtacgtcctgcccggcgcgcgccgcggcgcgcaccagctcgacgaccgcgccccccgcggggaagaagtcgtcgaacaccagcatccgcccgccgtacatgatcttcagctgcgccgccgccgccgcctcctccctcacgtccggctcgacgtcggctcccggcatgaggagcatcgtggggtggtggcggtggcgaccgttggccgccgccgccgcctcggccttgacgcaccggctgagcacgccgcacgccaccgcgaaccgccagctccggccgccgccgccgcaatgatgatccgacactgccattgatatatcgatctacccggcctcggtacgtgatgactctgagcacgcgacgcattaggccggggtgggtgggagtacggatataagtagcacgagtggtggtggcgcgagcgcgacgttgtgggggaaacatggggattcgcgaggggcgcgcgggcgcgagagaacaggggatcgcatgaccatgggtacgtatacgcgtggcgcggtggatggttgaagagagcgggtggttgggccggcgcctggtttggttggatggatggatgcaacccaacaagtggcccacgagacaccatgcacggcccggggggtgtaaactacactcgcaaaatgcagacgatttcgtgcgacctagctcgattccatcagcattaggaatcgtgctcccctgattttaacttgaaaaatactccctccgtattttaatctatgacgccattgactttttaacaaacgtttgatctttcgtcttattcaaaaaatttatgtaattatcatttattttattgtgacttgatttatcatcaaatgttctttaagcattacataagtatttttgtatttgcataaaaaatttgaataagacaaatggtcaaacgttgattaaaaagtcaacggcgtcatacattaaaatacggaggaagtagaaattaaggttaatatccttggcagttgaagaaagaaattaaggttaatatccttgacaagaatgatagttcaaacggctgcgaagtgaccttagctcaatggaatatactaagatttttcttttttaaacatgaagaaaacagtaggttttggagaatacgcaacacaaaacccaagttaatacaatttgcttcaagtagtcatatgttttacaatttgcttcaacttccatgaataagtaatttactcccatcgtgtggcatgacactacacaagacaataaattaacaaaacaaataacataattaatcactagaccaggcttttctaaacaaaattattaaaccatgtttatattatgcacacaatttaaatgcatggttggaacgtttatatatgtcggtgttcacagtcacaaaggagtgatggatggaaagaagaataacgtgcatgcaggccgccgtgcgtgggcgatctgcatgcattgtctgcgtttgccactgtgctggtggcgatggagaaggccttacgtggaagatttatactccatccgtttcatattataagactttctagcattgcccacatatatatatatatatatatatatatatatatgttaatatatacacatgtatgtatagattcattaacatctatatgaatataggcaatgctagaaattcttataatatgaaacggaagacgtacaagttattactattgcagatttatgtcgacgataactgtaactacactaaggtttaatatttacattgtattttttattaaattatacgagaatttttgtcattataatattgttacgaattattattcacattcgttacttctttgaaactttactagtacatctataaaattaattcattgtgcaaacattactatgatttggttacctctatgatacgttatttccaatgctctattccgttaatcccccttttcatatttttttgttgttccggttgtattgtatcgttatagtttccaactctaccgttgcaataccatctccgtgaaaaagaaatggtaacgggaatggtttaagcacttttcatgaccgtttccggttgttttattccctatggacgaaggttcaatggagaaggcccctcttcagtcatattcacccttgtggaaacaactcggtacactccaacgatttttttcaaaatggtaggtctgtataaaaaatttgcatagaaacttacatgatttagttttgctctctttggtgatttgaaatgcaaactgcacttcttccaaaacaacataacaagacgatttcccaattaatctctctggtaaaatattgagcggggcgccgcatgcggaaacggcctacgctacgatccgtttcgggcgcgcgcgcggcgcttgcaccatgcacttgttgaacaaatacactcgcaggaagtggatgatagcgtgcgatctcctgattttaacctgaaagaaaaaaaaatcaggtaatgtccttgacacggatgatagttcaaacagctgcgaaatgagagtagctctttatacggattctcacatttatggataattaatcattcgatagtagacgatgtagaaataggatgtcatgtttattagatttttataggatttgaaaacactgggaagtgtgaaaagttttaattgattggcacatatgaaaaagaaaacatgagaagaagaaaacaagaggtctcaccttatgcttatttttccttcaaaattcttctaggaaagccccttccataggaattttaagaaaatcaatcatttgtttcaaaagattgatagaataattttctcatatagaatacaaatcctctagtatttctatatttttcgtttgattcaaaggggacctaagggtatgattttctatacacacgcaactgcattgcaaatttatggtttttcaaagtgaataaacagtaggttttggagaatttgcaacacaaaacccaagttaatacaatttgattcaattcagtaatcctatgttttacagttttatgaaaaaaatgtttgttaatgagtaaattgtaccatagatacaagaactttcaaagtgggtgtgatttagcatatcaaattgtaaatcgcttatttcggtgcataaacttgtcaagtgtttgcaaacaaaagccaaaatagcatgtcgtaactaacttcactaagttggacgttgattaggatgttatgtaggtttacatgtcaaaatgatgttacctaagtaagtcatgttaattatacatattaaaaatgtatatgaagggactatgcaatgatacaaataatagaagaacaaaataactgttgggttacgcgcaggctacgatagcataaatcaaaattttctagcgcataacccaggtaccatgcaagtattagattacagatcgttaccactcgacgcgctgcgcagcggaagaaagcgctaagaaggcgaaggaaccctcgcgatgtagcgcgcgtcgatgtagaggaagtagtcgatcgcaccagcttgaccttctcctcctcgtgcgttctcctcgccatactcccacgccgatcagcaccacaaagtagcggcgcctctatcggtatccacacgtacagggacggaacgccacacgcagatgtgctagcacccgcgcgcggctagggttttgctcgtggaggggagtggcggctaggatttctcacgttatgcaatacaatccgccggtcacacccctcacgaatatataggaaccatgactcgagcctccaaggcccgtaggactcctattcggatctctatccgaattaagctcatattagatctcaatccaatccccttattccggcccattaagcatgtgaccctgtaggttcatgcacactcggctgtaacccgaaaactccttttcggtctacgtgtcaacagcggtccctagcagaacgtattgacccgccgggcatacataaagatcatatcggctgaacatctagcgtatacttgaatgaaccactttgcctcatgatatcgattaagctcaaggctagatgtgccatcctctaatagctcaatcattcactcaaacttgcgatagattatataacttgtgatagactcctcaatcatctttagcatggccatgcacttccataatcaataacatcgagggggcacagagatatctctccataggaggggcaaatcccatcttgattattcatatcccactacatgtttcatagcatacccgaaaactacttttgtaactacctaattacagagtagcgtttagcagtcactaagtaagctactacacatgttggaaaccatgataatgtcaggtctaaggattcaacaccaacactaaatgagattactgatgacacaacacatatggctattgcagtgtctcatgttgggtctatccaacaaattgttccccaacatgtgtccacattattaatttggtatttctataccataatccatgagacataatcatcaattaatacatgtgctgatcatttaaatatatttgtttcacatgtgatatttgatcggggatcctttagaaatagtaacaaacaacataaagagtctcataaaagaatcacatattcattaaccaataatgagttatctatttcaaggaataaaatcgaataaatatgtaaatatagtatgtgatacaacaatatgtataaaggtcagttgtttatatatataaaatatgccatgccctcatatgtgtgcgagacattccattccgactaactcaacataattaggctgtgttcgctatgggttgttcccaacttggaacagtagcacggaaaacggagcgatccattagcgcgtgattaattaagtattagctttttttttcaaaaatggattaatttgatttttttaagcaacttttgtatagaaactttttgcaaaaaaacacaccgtttagcagtttgaaaagcgtgcgcgcggaaaacgaggaagataggttgggaaaatggacgtccgaacacagccttagtcagtttctgactagtttgcatgcactagaccacttcgtatatcataatgtacttaaattgcacccacctaataaaagcatcatgtttttttaataaattatttatttattacgcatggaagttgatcgtaccattatttaccctcgtgaaaccacctcttcttatgttgccttttattttcaacttttcttccctatttatctaatggtccatcgaaagatcatttttcccatggttaataggatctgtcaccccagaaaagagttgttgccacctaaaattaagtttgatattttagtagacatgcatggtaactaaataggtaatgatgcatcatataattattatgttctcaagaattttaacacattttttattattgtgtttttttattcacatcgtgtttattataggacactacacaaaccaataaaaacatatgttgcattttactataaattaacaaaactaataacataactaatcactaaaccatgcttttctaaacaatttttttaggttacttttctaaaacaaaattattaaaccaggtttatgtttatggacacaatttaaatgattggaacgtttatattggacacagccacacaggagtgtactgattaaatgagggttaaatgggtatatttgaaaattaaggaaaagaaaaataacgtgtgggccgcgtgcgtgagcaaactgttagcatgcatgttttgtgtggggaataagttcatcggaggtcccttaacttgtcaacgaaagcgattttcgtccctcaaccggaaaaccagatacaacaagtccctcgactattaaaaccggtgcagataagatccctcggcggtttagatgacggttttggctaacgtggcacttacgtggctagcttgactcggtcttcatctgacgtggcattgacgtgccgcttacgtggcaattcgatctaagaaaaataatagatcccatgggacccacatgtcagtttcacacacaaaattaataaaaatggtggggcccaaatgtcattctcacccctatctcccgtctcttctgggcgccgtggggacggcagagatgacctcgacagcgtcctcgccatgggcggcgcgccgccctgctcctccgtcgccgccggctcgacgactccccccgtgccgccgcaccgagggccactgcgccgtcctccgcgtccccaccgcgtccgcgacctcctctgttggcctcgctggggattaccgggattggagggcacggtcgactcccggcggccccacctttggttacaatctctctagccttgactacctcctctgctactggaatcatgcgcttgattggatcataggccgaagctgcttccagtccaagaagagtacagcctctgattcataaccgagccacacagctccaagcaaatgtagctcccaactctccgcctcatcaacgccattgttgcacacacacatagagtacgcctgcaagtttcacatcatgcattagtgcaagaaacgagttcattgccgccctgctcctccacccttgccgtcgccttccctctccggcgggccatcgtcttcagcggcctccgtggtggtgaccgcgcatggctgctcacgcggctggccacaggaggagtcggagcgcccgactgcgggctccaacgacgaggacaacgactccggcgccatcgccacggcgcacgccaagaagccgttgtccaccattgccaccgcgctcgagaaggagatggagtttgagtggcgtcaaagtattgagggcggggatgcggccaccgcagctcgactgcttcttgcgcttcccgccgtcggccagcaggggccacatcggccggggcacgaaaggcggcggcgctgccgccgcgagctcgatggccttctcctttactgccatcgtcaccgacggcggcggaatcggtttctttggaggtagcagcggcggcgtgtcgaaggtgccgagccacacgcgtcgcccgcttcaccaacacccgcctcgccgccaccgccacctccccttcttccccttcctcctcaccgaccgccacgcacgccatccgcctcgccgtccatccaagcaatccaacctcagcagctcaagctgacagagagggtggatgaggcggtgtgggtgtcgccgaccgtgattccggctcaagcgaaggtccggcctcagctcctaagcaccgcccgccgctgctccgcccttctgtaggtgcaggggagagagaggatagagagaggagggaggatgacacgtggggccacgtgggtcccaccattttttattattttgtgtgtgaactgacacgtgggtcccatgggttttattattttttcgactcgaattgtcacgtaagcgccacgtcaatgccacatcagatgagaccgagtcaaattagccacgtaggcgtcacgtcagccaaaaccgcccttaaaatcaccgagggacctcatttgcacctgttttgatagttgagggacccgttgtgtctggttttggttgagggacgaaaatcggattcattgacaagttaagggacctcagatgaacttattcctttgtgtggatgtcactgtgctagcgtataaccatactctcggccttctgggcttttctttaatgttctttggagcctttgtgttgtatgtgcgggtcatggctgcgaagaatcaaggcagcagacagtctgcagtagaatttttttcttttaatatttacaaaaataatctaccggcgtaaaaaattacaaaaatagaccctgccgccctagtggagggcggcaagttgacgtggcagacggcggctcgacgacgccgtctgccgctgtctataaaaattgcatttagccccttgccgctctctggggctaaatgcatttttcgcagccctaaagagcatttggctcgtactttttttttttgcatctgagccccttgccaccctaggcggcaagggacccagatgcaaaaattaccagccaaaaagtactaggcccggactggcttttttgtatggggcgcggcaagggttttcgtgcaaaaaaaaccctccctctcccgtctgccgtcaccgcccgtccctcctccgtttgccacgtcagcttgccgccctagtggagggcggcagggtctatttttgtaattttttgcgccgatgtattatttctgtaaatattaaaagaaaaaaaatgaaaatgaaaaaaattcgtctgcagtacacccaaccacggtagtgcgcaaggacacgtggaacgaaaacggaaagacataagatacgacatactgctccctccgtcacataatacgagggattttgagtttttgtttgcactgtttgaccactcgtctcattcaaaaaatttgtgcaaatataaaaaaagaacaagttgtacttaaagtactttggataataaagtaagtaaaaaaataaataataattctaaaattttttgaataagatgagtagtcaaacagtgtaaaaaaaactcaaaatcctttatattggacggagggagtacttagcaacgaaaccactgcaagatgttaaatcccaattgtctccttctgttgttggcgtctttttcgatcctaacacgagacttacctaaaaatttacggtgttaacggggtcgctaaccacctcgatctagacaactctaaatcaagatgggttttgaagattaaattggctagcggagtcaatttaaagaacaaaacaggcaccgatgccgatttagattgatttgaagataatcacgcgtctcgtgggcgaacggaaggtttacgaggaaacctattaagggataatcgcactctcacgacgaagacgaatgatttatgatgcaaatcgacaacgatggacgaaactagggtaaagtataaggcatggctgaaaagtaaaggtaaaaaataattcgattgtgtagggattgaaatattgtgtggttttgaatcgaatcggccttagcccttataaaggggatggttttgccttctgtaacctctccttcatctccaactcgggacagaaacaaatggaaactcgaaaaataccttcacaagcaagaaaactcgaggcccaataaacataggcttggactctaccgatctgaccggccacatattgccggtcaaactggccccacacaccggtcatactggcctagtgaaggaaacccggcaccttccaaaattttgcaatatttccctatttcgactatagatgccaaattttggcgtaagaatatgtatccattttttttcttccctccgtcgacattcttaactgtttaatctgtttgaccctgcagattgctcgctaatataaaaagggacatacggattggcactaaaggtattggaaatattataattgacacctatagtgcttttcagtcctaaacacacgcccgcgtggataccaatggcaagaactagcacctttgtgtacaactaggtgtcgttttttaattggaactgaaaccaatattttctgttagaaaaaggtgccaattccagctaaaaactgacaccttttatttctatctcattagagttattgattgcgatacccacgttaaaacaagcaactatatgatggtcaatgataggtgttggttccagttaataaaccaacacttttatgcggattgagccggtcttatccaatcgagccgagcaaacctctttttttctctacccttacttttttttgtcgccctctcctctttttctccgcccgcacacctctttgttttcgccctctttttttttctcctcctctcccatctccctcctccaaggcgtggcgatagcggttgccgctccctgccctccctcctcagcatggcgatggctacggctgctcccatcctcgacgtggctgcggtggcggctgctgctccgtgcatgacctcctcctcggtgtggcaacggctgctgccgctcccatccccgacgtggtggcagcggctgctgctcacctccccggtgtggtggcagtagctgctcccctccccgaaatgcagccaacggtcgttctttggtgtggcggcagtttgatttgtgaatattttgtgggaagtttagaatttgggatgttgatctagtaaccaccatatgacgatggtttgatttagaatattgattttgtggggattcttgattttgatttatgattgcaaatgagtgcacaagattttcgttcataccaactaacaaatgtcacaaaaaatctagaaataattaaacttatactcctaatagcattacacgtatctataaagtctcatattcaaattcattatattttaaccatgaaaaaaacacaaaattcttacagatttttacatgaatttaaatatgagactttgcatatacgagcaatactattagaaatacatgtccaatttttctatagaatttttcatgacatttgctagttgtgtgccacgaaaaatttgtacacgttccctcgtctccctgcctaaaatctagcagtgcagagagtgaagcatgtgtaaacacgactagatcgaatgaagcgccccgcgcccaatcatgcggtgcgatccggccgccacaggtttttccggctgccgcggccgttcagattcagcggtgcggcggcacgcagcacaggcagcagcacgtgaaacacgcgagcacagtgcgtgcatgcaacccaactgtacgtacgcgctagctggaccaccatcgatgtgggtagatgagtacttgcatgcatcggtcggatgatggcagtgtacagtcgtacgcttggaccgcggcacgtttcgccaccacgcgcggctacagtcgtagcaggacagctgcagggcaaagctcctcgctgactggccgatcgaggcgcggccacttgtcgatcgctccgtacgcgtgacgagactgtagcggcaaaggccctgcagtggccgaagttggtgtgtgcgtatcatcaggcatcagctcgctagtcaaccgatcaaccaccactcggttccggccccgtcatttcacttatttggaaaataagccaaacaacctctttacaaacgaaaaatagtttgtgaataaaacttttatatttgtatttttagtgatttaaaagcaaaggctaaaaagtataatgcaatgaacccccctaaaatcaactccaaattttgaaaaatcaaatttaaactgataagcataagtatgatgatgcccgataaaaacaacctttatccgtctaataagaaaaataaacttttgttcgtctccgaggaaaaatcaattttgtctagaaagtttacttttttttttccattgaatttcttttatggaggaagcatgttttgcatttctgcagcctctggatatcacaaacgacatataaagagaaatacaaagatggatgaatctatcatagtgtgaactgttaaggagtccattgtgagcctatcaagagagtttttttttttgccgctagctaatttttacggatgtttacactgattgatcatgatagagacggatctggttaaaagataaggcctcgactaaactttaatgttagtttgatctattatggttaaaagataatactagctcatggattgttttagactatgaaattattgtgttgtgtataatgtctcatagattttttatagttactgtactgccgtaagaaaagtggaggaaaaccttttaaattttcagccgttggattatgagatgtttgtattgagcggaagctaccatcaaaatgactgatctttttccttcaggagtatcgaatggtaaacggtgggctttctcatataaaagagatggatggttttcttcctctaaaagacggttttgttaaaaacagctggtattctaagcaaagaaaattataaaaccagagtaagacaatgttttttaagcaattatttgttccacaatgttcatgtcttactacatgaaacgatatgatgtagaaccatgtaaacaataaaactacaaactataaatattgtggacaaatagcacaaagcaacttgccaattatttcttgatttgataatttgttgagaaggttaaaaaaagccagtttctattttgaactacaagaaaatctaagaaaaacagtctactttgaatctggacaacaattagttcctttaaaggcttggaatatttggacacaaaggaatggcttcatctttgatcataagccaccttctttatcctctcggaggcaactttttaaaggatgcctccttttattgtttaggttgaataagagagataaggatgaagtgaaacattggattatgttgtggcaattctagattgtaatctcttttctttcttttattaataaattgaaatcaatagcaggccggggcctcccttgatgtgtttctttaagaaagaatatgtataaaaatcgaccctagaacccaaactattcatgttctcgattgccttgatcttctcgggatttgcctctattcctctgccagagacgaggaaaccgagtagcttgcccgacggtactccaaacgtgcacttctctggattgagcatgaggcgatatcgtcggtggttgtcgaacgtttcccgcagatcgtcaatcaatgagtcgtttgtcttggtcttgacaacgatgtcgtcgacgtatgcctcgacattgttgccgagctggtcgctaagtgcgccctggaccgtgcgctggaaagtatattccctgcggttatcagtccgaatggcatcttaacatagcaaaataccccgaatggcgtgatgaatgctgtcttctcttcgtcttctttcgccatgctgatttggtggtagccagagtaagcgtcgaggaaactcaaaagctcacagccggctgttgagtccaccagttggtctattcgaggaagagggaagtgatccttgggacatgccttgttgaggtcggtgaaatcgacgcacattctccatttcccgttggccttccgcaccatgactgggttggctagccactctggatgaagtacctctctgataaagccagctttgagaagtttgttgagctcttctcgtatggcttattttcggtctggtgcaaatctccgcagtttttgctttactggcttggcatcgggtcgcaccatgagtttatgctcaatcacctccctggggacccccggcatgtcggacggctgccaagcgaacaagtcagcattgtcgcggaggaaggtgatgagcgcgagttcctatttctcgcttagtgatgccccgatcttgacggtcttgtcggggttggcactagagagtggaacgatcttgatcacgccgtccggttttggcgtcttgtttgtcttgctcactttcttgggtggctcagttgtggcgggtaggctgggcgtttgctcgaccatgtcgaggctccgcttgtcgcattgtaccaaaagttttgcattcccttgaatagtgattgttcccttcggtcccggcatcttgagcacttgatacgcgtagtgagatacggccatgaacttcgcaagtgcagttctcccgatgatggcgttaacgctgtatcgaattcagcgacatcaaaggtgatctgctccgttcagaagttgtttgcttggccgaaagtcacaggcaacgtaattttgcccaatggtttggacaaggactggggagtaattccatggaagggttgatcggtgggtgtcaactcgcttcgtggaattctcatcgcgtccaaagcgctagcgaagagaaggttgattgagctgccaccgtcgatgagaacccgcgcgaccttgatgttccgaatagtgggttcgaccacgatcggatagcgtcctgggatgacggcagtcttgggatggtcttcttccgaaaattctatcttctgttcacaccacttcatcttgggtgcagctccttgccatgttgaacagacttcacgttccactttcttgtattctcgctttgaggagtacgctgtggagcctccgaaaatgtgtgaaacgtggaggtcagagtctggatatgctgagtccaattcctgagcagccgcctctgcatccttctcgaccacgcgtactcgcttgcctttttcaaatgccatgtgcttctcgagcgactttttgaaaacaaggcagtcttccaaagaatgtctatccatcttgtgtatggggcaccatgctttcttcgcgtcgctaccttgtgggtctgggcgcttgggagggttcgcgtattctgctgcgagaacttccgcttgagctttacttttcccacttttgcgatttttcttcttgcttgactcaggtgcgtccttggctggtttcttgtctcctccagtcttcggtttgtcgttcttgcgtctcagtgcgtcatccgcatgagcgcatcgatcgacaatttcgaataacctccgagtagtcgtgatgcgcctcgttgccaactcctgagtagtgtagcgatctctgacaccggatttgaaagcgtgaattacagaagcatcggtgatctcggggattgtgtttctgcactcattgaagcgtcgaacataatccctcaaggattcgcccgggttctgtgtcaacgcatgtaggtcgtcttcgatcgcgtggcgcttgtaagttccttggaaattggctacgaattgctgccacagatctgcccacgaagagatcgagtaggggggagatgcatcagccatgaacgtgcagagcctttcaatgcggttggcaagtaatttgccaacgtcttgttgtccgctccggcggcgtagagtaccgtggagtaaacctgaaggaattcttccgggtcggtgctcccatcgtatttctctattgctccaggtcggaatctttcaggccatcagacatcccgaagtgaacgaacgaaagctctacacccagcgctgggggcggtgggttgtcggcgatcatacgtccttcgtggatgtctatctgatgaagatcacgaggatgatgacgatgacgatgggtcgcttggttccggcgcacaagtacgaggacgtcggccgggttctcgagaatcctgtcgccgtctcccgctgttgtctcggcgccgatctccaccatcgtcgtcattatggcgacgtcctcgaccagtatcgcccggcgcccgctgttcacgatcgtcgtgatcgtggttggatggcggctatcacggtgtcgatcttcactcgaatggcctcctcgttcttcattattgtgacgccgtgaagagacgcgatgtcgggaacggttctcgttatctcgtgtgcgtcgcgcctctcggcagccatttaggtgatcgcggagatcaccggtgccgcgaggtgggggggtggctcgatgaggcgattcccgctgttcagggttttcaccattagcatcaccagttggtggttgttccggacgcgctgcagcagcggcctcttcgaatgcgttaccgaggttggccactgattcccgtagtcgttctatccaacgtgcgagatcgtcgttcagaacgggatcgtagggggtttccctcagtattgcgttgacggctctgatgtgttgggccggagtggtcacttgattctccgcttccgcattggtgcgtgctgacgtgccgacatcgtcgatagccaatacctcccgcggcgcgctcgttgtcgatgatccatagtcttcgaggaggtgcaagaatgatggttcgtggggattaatgtcgattaccccaacaaatcgatctgaaattggcgtcgctccttgttccttgtctttatccctgatggggatgtgtgactgctggaccttaggagatggcgtcttcatagcgctgagaaagaccttgcagcttgagaggtcgtgattctttgtcttgtgaataggacaatagacatcacgagttggagaaatgcgctgaattccacgctctttgcaggcgcgaatttcggcgcggatgttgagaaaaacccagcaggcttgtaaagtgtgtttcctggttttgtgaataggacatcaggaccttgtcgcttcggaagtcatcctcgtcggctcgtggtccttgtcggaacgacaaggtttggccgcattagaatccttctcgagctcggatgtcgtcgatgttccattctccgcttcggcgggaggatccttcgacatggagtcgtcctgggttgtaaccactgcgttctcgtttccggtcattgatgaaccggctgagatcggcatcgtggtgtaaaccgggaagacgatttcgccgacttgagtccacaccagcattgtcgaagcaggaaatccctggttgaggttggtgttgacgttgttgtcgacgaagctggatgacatagtagtagaaccttgagcaccaagtccccctacctggcgcgccactgtcgacgtttgatgtcgcaattctggtatttgcatggtatggggatcatcggtgctagggtatacgcgagactgaggtaaaagagacggagacagggatttttatacaggttcgggcccctgaattgtcaggtaataaccctacatcctgttggccgaagccggtcgttgatcttattcatgataatcacaccagtacaatatttggggtagcctatctaactgttgtcgacatggcggtctgacgatctgactcgtagtcgacaacagggtagctttcctcctcgaatccgtgcccggcgagatcagagatagcgctttcgtctctcctgacagtatccggagacaccgtatggtactagccatgcttatccctgaagtcgatatccggcggcatgtcttggcgtatgtcggcttctatgtcaattgtgttgggtgttgatcctctcatggtgggtgtccccctgtcctcttaggggggcttgtatttatacccataggtgtccccttgtccaagcagaactagggaaaccaatatggatacaatccgagtagtccttgtcgtttccatgtagaactctggttgtctttccttatccggaactccctcgaggtcagtttccgtataagacatggtatgtggtgaatcctgccgagatttagtcaattactattaggtatgtagtatccataaccctgacaagtggttataagtaacatggtggcaaaaattagaagacaaaataaaactatatatgtgataaatgagaacacccacacgtgcatgcttacgctaaaaattaattggagaagaccgtagaagaggtcgatagataaatcttgggctatataacacaatactcatgcatatctgtataaacaaaccttgtatttatgtaaaatgcaaatagaatgtgatcagattaccaatcaagtaaaatgtaagcatactagaagaaccacactaccctaaaagagagagaaacaaaaatgtcagggagttttcacaaaatattgtcctagacaaacgtgggttactgggttgcaccaaattgaggaggcaaggaaacccgaagcagaaccgctgatatgtggactagccatagcatccatagcgtggagcggccagtacaaatcatctgaatataaaattttattatatattgctttgttcgttttataatatataacacattaattatatgtctgattcattctcaaaaatatatatgtaaatgtcattctttttgttggtactccctccgctccaaaatataagtatttttagctatgaatctggacaactgtgtgtccatattcaaagctaaaagttgttatattaaggttgacttatatacatttgtatatttgcactactagtatattttttaatgagacaatgctcaaacattctaattaaagtcaacacagtgttattcagttattgtacattaaaaaccgaggaagtacgtatttaagtttattcggctaaactaaaaatgctttaccgttcgtagtacgtacgtgtatcactgtacagccagctcgctatcctgataaccaagtggaacagaattaaggaaaacgtggagacaggaaataaagagagagagggcacgtcgctctcgagcggccgcgacggggatctggtctgatcctgatccttggatgatcgatcgatcgatcagctctatccgtgccctttggaattccttttcctccactacggcagcagctgcgatcgacgaccagcgcagtacgtacgacgtccgtaacgcgcgtgccttttggggttttgggtttgagtttgggtttggccgcctcgatcgctttctttagctcctaaacagcatatttataaacgaaaaataatttataaataaaacttttatacacgtatttttaatgatttaaaatcaagggctaaataaataaaattcgataagaaaacctcaaaatcaaacccaaattcaaagttaaaaatttaaattttgactgataagcataaagataaacgagaagatgggctatttctttatcactggcttacactgttacacatgtggctactggccggtcttcgtggcaaccgggcgataggcatccggcctctggcgtccccattccgaatgggaaaggaaaactacgtgaggggtagccatgggccatggctagctagctgccggcgtgaggtggaaacacagagtcaaaatgtgctgcatgccagctgactggaatgttactcgcgtgaaagttccatgatttctgggcgctggtgcggtgccttagtatgggtgtggccctgttttgtcccccttgaagctatctctaaaaagcaatccaaatggacaatatatatatatatatatatatatatatatattaaatttgtttggtgctccatggtgcccgggcaccattgttgaaattgagtatatacccaattcaaatgagtatgaaactttttcaaatatttaggtattaacattaactactttactaactagttcaaagcaagtttgaactgaatttgaacttgtttttgttaaattttgattctaggtatatagcatccaaatatataattagttaggtatgtaatcatggattgtgaaataaagttaaatttgagttgttttgttgataggtataggtatgaatcgaattcttataactagctatatactcataatttgaaaattttgaaaaatatgagtgattttgtgtgtttgatatcatggtgcccgggcaccatggtgccccatatgagtgtatatatatatatatatatatatatatatatatatatatatatatatatatatatatatatatatatatatatatatatggtgtttgaatctcctgaagatgaagataaaaatgaagatgaagataaagattaagtgtttcatgcaaaacgaggtggtaataacatgtgattaattgagttttaattattataaacttaaacaatgaattaatttaatattttagaacaactttcatatagaaagttttcacacgaaacacatcgtttagcagtttgaaaagcgtgccacaaatatccaaaactttatccactctttgtagtggaaatgaacgggtatgatatcttgatagtgtttaaaggggacagaattaaacacatatttagattacactcggctacatatcacttatagtctgttacaatgacattcagttacagtaaaaaaaaaaatcaggttttacaaattagcttgtctctagatttccgatttttaacatgtttatcccctttttattatttcattccaaacaggctagctatatccattaattggttgaaaattctataagattagcttcaaatttgggaaagatcaataggtaataggtagtcccaaaaaatatctttcacaatgcatgctccctccgttttatattatttttcactgatcaccaatccataagtcccgcggttattactattgacaattaattaaaagagaacttttatgttttcatagctctgaaattcgtaattaataaatatcgagttttctcggtttgaacccttggttgtagccttttcctgtaacgaggaactatagtcattccccttgtacttttggctggttcgaaccattttagatttgggctgtgttcggatgggcaagttcccaatctaaaatatctctttttcatgctcatgtttctaagctgttaaacgatgtgtctttttaaatttctatataaaagttactttaaaatcatattaatctattttttaagtttttattagataatatttaattaatcatatgctaatgagtcactccatttcctctgcgggagagtaatggtgtcgtctgagctagctagtttacacgtgactcatatcttcgctcttctcattataactcaagtgaacattagagcaggtacaatagtatactataagtcagctataaacacatattgagaagataaaagaggatagagaagagcagcgtcccaaaaaaaagacaaaccttaggtttccgtgtctaacatttgaccgtccgtcttatttgaaaaaattatgaaaaaaattaaaaatacaagtcatgcataaagtattaatcatgttttatcatctaacaacaataaaaatactaattataaaaaaatttcatataagacggacggtcaaatattggacatggaaacctagagtttgtctttttttagacggagggagtagccagctgcaacatggacttcaagacacagtgtatgtatgacaggtgggaccatatattaatagtgtagtatatgtttaaaaataactattgtataaattggctattaaatcgactatatatgatttagagctaatagttggttatattattaaacttgctcttagtattttttctatatggtatatcaataaattatatgggctctaccctaaggtgagtcaatgggtctaggatagctctaacttatcttcatgataacgtattgtcatacaaatatatattctcaaaaaccaacaatattgtattttgccgctatatttttactatgacatatgaatgtgtacaaaatataacactatattcttgacaaaatcaaacctatcattcgcatgaataaccaaaacaaaaaatacattattattttgatgaaaattgaaacgagcagcaaggttttcggggcatcaatcactcactattgtgaccagagaggtagtactctcttcttccatactacaactggcaactttttttttttgagatccttgttatcacaaaaacaacctaacaccttgtttaaaacatgggaaatcttttccgattaaatcatgcaattaattgatctctacgaaaatcctaccagtactttgtacttccctgtgcttaaatacacatgttttcttagaccactttgaatgagagtttcatttccattaaataaggtgtcatatcaatattttctatgatgtggaaatgaattaataacgtgggagataaaatgagtttcatctagataaaattatatctatactgtttccaatacaacttgtctcttgtatgtattgcctataatgcttgtaaaaacagcaaaactgaaacaacgtatttaaagagttattttaataatcaattaaggctatgttcgttgtgggcggttggaaacaaatattacagagccgtctattagcgtgtgattaattaagtattagtctattagctattttttaaaaaaaatagataaatatgattttttaaggaattttcatgtagaaactttttttaaaaaaaacacaccgtttaaccgtttaaaaagcgtgtgtgcggaatactagggagaggggttaggaacaccctgcatcgaacaggctgtgtgatacatttgagaacataagaataatatcgaaacgtatagtggagagggaagggaaacaaaacaatcgtacgtcgctcaaattcctcgcgttgacgaattctggaatcaaaacacacgcttgcatgatcgacgaaaattagattaaaactaatcgaaccatctcatcacgtttcttcccttttgttgactcggaaattagtgacagtggtccaaaacgtcaacgacgtaggagaacacctgtgcttcgaagaaaaaacgggagaagaagagacgccaatcgcgatcggtggttagctggcgtgtggcgtgtgctttgaagcggtaagcacaggggatcgatcggattaatggactctgttggccacccaagaaattggcctgcagacgtgtgcggtgtgccaaccaaccacccaagaaaaggtcataggctctcatagcgcacatgctcgctgggctgctgcttctgcacctgcctcttttatactagtttttttttctttactttttccaacatgtcgctgtactactactatgttaaccacgccaatttgttaaccaattataaccacaccgctcccgacgagaaaaaaaacatgacgttttggacacggatacggtattcacgtaattctgattaaataggtaaagtatttaaaatccaaaaataaattcataattattacaataatttttgagattgatctgcttatatgatctttaggtatccaatctaaaaatcttcaaatacattctttttttaaaaaaaagttaaatgatacgaacaacaagtcaataacgacatgttttctcttagattaagggtttgtttggtggagcttctagctctttcaaaaaagtacagctattttacatattctaagaagctatgtagttagaaaatgaaatagaagtgagaaggcaggaaacccagctttcccatattttcagaaaccggctaccgaccagcatttctcagaattttaagctctctaaataggctctagatatcagtacacccaatataagcacaatataaccattctaactcttcccatgcatcattcaattaagggtatgtagttttggtcaaaaaaaataatttaagagtacggtgtataaaatttgcaaaaaaaaagaggttgttttgacctctgcaatacatgaaaaatgttgaaacatgtgctctggaacatggactaaactagagggagagtatgcaaatttgaccaggaatgcgcagaaattcaaagatcgtttcctactactacatgtttaatcagaaagcagagaaaaggtgtactaacaacatataaaagccagtacacatgacaacagtctttccagtcttttgagtaataattattaattacatactatgcatagaaatggagacagttgtacttgtacatcaacaaaaatggataaatctaccattatttttcagaacactgtatatgctctagtggaggaaataatcacttaaatcagtgaaagaactctttgggtttgggccaaagaaatctcaaacagagacgaacttaaatcatggaaaacaacaatttagtcagtacttaattttttttctccctttgtgatattctcctcctctaaaccgggcagataaatcttcagagcccgagccatgtcgccggctcatctttcaccggcgcgacggcgaagcttttctccggcgccggcgacgccaccgccgccttcttgtatggttcgctcgttgtcgtgatcctgcaaattgatatgcacgcatgttaaaatccaatgatttaagaaattactaggggttaaattaacagacaagataataaaaattcagtcagaaaactgctctgctctacttgggagaaagatttagttatggattcgtcgaatttttgtttgaattctaaatattcggaacgaatttgatgtttgtagtgatgttctcacctgtgcttcctcttctggaggaaacgctgcagcgacgccttcctcgcgatcggcatctccgggagcgcggcggcgtgcgccggctgcggcggcgagcacgcggagccggccagcctcatgagctccgcggccttctcgaccgggacgtcgtcgaccacgaccatcctcccgtcgtagaagatggtcagcggggccgtccccgccgacggcgtcgcgacgccgtcggcggcggcggcgcgcggggggaagagctgcatagtccgcgcgtcctcctcctcctcctcctccgccaccgcctcaagaaccgtcaccggcggctgcggctgctggcgctcccgcatgtactggctgaggaggccgcacgtgacggcgaacctgctgctgctgccggcggcggccatggcgtccacctccaccacctcgcgttcgtctcgtttctttctttctcacgttgtctccgcgaagctgcgctgtg

SEQ ID NO: 18195 - DNA, 7195 bp, Oryza sativa
agtgcagtaggttattttctgaaatgtttcagatcttgtagaaacaagttatgcttgtttgtgtgtatatagagtatgtagatcgatctccattgctgctgctttctctggaataaggattatgctgtgtttaggtaggattaggaggagacaaagaggggcgtgatgctgatctagctggtcagctcctggcttccaattgataaagagatcatgtaatatattctgcttggatgatcgttcagcttaatgttagttccaacttccaagttgatcagattcctggtgtcgtgtcgaaccaagctgctgggagttcgtttgcctgtcaatttgttgcttgataagaaattctctgaaagttaattaaagagttgcttcataggaattgaagtttctttttctaggtaagaaagatcagaagagttgataattaagaacttgagatggatggattccgtccgaatcagagctgcttgtcctggattgtgattggttgatttctggtgacaaggaatcctcgtggaattgggttcaaataccatggttgaattccaaaaatttccaaacagcatttgaacagctaccgccttatctcaattcatcgattttgagcgtaattcagagaacaagtggtgttactgaaaattagcttggactcaaaattcgattggttttgctgagctcaacaaggtttaagcaaatactaataacaatctacgccaactgtggcaaacgagtccttagctatgcttgtctcatcgacaagcattgggcgctttctagagaaaacttggaagattcgatcccggacaatgatgaactgaagctgtgatacggaagagtgagatgataattaaggcctcgaggtcatttgcatttcaagagtaaattacatctatggcacatgatcatggtacgccatagctgtataaatagatacaacaaaatttacaaattgtatgattcgatataagttagtccatgcaaatccgagccaaaacaattcatatacgatctgatgtggcgcgcactggtgaccctttcacctgtgagttggaacacacactattagctgttcgtagttttgcagaaaaccccaggacatgtaaatttttccatcaaagtccctgcgtctttgagtgctgtaggacccgaggtagtcagggtcaggagttgaggtggatggtgaccggtgagattgaactttggagctgaaagttcacttcaaagccaacaaagaaggaggcagcgaccacgataagcaaatttcacaaaaccctagatttctgggcttctgtgatgcgaggttttgttattcgtttcatgaaaccccaggttttggaacaaagtgtttcataaaacatcagctacaagcttatattgtctatccggctaatatatttatatctataataaatgtaaaaagatgcatgagatatttttaagtacatatacatgttagctgcttttgaataatcgtttatcatcatggtatgatcctttatgtgtatatttaaccaattatatgttattatcagttagaattatgttaagtttttgtgcattaaaaatttgagaaaaaaataaactatatgagatgaatgtgtactttgagttaactaatatgaatttacgaaaaaaataatcatatgcaataatgaaatgtgagtattttacacaatacgaggtttattgaaacattttaccccaaaactgcttgaaataaaacacaataactagggttttgtgttatggatgcgtcaaaacctgaggttttgtgaaatttactcttttttttatatagagatggattttcatctccagaaagaatatctcatcatttcttgcatgccacctaaacaattgtgaaaaaaaattgttaacatagattactacgaaatatatcatttcacaaacatgcaatgcaaattcaacttttacaagttgcaataaaaaaataagctgaaaatagtttaacttacgttcacagttatatttgttacgacttgtagaagttgaatttgaacttacatgtttgtgaaaagatatgtttcatattaatctatcttatcaacttttttcatattttttataaatatttaggtggcatgaaagaaacgaggagatatcccctcgagagataaaaacactattttgttttctttttgcatgtattatgttagctagggtttatatagactagtcaagttgttgtaccaaaacgaataatttgcaagttattcgagctatctgtatccactatgcaagttcctatgacaggcataatttactcatattttaattagtttgtgctgttgattaatcagtatgttatattttaatggtgtcgtctatctatacacatactacttccgtcttaaaaatataagaacctagtattagataagacacatcctaatactacaaatttagacataccatttgtcgagatttatggtattaggatatgtctcattcatcagtattaggttattatagtttgagatgaagagagtattaattaggcactttcaaaaattctcacgttagcaataaggatccatagatagatctagtcatgggtcacctaggccatgatcctggaccaaaaaaggattaaagcccactatgttcctcgatctttttttattaagatgtagattttatattggttttcgttagcattttttaaaatgtattttgtaaaaaagtttctacatataagttgcgctaaaatatcaaataaatttattttttaaatttatagtaattaaaacttaactaatcatgtgttaatagcttttttttttagtaataaggatccatgatggatctagtcatgggccacctaggccatgatcctggagcaaacaaggattgaagtccactatgttcctcgatcttttttaattaagatgcagattttatcttgattttttgttagtatgttttttaaaccgttaaacaatgtatttttacgaaaagtttctatatagaaattgctctaaaatatcaaataaatatatttttcaaatttataataattaaaacttaactaaccacgcattaataactctttttttttccgcgcccttacttaatatccatcttcattagtttcatacaccatcatttaaatgggatctcatgacttgggcctagcctggatttgtctctgaagtgacctagcttctttgtgtgatcccattatcatagctggaccatattatcaaataaaacatgaaattttaaatattgtggactctttagttttatccttttcaaaatattctaattttcaaattctaaattaataattaacaagttataactaagataaaagccactctagtttatttgaaaataaccaatacaacatatggttaagattttaatattcttaatatcggtagaaatagtccgtgcaagacatagattgacgactagtttatctattttttattgatctcacaagacagtagctccggccatcatcactgaggtggtgtttggatcgagagactaaactttagtccctgtcatatcggatgtttggacactaatttggagtattaaacatagactacaaaattaattgcataaataagagctaattcgcaagacaaattttttaagcctaattaatctataattagcacattttttactgtagcattacataggctaatcatgaatgaattaggctcaataaattcatgttgcgaattagtctagtgttatgaaataggttttatcattaatctacgtttagtacttctaattagtgtcccaacatccgatgtgatagggactcaaatttaatcctagatctaaagaggccctgatattcaatggatgcaatcatataaaaattctgcttctgctcattcaatttataatttaatagaagaagaagaagaaggagaagaagaagaagaagaagaagaaggagaagggacaaattcataggacaacatgcttaacagtacaatcgtttaattaactaattaacggtctaacgctaagccataagctatataattttgctttatgtggttcattggttttggtacgttttatggttaaccaacctagcttagctatctatgtacgtagctactccactagctaatttggccggccttatctgtaaactgtaatttaactctctctaataaccaaattaagccaccaacaatcaccaataccgcttgcttgataggagtatttgggcagcggccgtcgcggtttcgcctttcgctcgctcgcatagagttgcgtgtgcgtcgctgcatctctgcatgcttgactttgacttccgccgccacacccacaacacgacattacatacgtgcatgggagttaatattttttagtatgatcgaatgatatattcatatatatataaatctagcaaatgttattgttattttttctgtctactttgggtgagatcgaccactggcgtttagtgacagtaggggagtgaccgagtgagcatctagaggaaaagaaaaactactcaattcccccttctaaaatataaatatttctagttatgaatagttaaaagttgttatattttaggatgaaggtagtatgcacgatagctagctaggtggggattaattttagatggtttttggacaaactttcaagagccccatctagagtaggtataaaaaattgaataaagaaaatgattccctggtcgggttgatgtaacatggaacttgtcaattaatggtatacagtggtcaccaatatgttagtagatattactatctccgtttttaaatatataacgccattgattttttttaaaacgtttcatcattcttcttatttaaattttttgtgcaaatataaaaaatttatgtcatgtctaaggaacattcgacgataaatcaagtcgcaataaaataagtaataattatataatatttttgaataatatgaatagtcaacgtatttaaaaaggtcaacgtgtcatatattaaaaaacggagggagtacaaagttatctcgactgaaaatatgggttcttaaactctacgaacaacataagtactaaacatgcttttaaaagtcaaaatagaacttatagttatatatagtatgtgtgtttacggtagaaatagaatccaaattaatcttaatcctctgttaaatagatagagatgcaccacctgacataacaaggtagcaaacttttaatatttttgcactgcctttgcttgttggcgttcctactgctttcttgggttgcgtgctaattatattggctggagaggggtacacatttttaaaagagtagatgcaagtcagaatgtggattagctcaaatattctcccctaacaacatagtttaaataagaaataacccccactcatattgatgactcactactgatgcagacttgcttacgatgatcacgaagcagatggaacgaccaaacccttactcgaaaaataatgcattttcacttatggtttattcaagggataagtccattttacaccctccaactctttgttttgtctaaaatacacccaaaactctaaaaccggatatttcaaaccctccaactttcaataccattcactttacaccctcaagtggtttttcagctggttttcacctgatgtggaggtccattcagcaaaaaaataaaaaagtataaattagacccacatgtcagtgcatagccacctcttcttcttcccccatctcttcttccctttctctctctatccttcttcatcccagaccaggagagcagtgacggtggcattcttgagcgccgacggagctcaagcatatccccagccttcccttccgcgccgaccaccggcgagcacgagctcaaggttcgcctctcctgccacctccaagagctccgtcttcaccatgaaatcgagctcgccggcggagcttgagctacttggggacgtagagttcggtggaggcgacagagcttggggacgaggaacgcaagcttgactaggcggcaacggatgcggagcttgagctcgatctcgtccttgaccaagcggtggcggcgctcgatcttgttcttgagagaaggggaaggttggctgcggccacgaggccatgctcgggagaagagggaggttggtggcgacctcgatgcggagcccgccttcttggccgaggtcggagaagagggggttggctacaagctcagaaaagagaggtcgccggcaagctccggcgagggttgatggatgcggatccaccccctcccctcccccttgctgcggtcgaagaagacaggtgccagcagcgcggcctcgagtccacgacgagcttgatggaggagccgacgctgctaggcctccaccaccacgagtttgtcgtcgcccgcgctgtgtctgccatgagcttgcttggagccgcccgcgctgtctccgcctccaactcgagcttgttgggcggtgttaccgccggcggccacggaagggcgtggagctccgagcggcgaggagggggcgctccacagatggagctcactggccacttcggctgctccaggaatggaggggagagtgaggtagaggggaaggaagaagaagagtggaatggaactgacaagtgggaccctcctctttgctgatgtgtatttttttagatgtggcatctgacgtggcatctagttgtaccaaaaccagcctaaaaccgctaaagggtgtaaaatgtccggttttgatagtttgagggtgtcagatatccggttttatagttcgagggcatgatttagacaaagcaaagagttgagggggcgtaaaatggacttatccctttattcaatagctctcttgtgataaacctaattacaaactttttttttgcaaccgtttataataagtttatcctccaggaaagttcactgtacttgagatgtggacctctcgatccccataaatatatacttgagatccctatgaatgcatacttgagattgacgaggtcattatagacacctcgcagtcgatgagtatatcgcttgcactgaaaagaataattagttgtaaatacaagcaatcgtgtcatgtttaagatcactactacagatgtaattatcctggacagcggctcactttggttccaggctggccataagtggctccgcctgcaaccaggcgaatgccggggttgggcagtgggccgcac

SEQ ID NO: 18196 - DNA, 8350 bp, Oryza sativa
cggcccacagtaggcgaccgcttgcgatggtcggggggcatataagcccatagcccgaccggggccatgcatggccggcgttttttctctcctaaacatccacaaattaggggggaaggtttttgacctcaaatctttgattgggttccatataaaaggtgtagagctcgttctccttctttatttgcttctatttttgtcagttttcatcggtggaatacgaagaaacttgcagttttataaatgaaatagtgtaggcacctttttgttttttttatttttttagcaaatacatattgcaatcttttacatgtttttaaaagtaattagcacctacattgaaacgttgggtttgcctctattaagtttattttcatttggatgaaaggacgaatattttcattttttagaaatggatagacagtattctattaatgcttaaaattgctgtggggctgtttaaatagtccgaacaactcgtgtagatagattccactacaagcagtataaccagttgaggtacactcacttagcctctcgaagagttctgtttgcatacattttcaaattaggaacaaaattagctcttcaatttaggtcttccttttaacgtcagaattacatagaaattaacttcacaacgataaagctaatttccagtggaaaatgcgctcattcttgacagaagtgacatttatgcaataaaaaatgcaccgcaattcacctctacccacgtctcatctactcgttcaaatgatttttttttctcacgtggcaccatataatacatgtatgtaaaccaaaccttttaattaaaaaacccgagataaaaatatgtcaattttcaaaatagtgacctagctagctcctaggtagcaactaaacttgaacgaatttgtaccccaaaatataaataaaaaatgccatcttttaattttcattcaaagaaaattatatctccgtcccattataagtgtagttacgatttttcatatctaacatttgaccatccgttttatttgaaaaaaattatgattagtatttttatagttattagatgataaaatatgaataatattttatgtgtgattattttttgtagttttatcataaaatttttaaataaaactgaccatcaaacgttggacacggaaacttacaactgcacttataatgggttggagatagtatagtacagtagtacataaatttgtcaacttgtgatgatcaagtacgtacactcccgccaaagtttaacgtactacctttcttcctcctttataaatataaacccccatcgtcttctccgatgtctcaaacccaatcaaactccaaccaaactcacctacctacccccaacccatccagagctagagctatgtgcggcggcgcgatcctcgccgacctcataccgtcgccgcgctccggcggccacaccaaaaagaacaagcggcggcggatcagcgacgacgaggacttcgaggccgccttcgaggagttcgacgccggcgacgacgactccgactccgactccgagtccgaggaggtagacgagtacgacgtcgtcgtcgacgacgacgacagcgaggacggcgtggtggttcttccgccgccgccgccgccgccgccggtgattccacatggtgaggcgatcgatcgatcaagaattggtttgcatcagctgcagaatttagcgtggactgagaggagtttcttgttgtgtttgtcttgtcttgaatcttgcagagcgccatggcgcgaggcggttccgcggcgtgaggaagcggccgtgggggaagtgggcggcggagatccgcgaccccgtgcgcggcgtgcgcgtctggctcggtaccttccccaccgccgagtccgccgcgcgcgcctacgacgccgccgcccgccgcctccgcggcgccaaggccaagcccaacttcccctccgcgccgccgccctcggctgctgctcaccgccgcaagaagcgccgcgcccacgccgccacgcgctcgccgtcgtctccgcccgccaccagcgaggtcacggcggcgtccgcgtccgcgtccagcgatgtccccgcgccggcgttcgcttccttcgtcggcgagcccgggcacggcggcgccaagtcgatgccgacgacgagccacacctcgcagccagccccgccggcgacggtggcgtccgagaacgtcgacgacccggaggtgttcgacccgtacgacgtccacggcggcctcgcctcctacttcgccggcggcgcgtacgagtccctggagagcctgttcgcgcacggcggcgacagcgccgccgtcgaccaagcggcgagcgaccactggccggcggcgctatggagcttcgcagacgacggctcgttctgcttctgatgctgtcaaatcacatcgccattggcggccattgcaagccatggcatggcacctgatgatgctgatccagtgaactggtcactcgttcttgatgcgttttcagtttcttgtacagtgtttttccccagcaacagtgaagtagtattcagttattcactgttcagtcatgagttcatcgcaaaatatgatgtaagtatgtgtcttgagattgttttagcagtggcttttgtttgtataatgtatttctctgtaattaattaatagctgttttcagtgataaactaaattttctgaaatggaaaaaatgaacatgacctattcgatccaagatcgcaaatccgcaacaggcgaggatgatatatacagcagagtataggttcagttttcgaaatagctctgagaggaaaaatattcaagattactgaacaatccatcatccatggcaaatacaacccacttaattatctgcatgatgaaaaatagactattgtcatttctgctacagtacttaacttcccttttagcccaaaaatcgaccaaccaaatcatgttatggtctttctcatgcatggaaatttttaatttcttttcaatagttaagaagagcaagacagaggttacgccaaacattttaatagtgaaaaaataacctcactaatacctcaatggaacgtgctatcagcattgtcttagaaactacattaaaattagagggaaaaacaaattcgggcattgccacggctatatacattataacataggaaggattaactaattggaacatgcacaaatgggtgtttgagatcctatcctttcttctatgtgacgattggtgaggtgttgtttatcatttccttccaactcgtcgcatcaaaagctatgctcaattagctgattagtctaagtccaaggaaggatacttgcatgatgggttttcggtttagtttaggttaggcaacagcaataccagcttccatgatacaagggcacggcactggttttgattatattagacccaaggctaaaagccacaacaatatataatgcattaacttttcttgaagagaatgaactattgttagtttattatatattgatgtaggaattatttatcatgtttggatttggtctgtctaatcacaagattagaagtacaagattagaagtacaggatttctccaacattgacaaaaacagaaccttcaaaccaaccaaatgttttgccaccttcaggctataagcaaagagcttgcgagcctctcttgctatttttcatcaaaatggatatctaaatacaaatttgagaaagcagaatccagaactcgacatcgtgaacagaccttccatgatgggggcctgcaacctgttacataggcgtcccctttgaagggtcggaataaaccccaacacagaagcaccaatacaaacactcaccataggcctctagggtggggccgtcaccgatgacacccatcgataatggggataggttgatgcctggcaaaaattatggttaaagcccatctccgatgattacggttattgatggtctccatttattggccgttgccgatattacacactataaatatcccaatcccttcttgtagtggttatcccgaccaaatgtattgttcacatttgtgtggtgggagggctaggtgggcgaatttttccatttttaaaaaaaaaattagaaaatttagaaaaaggctatctaggtaggggtggattttgagctggcttggcccggctcagctcggtctggctgattgggataacgagctggctcggcttgttatcctaacgagctaaagtcctggcttagctcggcttgtttgaaagctcaagctagctcgtttggctcgtgagctagagcgcacaagcagaacaagcaacgaggtggacgacaagcgaaccgatgaagcgagcaggagaaccgcgtggctagtagcatggtagtgctcgctggacctggtcatagcagcaggctccgcgacaccagagcgggaactcatcggagcactggtaccgcgtcagcaccggagctccaagcttgtcgtcaatccgcacctcgcctctcgagctcctggataagatggagaaggatggcaggcagcaacggcacacgcggaacgccccacgaaaaggaggagaatgggggcggggcggatggcggcgcaggatgcaagctgtggcacgcgcacgtgcaataggttaaagcatgcatcggctggagatccgatattgttaaatccaaatgattagataatcagtaaaacatttgttgcaatcggctagaaccaacttatatgtaatccttataagccgatgcaacgtccagataactcataggctgaaaccctgatgaaacccttattggcaatcaaaggcaagttagcttttatgattctaaacacgacttagtaggtcaaaactaattgatgcaacactaaatgtgaaaagaagcataaagtctaaacaatcaagcctttgattgatttttagggtggtggacacattatattatctaagccaacaaagtaatctagccaatatcgacaaaaccctagatagagatcggtcgatgcaagtagaaaacactatcaatctagattatataatgtatatgataactcgatgtcatacatggacaagattagagtgtcgaagcgatggaagcactaatcccgacaatgcaagcagccataacaagccttacccctcgtcggagatcgaagctaattaatgcaaccccaacttaaaacaagaactagctcatcgagaaagacgaaaacaaaaagggtggtgatttatacccatggatagatactagttcttattggacaagacataaactttcctaaagataaagtaaaagatacaagtcctgattgaactctaaacacacttccctaaaaataaaaggaaactacccgactatgcctaattaatagataattcccaagttgtgtcttccttgaacttggtctcttctagataaacttcatttaattgattaatttccttaatcgaatccatcaagaatccaactattggcagctgacaatttccatcagcaaattccaagactctgaagtcgatactgactctaggccgatgatgacttcggggcttaccaaattttggcgttaacatatacatatatacagttgctacaatttaaataatttgatctattctttgatatgcaacaacaatttatatttctccgttgatttttggaaggcagttataaggggggttttatgattcgataaatattaatgaccatatttgtttcgcttcactgttgtcctttatctgtatttgataatatttctttttgttttcatgccatggatattcgtttttgtttctgaatccgaaatgaatatgaaaagaattgtggacaattagtttccttcggtatctaagccatttttcatctctactcgagtgcggtggagctcatcagtggatctaggttgcggacaggggtgggagcagaagtatttgcagtggttctaggcatgtcggctacccaagatggaggagaggtagagtgagaggagaaagataaagagcaccgggggggggggggacaaaaaaaaggtatttcgcatgctgttgtggaaaaagtgggttgcccccctcaactatgtggtaaactggcatttttacgaagtcctctactttgtgcaactagagaaactgcacggatgaagaaaaaaaagcctaaaccatttttatgtcctgcttgaatccaaccaattaacatgaaaaaacaccaaataacaatatagagaagaagcaatgatgagatattgagactttatagaacacgtgttcgagaaaagagactgtatagaacaaaaacaacgtttttttgggctgtaattacagaggagacaattacatcatgaacaaatactccttttaacattccatctttatctatgtggtcaactaagctaagagtttacacaaattgaatgtcacaaggatatgtttcttcatatatactgaatgcacatcaactgacccgagaagattggcatctttcactaaccccatcatcagatccacttataataccagaactgaattgaacttgaatggactgtgaatgtgctccttgttaagattctcctatagtaatcccaaatcatgtctattttacatagatgccaggataaatgtttttatgatattccttgcagagcatcctatgaactgttgcctagaccagtataatttcacactagccacacttcttttgcaggtatcactacaatgttgcagatggtacgttggcacagcatattacagaaggaaatgaagatggattgttcattagttcagtagcttcttgttcgaatctgtgggctttaataatggatgctggcactggctttacttctcaagtatatgaactttctcaacatttttttcacaagctgagtaattatagtagtcctttttgtttcctccatgctaccggtttcatatccttcacgcaacgtggttagatatgttgcagatttttgagattgttggatggttgtacagcagtggagtttcttctattacctgatagagataaacaattaaacttagaatagtggtagatatatattaaaatgcaaataaactataacatagtggggtttatatttaaaggtgtcaaccaagtaactattacatagcctgatcagttgttgtaacagacggtataactttgatattgtaagctcacccatgatctagtttggtcactattttactaattaacaaatattagtgtttatcatagtataaacaggtcaagacctaggattcaatgccacaactaacagttaggataatatcaaatctatcaatttcatgttggtcttcattaggactcacttgcctttggcgggtgctagccaagccaaaacctccaaattggaggctttcccagttggggttggaaatgtcccaagaatttgaaatagaatgcaaacatcaacaacttctctattcattcaaaaaaaattgtttcgttcaaaacgtcttattgcttttgtcagggatatgatattttagtaggtatataactaaaagccacttacatgtttggagaattctgcttttcactgtccatgtaagcattgctcacaaaatgttggatgttccgggtcagcttattcattgcactccactgccctttttgcttccaaaactcctaatgcatcaagaaacattagtcacttaggcgaattgcatggagttggaattctgaagaaaatgtgtgcactgtttattgtcttgcaagttgtataattctgaactgccatttgcagcaactaaatttcaagatctaagtactaatgcaggaggtgcccacaagtaagaagaaaataaattattgaactgcccaacgagctcttttcaatattcaaactggcttgacaatttaagtgtaacataaaccttgttttgagcagcagagccagtaaactgaagagccaatgcatcccccatttcctcatagaacagcatcaaggtgcttgacaagggctcttctatatgaatctccaaacccttagtctgcaccaatgccttcagctggcgccccaagccgactagtccatccacaatttgggctctgtttgtgcggtctcggctgtctatgcagttagtcttgagcactcccttttgcagcacaattggcagtatctctattatcccaaatttgggttcattcatgctagtactgctacttgcactggtaacatcgttttgttccctgtaatacatgtcgaaagtagaataagaaaaagaaaacaatactattcaaggtggtatcagtatgcaaaggtgcacaatctaaacatgtagtaatgataaatctagagttctgtatatgccatgttacactacagtacattgctagtgtgtatattgctctgaaatttacctta

SEQ ID NO: 18197 - DNA, 6695 bp, Oryza sativa
ccttctggggatattgtaacttcaacggggcttatcttatgatctctaacgtcgagaaggtatatgtcccaataccctcagaatatggtctgcgggtatcccctgtctaggcttatctttgatgccgaatttcgacaccgtcaaactttcgctccagcttcctgacatcggtgaggtatttggctaactcggggttggagcatttgtagtccttgtgcacttgattggcgaccaactctgagtcccctttcacaattaatcgctttactccgagtgctacggcggctcgtaacccggatggtagcccttcgtactttgcaatgttattggttgctcgaaaattgaggtgtattgcatgtctgaaccgatctccagttagagatgttagaataaatcctgcccctgctctttggctgttgagtgctctatcgaaggtcatttttccatgtctcgttatctgtttgatcagctatactgttatcaggaatagtccagtcggtaacaaaatctgcgagaacctggaacttgatagctgttctcagaacgaagtggacattaaattggctaagcttgatgacccacttggcaatgcgtcctacaacatctttgttcctgaccacctcgcatagggggaaagaagagatgaccgtgactttgtgggcctagaagtagtgaagcggtttccatgatgtcataatcacagcgtagagcagcttctgtatttggggatattgggttttggcgtcgtggaggacctcgctgacatagtatatggggtgttgtactttgtccctctcgacaactatgacggtactaacagaataaggtgtggcggcaatataaaggaatagctcttccactggttgacggacaaccagtacagggggttggacaagtaccgtttgagcgcgataaacgcgttctcgacatcctgcgtccactcaaatttgtcctactttttaaggaaagcgaagaaagacggttctcgttctcccatactggcaacgaatcaacttagtgttgctatgcattttgtcaacttctaaacttctttgagttttgtggatgacttcatgttctcgatggccttgaccttctcaaggtttgcttcaattcctcgtccggagacaagaaaaccaagtaacttccccgatggtactccgaaagtatacttccctgggttcagcttcagtaaccctgacagtattgcatagttgcatggcctatggggcagagcctagctatgggacacacaacctctcctatgactccatgttgttcttcaacatgtgtaccacatagaaagtttgctatgcacctcttgttcatcaatctcaaaacggttttttttatttgtgtcgccacaaaatctcgttgattacagtcgagttttcagccctttgattttgctttagattagtgctgaatattatgtttgtgtatgcgtggttcgcgatccgcgctggctacctgcaatctatcatcgatgtattagtgatcgagagtagattatcgctcaaacatcgaatgagtgagagaaagaaactcaccctaaaactaacactacagacctatatgtgcacatcttttctatcaggtaatgtgttaattaagtgtaattattagagatgactaacgaagttaattactaggggcgaatctaccgttggggctagttgggggcttggggcttaagccccagctccattcacattaatgcccaatgtatttctctactccagggttagttaattaggcaaatctcatcaaagaagggtatgaagtagaaagggcatggatgcagcgggaggattgagaagatcctgacgccgtcttgggcattgatatgtcctctagtcagctaacagtagtttgggtcaggtgagaaaacacacggccgatggcaacatactagagcctcgtagatttgttacattttcacagtgcagtttgttttctttcgttttaggtacaagtttgatgttttgattggtgatagactggtagatatgtttgtagtagtttttcataagccccaccttaattttcattagattcgccactgttaattacaccccacttacatctcatttacacatcacttacacatgtaattactatataatcttgggacttacaatgtaaatacatgttgactatgtttttagtgaaaaatataacgccataaatatagctacttccattccaaaatacggtactgcaaagaatatgtatcccctaacccttcactaagaggaacaaaaaaccataactcctgacccctcttcctccttttaagggactatttggtatggctctatcttctatatcccagtttcaaactccaattttagtgaaagctagcttatataggaggtgaagattgtttctaaagtgtttggctaacttggtcagcttccaaaagacctgaaagagaagatagagaggagatggataatcctaccttgtttttctgtttatttaatgtacgattaataattattatttttccttaataattggacgtgtcaatagttgtaaggaggaattaattcataccatccatcccaaatctaatgcccaactagccaaagtggaccccacaatccataggagaatgtatgcctcgtagcaaatactacgctagatatatttgtcccgcacattacatagttcacgaaaacaaaggaacattaggcatgcatactacaaaatactccctccttcctaaatgtttgacaccgttaacttttttaaacatatttgaccgttcgtcttattcaaaaacttttgtaatatgtgtaaaactatatgtatacataaaaatatatttaacaataaatcaaatgatagaaaaagaattaacaattacttaaatttttttgaataagacgaacagtcaaacatttttaaaaaagtcaacggcatcaaatattttgggatggaggtagtatgtgcgatggaatttaaagatgcattaagctcttctatatagctacatgaaaaaagtgggtgctttcttatgtcaatgaatttgaactggttagtactatccaccatatatgaatgtataaaacatgtcatggtgtaatgctaatgatatatattgtcaactagttggtttttgacaattatatttttctaaaaaaagcgattaatttacatttattaaagcaaatgtacacaaagcattttgagatggaatatactaataatcaaatgacatgtgtcgcataaacccttggaccatgtatcagtgagcgagtagtagcgtaggagtactgtgcatctgcgccgcagaaaatctcgatcggaggttgggttgggccgcctttggacacatcggatcgatcggttccaaaccaaagttccaccgtgaaccacgtccacgcacatcccttcccaattcccatggaccggccgcaccacaccacccccgtacaccgtacaccaatccgactcgtccgcccgcgtcggggccccacctgtcagtgacacgtcccccgcgcccaaaccgctcctctctctacataggtgacccgtacaccgagctcatcacctcttctctctctctctctctctctctctctctctaactcccccgacgagagctcgtcgtcggcggcggcggcggtggcggagagacgcgtagggggggaaccctcggtggcggcggcgggcggggtgggaggacgtgaggtgagccccctcggggcgcgcggagatggggatctcgttcaagctgtccaaggtgggcgtccgggtccaccccgccgcgcgggtggccgccccggcgccggcggcggtcgcggcggagaaggcggccgagaaggaggcgaagcgcgaggtgaggaggagggtttctggttgcttgctcgggtgggttttggtcgatacatggtcggtggaggcgttggggcgccggcgatctgggggctttttgtgggtggaagagttggggggtaaacaaaatttcgaaatttggttggtatctcgtggcgaatttgcgcccatttgggttgtgtgtgattgttgtcgtcgtcgtcgcggaaaggtcgggtttttccggcgatttttgactcgaaacctcgtgcttttggtcccgcgtagaggattttacactccaaattgtggttttttttctcctaccctgaatggattggtttgaaagtgaaattacgcgttagagattgtatctggagtgctctttggttgcgaattggtttaaatttttctcgagttcaaagcagtttgtgagaaaaaaatcgaaatattttcgtgtttcttcggaagcatttacacggaagcttgatctttagggttaatggatttagagggcaatagcatgtcagtgataaggactaaataatccttcttttttgtttactatttttctgtttcatcctagatcctaacattgttgaccatggatatttattggacttgtggtttattatgtagtttgggaggatttggtcttgaaaaaaatgcacaattaagcatgttaaaatcccttctcatttgaatacaaatatgatttcttcccagtttccacattggttagttgtcgtaggatcatataatccatctggtattctggtggatacatctagacctttgaggttaatcattttaagtaatgtgatgatgaaggctaagttctaggtgtgacaccaacacacttaccgttccattttcactgggcagtagacaattcaaaatttgatccctggtgtttccttagctcaacttggcttcctaaaaattaggaaggcctcagtttgtgatatatcttgtttgtttcgaattttgtccggctggagattatttttatggtttttgttttgttgcataattttagtatgcaactttcttgccttaagaatcatttttcctatctaccatgaaatgctgacatgtgctctttatgtaggatggtgttgttgaaagagctagtgatgccaatggcatcacgatttcaccagcatgctctaggataattttgccaggtattgtcaatcaaaaatgtttatccaaaatcattctgtttagctacatttgatactaaatggtcaacattgtgtgcagagcacgaggtttccttcactttcagtctgtatgatagaggctatctcattgcaaagtcagcagcggtgtgttccccaactataattttctgtagtgaattataaaattactatttcatcatatggaggttcaacagaaatatgttattttaatctaaattcctttttattcagatggatccttgccagccatcaatacaggatggaaaaacacttcatccctatgacaaggcgtctgaaaaattgttttctgtaagtatgttgtatttcttttgtagttctacatctggtagcctatgtcagatggtcttttctatttgatcaagattctttcaatggtgggttattggatggaacgctttgaggttgcatgtatgagatgtccatgaaatttaaccatgtgattttcaatgtatacgatacatcaatttgcctgcatatttactgattcaccagccttcgctgtcttattgttactgatgaaagaggagaatagattaatatcatgagtatttgtacataaatggcgtgggcagaaacaatttgaaagacaataacctttatttagttttcttgataatgcaacactttacttttctatctaatgcagacattaatctagtaattgttatcttatcgctttttccaacgatacacctatactgtatgtgatcatgcattttcattgaataatgcatgactgctttaagcatgattttgtgcataagctttgagtagcttcaacttgccaatccaagctctagcttagaagcttgcccaggcttggacaaatttcttgttgagtttataatcgatgtcattgagtaaacttgaaagctaagttttattcatccatttatactgcttcttggttcaataccatgtgtctttacagttatggatttcagtaaattaatctattcttctacctttcaaaccagaatgtattaatgtaagaacaaatcacatatcccaatataaacttgtgttagatgctgtgattatggatttttacgaacttttattttagctgattatcgtcatattaattggcaatttgtgtcagtgtttctcaacaatgggttcgtggacaaaataacagcaatgctacttgttttgttctaatggattgatcaattttctcctttttgcttgctaaaatcactggaaacagttatgccatgttgatcacgattaatgccaatacattttaataagccgttttgcttcatcacctgcaggcaattgaatctgggagactgcctgaagatatacttgatgagataccaagcaagtactacaatggatcagtcatctgtgaggttggttattttatcagacttgaggcatgatatgtaattaatgtatgtaaggcaaaggattgttgaaaaatcttatcacaagccttatactgatttattttgctttatgttctatattcccagttacagctagtatatattttcctatatgatagagataataaattttgtctagaagattgcatacccttttcacaggccaatttaccatagaagttatgtatctaatggcaattactaaaacaactattctgtaataattaagtggtccttatgctacataatg

SEQ ID NO: 18198 - DNA, 1449 bp, Oryza sativa
tattttgtgtcgaacataataccctatatgttttatcaaacttaaagaagtttgtctaaaaaaaattaaacacttataatatgaaacataatgagtatatctctatatgatgaaaaacattatatatatatatatatatatatatatatatatatatatatatatatatattgtcggtgacataggatcgagggtatcatgactagagaattgggcagccgcggtcacccacgtggcccgacccccccgagggtgacgtggccacccctccctctgtctccccgaggggtcgggccgctcccgttttggccccgagggctggggtgccccgaccccttgtgattttggcaccacgtgtatgggttaggtgagcacaagcggggctcacctaaccgcatttatcgcgggttggacgagcgcgccacgccacatttaatgcagcatagcgcatgcttatccggtccgtgatcggtcgcagtgtgtgaccggtcacagaccggtcagatcgcgggttagggggcaacaggcggactgacacacgcctcgccccgtcccgtcggaatgatgagagcctgcacgcactcatgactagccggagccggcgtgggaactcctaaagttggcacgtcagccccggccagatacattccaggcttcatcgtaaccattgcaaggaagtcattgtatgaataagggcagacgtgtagcatgctaaactgacacgtggtggacaagaatgaccggtctgtgactggtctgacgccggtcgcgtcatcggcagacaaccgtgctcccacgatgcatctgcctccggtggagtggaggtaggtatgacccatctcgtcggatggtcatttggatagcagccatggcaaatctccgcccattaatgagggagtaacagggagatccccggtgtcaggcgagtgatgacgctgggcctcactcaaagataagctgtgatttagcttccaggcgaaggcgcaagccagttttttcttttttgggaagatagggtgagtccccacccaaaagaagagtaagtagaagtggtgcatgtgggatccccttgagatataaaaggaggaccttgcccaccgaagggagcgggggaaaaagggaagagaaaggactctagaggggttctggagcctgaactctcttgctctccggctttctgtaactccttcacacacagatccaccagaacacaggagtagggtattacgcttctcagcggcccgaacctgtctacatcgcccgtgtctcgtgcacttgctctctcgcgaacattccccagatcgatcgaggacgaagaacctcacttagcgcccccggccgaaccggcaaaggggggcctacgcggtctcccggtgaggagtcccacgctccttcatatatatatatatatatatatatatatatatagagagagagagagtactttta

SEQ ID NO: 18199 - DNA, 4101 bp, Oryza sativa
attacgcgttctattcatagtcaaatttgttatttttgtttctacttgtataagttgaatttgaatttacaagtttgtgaagtgacatatcacatattgatctatcttactaaatttttttgtgactttttaagtgacatgcaaaaataagtggatatccccttaaggaatgaattgagttttcccatatactataagagtattttcttagtaacatgcgcattaatttgttcaccatacgtattagcgattccgtttcttttctcggttactttcaggttttatacaaaatgtacatctcattaaccatacataggtggtgtttgaatctcctaaaaataaagatgaagataaaaattaagtgtttcacgtgaaacgaggtggtaataacgtgtgattaattgagttttaattattacaaacttaaaaaatagattaatctaacattttagagcaactttcatataaaaagtttttgcacgaaacgcaccgtttagcagtttaaaaagcgtgccacgagtatttaaaatttcatcttcgtcttgttggagaaacggacaagacctatgatataagtactcttgagaaatctaggttgcaactaacattaatgttgtattgcgcaaggacattatatatagtaatccaacgtgggtgctggggggactcgtccccttacaccgtgagatcaccattgatagagataaaaggggaagaagagtgagaaaatgaagagtaggggactaaagaaggaagaaataaatgtctcaacttcaatctggttctggatccgcctaatagtagtggattcgtctagcaagaaaagcttcagcttggacatatatacgtacgtacagaggcgcccggcgtacaatttaaagcaaatcagtctgtattacgtatatattaatatttggttgaggctgttgtactgctatatatatatatattccaaacgcttaaatgaggaaacatacggttatcacccatttttccaataatagtttatcacctaattcctgattgaactagatcttaaatatatagtttagtgagcaaccgccaagtgatagctagtaggtcaggtttaatttgcaggtttttttgcacatcaggcggctaggaagaaacgggccgccggattatattatattgttgcacttaatttgtatgttctcaatgcaaggctttattattttggtaggaacgaagtatcaatgttcggcattgataagcaacaatatatatattatatagcatatagcttagtggttacaatgacctgagtagtacctcaaggttctgagtgcaaatctcatatagagcgaatttcagattgtgttgtttgcggagctaagttccctatttcaatggccgtatatatccggttggatgtagaggccgggtaaaaaaatatccttctctaaaaaaaagcaacaaggctagaaccaactaactaggtttatgtaatcagaagcaaccttcaatgagctacagattttcttgaaaagtaataaacattacattaataaaagtatttttcttcttcatcataaaagatgcataagaaaacgaagttaggaatagatctctccatttcgttgaacaaaaataaaggaaggaaaattaagtcagtaagatatctgaaggtgtgtgtaccctgtttgagtagaaaactccaataatgcgatgtgccaccagaccagagtgaacaagtccaaaaacactttgagcatattattcagaatccatccatcttctttagtatatatattctccaaagaattgaatttgtggtgcactgcaaagacttcaatccagcgtgtgaagatgataacttaaagaagcaattcatttcgaccaagaaagggaaggcacagatatacagaaccctgaaacataggaatcgatattcatatattgtcactgaatcagcagcagcagttgattttggttgagccagaaacactagggtaatattctgagtactcgtcaaggagtagaaatccagatatccagtagtgggatacttaactcataactctgagaagatgttgatcgatttcagcagtgtattcaggcgatcgatcgaactaatcaattaatcgaggggaggccgggagcgactgtcgatctgtctctgtgtttaggcatttaattaggactaaggctgcgttgtcttcttgaaacggctaattagtcacacgtaaaacgataacgtgattcacatataattaattaattaattaagtagtaatatataaagttttgatgaataaatttattagattttttaaaacaacttatgtataaaaagttttcatgtaaaatgtaccgtttaatagttactgctagagagctgatctttgtttggatggcaaaaatcatatttgtcccaattcgaatgggaaccgagactaaaaatcacggttcaaaatagctgtcaggccatgtcaaacccccaactatctttagtcccacattccacatatttttttagtcccatcaacccagactaaagatgtctccagggttagtttaaaaaagaaaacatctctatttaagtcatatgtgtgtagtaggtgggatgataacatgcgtgagagctgaggtgagagattgagttcgaatcccacatcccacacattttttttttgacttggtatgcatctttagtccggttatttcaaccgggaccggattgtgcatcctggttacacaaccgggactataaacggttgcgaaccagggctaaagtccctttctccagcagcgagtttgaaaagcgtactaatgaaaatcgagaagtagctaagctgaaatagctgaaaagtatgaaacctagggcatgcactagggtaactctattcactgcttacatgttttgcaaacgtagtaccattgtgttgccttgtagctactctctgacactctatctctccatatcgtcactagattatcgtggtgacccaatgtttgttgtttatagaaaaataattaggaaaaagtatatataaccattattggggttggtatacttaaccccatgagtatggaaaccggatcaaataacctcctagagtggttttataggtagttttagtatgtaggtggtgacgtggtatttattttgctttcatggcacaaatattagtcaattaaatttaagttggcccaccaacttcttctcattgattgacatggataaaagtttcatagtagtaccaataatgtatattattatcaagccactttcacttgtgaaaaataattacttaagcgattctctatggttatatccattaccctccgtttcacgtggccaaaaccatcgccacatcatcgcgtacatagggaaaaccacattatgggttatttaaaccggtttttatattttaagggtaaaacatatggtttcatttaaataaaagaaagtattggttccataattagcgaggttaagtaaaccaatctgaatacttaaggagactttttttttcaaaatgattaacatataaaaaacaaactgttttaatttaatattatagacgttaattatattattgtaagagcaattccaaagaaaaacatgttttgaaatgagaggaggaaagaagaagaagaagaagaaagactagtgcaatctagaagccttccaacggggaggagagagagggtaatccggggagtaggactagactactactagtacatgagatcgatcgatcgatcggcatctgcatctccgcccccgcccccgtggatctgaagcggcggaagagggatgtcgtcgtcgtctccctccggccacctgctcgcctctgtctcctccgccctcgccgtcctcctcctcctcctcgcctgcgtcgagctcggcgacgctgctgccgccgtcggagtctaccgcctcatccagtacgacctcgccggcgcccctctcggctcccgcgccgccgccctcaaccaccacgccgccgccctccctctccccgccgccgccgacctctcccgctccgccctcgtcgcgccgctcctcgatctcccgctcgccttcctccgcggtacatccctctcctctcctctctcttcttcaattaataa

SEQ ID NO: 18200 - DNA, 13453 bp, Oryza sativa
  unsure (1)..(13453): unsure at all n locations
accatttcaaatatccaggtaccctcctcgtaccattagtttacagtttggttcagtgtttattgtttgatttttgtctacgttatactttaatgtattgatccttttctctttcggagatgactggataaaccatggccctgtggctatttgttggaagtgattgttccagctgatattttactaaagtaatactgtttatctgtgagaacgaacatacctgagatgaatactttgatctgaagggatggttacctggattgaaaggagagggtgaaactgaacaacttccaactattgccattgtttcaaattatgatactttcggtgctgcaccagtacgtcttcgtgaaaaatgtttctagtgccttctttaatattcttctagatattttgcataaatgcatattttctcaggcactttctgtgggaagcgacagcaacgggagtggagctgtggctcttctagagattgcaagactgttttcacgcctctattcaaatcctaagaccagaggcaagtacaaccttctgtttggcttaacatctggtggaccctacaattacaatggaactaacaaggttagttattctcttcagttttttttttaaaaaaatctgctttgtggcatctgtttttatcaactcatggctgtatcttttttgaattttggtacagtggcttagaagtttcgatcagcgtgtgcgtgagagcattgactatgcaatttgcttgaacagcgttggttcctgggacaatgaactctggatgcatgtgtcaaagccaccagaaaacccctacattaaacaaatctttgaagtatgttgaccatttcaagcatgttggtgcataacagttattagttgtcaagggcagtcacttttacacctctgaattcttttgctttcaggatttctctgatgtctctaaagagatgggtgtttcagttggaatcaagcacaagaagattaatgtctcaaatcctagggtatgcacttgtcacctttttaaagagtatatattaccattagttctgattaggaatggacatggtgatggtacccacataatatatttatgatccttatagattttactacattcaatgcaatgtgttacatgtctatctgttggactctgttgtcaacacggcactgtaatatgtaccagaagtattatcaattgttgatgatgttaaatactgtacatattgcttttaattgtcatgtaggctagtattggactgttcatcatagtttttcttactcaaatggaactgaatgatggatgaaaaccttgtggaggtgcatacaaaagaaacagaatttttccacgagaacttttgtgaaagctcatcgtcttaaatcaaatttgactcagaaaagattgccacaagagagacctcattaaaagaaaaatgtattctaagggcccctgtgaattttttatttcttcctgcagtgccattacatggttttatttgtttggccctcatattagcttcccttgttcgactgtctgaatggttcttagttcatatgtcctaagtatgcgtaattaaatatttattctgcccattgttttctcaacccactgatttgtaacagcagaactttactaacttgcctgtttcatgaccatcacaatcctcacaaccactattgcatttatgcatcatactgtgcaatcttcagcacatagtatgtaccaacatactaatttagtttgcaactttgcatatcttctgctggatgatttgctccttttagcatagtagtagcatggcatggaataaaaaaaatgcatgatcaagaattaactggtaattggcataagggccagtttataaattagttccaaacaagataatatcactggatgttatccttgtttactacctaccaattttgaagatgtaattttggaactgtattatttggactgttcaggggtcctattatatttagtcttatgtttgtagcttgccaagtaacatgctttcaaaacttccaggttgcgtgggaacatgagcagttctcaagatttagggtgactgcactaacactttcggaattgtcctctcctcctgactttttagaaagcaccggtggcctttatgacactaggtaaagcacttataatgttttccttttacatcattaatttatgtgtccattttttctaaccttttgtttgtatttgacttttcactgcagagaatcagcagatgctgagtcagtaattagaactgtcagattagtttctgaaagtcttgcggtaagctaaatcattgcttgtagaagttcttcattttgctttatacactagttcattgatgatgtttgttttattatttgttctaacatgccccccttgggtcagtctattatatacagctgaaataattttagagaatgtaggttatttcagtattgtatatttacatttattattgttttctggatgatctgtactgtttgcgggtttctgctgtgtaagaatttgcaaagctgatcagtggttacttgttttagattctagttgttgcttgaacctggtaagtgcttttattctgattaaagaataatttgactgtccctgtggtatgtagggtagagtgttcaactgatttcccactttgcataaaacttactgtgtagctttgtaaaatgtcaatggagaacctcacgtggttatgatggtgcatcagttttacatgcatattacaatgcttttctgttcacgctatttaggttgcattcttaaatgtgataaacacagggcatcgtggcttcaaaatagctactatgattaatgagtgatattaaagctgactagttgcctctttgcctttctgaactgaagttgaccagttcttatatactaattccatttacagagacacatctatggactaaaaggaaagaatattgatgtttttgcggagaacagcagtttagccatcaaccctcactacatccagtcctggttggatcttttatcacgaacaccacgggttgcaccgtttcttcagaagaacgatccctttatagcagccctaaagaaggttcgtttgccttctatcaaatagagtattcatctagttcacctagttcgtagttttcttgcaaaccatgacatttcatgccctgttgcaggaactatctgagcacactgctgatgtccacgttcaaagcgatgttcttgatggcatgttcactttctatgatgcaacaaaggcaactctaaatgtatatcaggtaagtgtttaggctttgtgtcatttgttcacgtttgagtagaacaattaaaccttgcagcagaatggtctaatatgcttattgtgaagagcatatgccctgctttgtgattccttatttttatgctcgtccgtctcaaaatatagctacttatgcctcttttttggagggattaaggctgagattggaaatggttgtgattggttaagatgagaaagtaggtgaagaattaaatcagggatagttgtgattggttgagatggggaattaggtcgagaagtacattatgagaaatttgaatgctagatgtagctatatattgagacagagggagtattataatattctgctcatgtattctgttatgaattgcttaacagcaacaaagaattcattttaaatggacttatgcaagatatgaacacattgaaatattctcatacattcttcgaattattaattcacaggttgcaagtgttacttttgatttactgttccttctggtgattggctcctacctaattattctcttcagtttcctagtaatcactacacgggtatgtatcatttcaagccttcaaatataagacaggaagctttgtttttcctgcagttgagaacttattttttttaatcagggtcttgatgatctcatcaacatattccggcgaccaccatcacgcaaggtcaagggggcataatagaatagattgtgctttgtgtattagtatccaggaacgcgctgctagttagaagagctagacaccaggacgacaggcgagacgacccagctctccacagcaaacagacttgtaatttcaaaattttcatgttcgatagccaatgtgagtggcttcagatactgcaaggcagaaacatcacgaattttgactgatgaagctgcattttgttttatgttatttttgctggtgctcgccattttggctaccatggaatcaaagggcctcttttgcagaattatcgatcctgtcagcaggggcgggctcaagatttagaggttgggtattcgaaataggtaaggggtaaaacaaatttacacccaaaagtctaataattggtttgtgtaatatcatatacaagtaatatattatatgcatgtagcccaaaattatatacttaaagttaattaaaaatttttaagtgttagcaagaccatgtgtgatagtgtatgactgctgcactgctacctgcttgttttgggctgtttacctgccggttctggattgtttaggggaataagttcatccaaggtcccttaacttgtcaacgaattcgattttcatccttcaatcacaaagccagatacaacgggtctctcaactatcaaaaccggtgcaatataagtcccatggtggtttgggtggcggttttggcttacgtggcgtctacgtggctaaattgatccggtcttcatctgatgtggcattgacgtggcaatttgatttggaaattaataaaaagagtgaccccacatgtcagctacaccaaaagaattaattaaaaatggtggggcccacgtgggctccacttgtcattcgctcccctaatcttcttcctcctctctctccccatctcccctctcctctctccaggagctggcggttcggcgacgcggccggccagcgaaagcggagccagggatgacctcggagacgaggacgccggggagctgcgcctggacggggacgccgacggtgattgttgttactggactcagagttggtgttgttgttgttgagctcaccgtggtaggagctgagagggggagagggagagatggggcggccgctgtgctgcgagaaggcaaacgtgaagaaggggccatggacggcggaggaggacgcgcgccaagctgctagcgtacacctccacccatggcaccagcaactggacctccattcctcagcgagcaggtcgtgaaaatcaatgatatcgccgttgctgctgatgggatcgagcttgaggtgcatttgatcatatcagatcagatcaaaatatggtgtttttgtttatctcttcttttgccctttcggcgatgcggcgtcaagggaggttcggtcgcctccgccacttcccgcggcatccacatctccaagttctccgtcggctttccccgacgacgaaccggactccggcttctcgcccgacgacccggacctcttgcgcaaccgccccgtccccgaccggctcctcgtcgtctccgccggcgtcgccgccaacctcctcttcgccttcctcatcgtctacacccaggcgctcaccgtcggcatccctgtccaggcgcagctccccggcgtcctcgtctccgaggtcatccctggctccgtcgccgccagccggccggccgcgtcgccgaaccgccagctcctggagagaggagaggggagatggggagagaggaggaagaagatgaggagagtgaatgacaagtggggcccatgtggaccacaccatttttaattaattcttttggtgtagcttgaacgcgtagagatgtagcctagaggggggtgaataggctttcctgaaattttctcaacaatcgcagcggttaaattaatagggcccggaacctcctggtgaagaacaccggaacttcctggcagtgatgagcagcccggaacttccggagttcttgggccaggaacttccgggcaacagagaaaattgaaatcggggacataaaacaggtcctagctagagacaatcaggcacaaggtagcacaagatgtaaatcacaagataccagcagattcaaacacagatcatgcacaagtgagacaaaggcgattttttcccgaagttcggatcacacggatcctactctcagttgaggtgctcaaagagccgggtctcgattaaccccttgcctcacttatgcaaagatcccagaagaagtccacagccttcaacttaacacttctaggtcattttctagaattgagtgaccaccaagatccaactcacaattccttctagaaaagaccacaagtgcaagttgctctacctaggacaacctctgaaaactcagcacaagaatctttactcacttacctcgtttccttgcggaggtgaggaaaaccttcacaaactttcccgggacatctacaagatctttggaaactcacgggcgacacctaaccgtctaggagaagatctccaagagtaataagcccaagtgacagcccacaaggtatccaaagtgctcaaacgaacctaatcttcaatctatctccaaaacactcctacactctaatctaatctctcaatctcacaagataggctctagatttgagtggaggaagcaaaggaagcttgggagtggctagaaaaccctagaacatgaaagagctgaagtggaatggccaaagggtgacctggggacgaaatccatatatataacggctaggtgacgtcatctagccgttactcacaagtttgaactggaaacctgccaggaggttccgggcaaaagtgccaggaacttccgggcagcacttaggaaaaatctagctaaacttcggtgcccggaagttccggccagaacctccgggtagccctctctgtcccggggagaaagtaaactttggtgttcggaggttccggccagaacctccgggtaggcctctctgtcccggggaaaaacatttccaaaaaaatgattccaaaaacctttagactcatggatatgactcagagcactttgaataccctagaaccacacttgaaacccctctttatagtacggtttttcctaaactcaatttcgaaagtgaaagacctagtctaatcaccttcagtgtttttcgcacttaggaacattcaaattggggggcctccttgcattcttagccatcacaacttgctttgagactaaactcatgttaataaacttgataaacacgttagtcctctttaaccaccttgtcattaatcaccaaaacccactagggggtttaagtgcaccttcatagctgacatgtggggtcactctttttattaatttccaaatcaaattgccacgtcaatgccacatctatgccacgtcagatgaaaataggtcaatttagacacgtaggtgccacgtaagccaaaaccgccttccaaaccgccatgggacctatattgcaccggttttgatagttgagggacccgttgtatctggttttgtggttaagggatgaaaattggattcgttgacaagttaagggaccttggatgaacttattccttgtttaggctagtgaattgggccaggaaagcagggaggaggcaggcaggcccaagcagtgaagaagatgaactgaatatggcatttttttcattttcttcatacacatatacatagtacatactatatatacatattcttttgtcaaaaatcttgggtattcatctgaatacccttgaattgaagtgggcccgcccctgcctgtcagtgtgtgtgagacgggtaaagaagcacgatgtaattctcgcatcacgactttactttcccagtggaaaacaatgtctttataaataaatatgcggaaggcaaaagtgcatgttttcatatgcttacacacaataataacttgctgctgttggtcgtcaaaccccccatgccttcagttgcatatatattaccgtacgtacttgtgtaatatatatgtgcaagatgtttgatctgtagcaattttaccattgtattgctgggtgtttgtttcccttggtaaggtgtgagatggtaaaatatgacgtgcagtgaagtaagctattgttggcaaggtttgctcaatacggtatttgcagttgaggcatcaacaatcttcctaccgatcccgtttccgattaatatttccttccaattaataccgatgatcttcgattgtttccaattaatactcgtccaaaatattaggcccaaaatcttcttatatactatccaacaagaggatattatattactccaccattttgaaacccaattgagaataaatttgcagtagggactacacttactatgaaaacggatggggtgtcttttggtccaaattggagcnnnnnnnnnnnnnnnnnnnnnnnnnnnnnnnnnnncaatttttcacagcgctccgcactatcctcctcagttttggttgaatcgatctgagctgtttggttgggtttcagtttatccaagacactgggtcagttttgttctagccacactttgtcaccatttgccaataaatgttgttacacttgccaaagttgaggcgcctaagagaatcttgctacatttttatgagccaatgatgcgtgggacctaatttgttataaaagacccttgccacaatgtggttacaaatcaaacagctattaacgtgatcaaacatgcctaatcttggaggtggcaaattatggtaaaatgtggctagcaaccaaataccttgtaaatgttgagttgttctgtggtgaaaatattttttattaccgatgatgtatataatatagagtatgctcaaggaaaatgtcattcagtttaaaaaaagaagcaaagcattggaaggttgaaaatacaaattcattgatcattggtaaacaatatgtaggccagtaaaagagcactagagattagattaggattagagagggatgagcatgccatccatccatacatacatgcataaaaagaagaaagagtgtttgtttgtttgttgaaaaacaagaggataagcaagccatccatggccacccaaaatagttgtaacgcacacccagcccaatgggtccggtgatctgaattaaggaggtgtgttgtgtgcaccacagaacattgtcatgcagatgcagaggtagaggcagatgcagatgcaggcggcgcggccccgcgttggtgtccgtcctcgcggtggcattcggccgtttccactgcccaccttgagcttcaacaacaactccaacaggagtgcgtgtgcgtgtgcgtgtgcggtgtcggtgtcggactctgagcttgcggcgcgcgggttcgcggtgcggcgcagctcgacggggctggacgtgggggcgctgaacgaggtgttcgcgcgggtggggttcccgcggcggcaggaggagcggctgcggcgagcgctggagcacagcgaggtggtgtggctggaggactcggcgtcgtcgtcggcggggcggccggtggcgttcgcgcgcgcggcgggggacggcgtgttcaacgcggtggtctgggacgtggtggtggagccgtcgtgccagggcctcggcctcggccgcgccgtcatggagcgcctcgtcgccgacctgcgaggcaagggcgtctccaacatcgcgctctacgccgagccccgcgtcgtgggattctaccgcctcctcggcttcgccatggaccccgacgccatcaggggcatggccttctaccgctcaaggcaacaaatacaaaacacctcctcctagctccttttctatcttcttcttctccgatcaatatatccaaaacacatattggattgcatattaatttgcatgtgtatgtatgtatattcaagctgattattattgtctagacacacacacacacatgcagagtgaaatcaactcatcaaatacatatgtagttgcagctgattgcaaccagtaatccattccattcatcacacttgctaattacacttcattcttgttttacctctctctctctctctctcttgaagaaaagaaaaaaaaacaagaattttctgcttgcttagcttgttgcacattgcagaagaatacatacacatatatagtataatgcacacaaggaaggaactaaaacaggacacatgcagcacataccggagggaacagagaaatgcaatcaaaccaccaaatcaaatcaaacttgacgcttttgctctgcttgctggagctcgtcattggatcgcgcggatgaagaagctagaatatgatgtattatgaggcggtgtggtgggtgcggcggggcatggtgaaggcggccatgacgatgaggaccatgaggacgaagacggcgaggaaggaggcgatgacggcgccgctggtgcgctggcagaagccgtggaattgcaagcatatgggcacccagttggcgcgcaggttgccctcgtgcgccacgtacaccatcgccgccgccgcagacgctgccgccgtcagtaaacccaccatgatggtgtcgcagatgagcagcagaagcttgacaccggtggccttggagctcatgatggtggcggcggagaagggcagcgacagtaccatgtaccccgccgcgatcgcattcgccacaatgaagaacctgcatatatattttttcatttcattgattgatttattacagaataatagtaataagcttagtagctcaaatatatatgatgattactcgaaagccgggaagtcgtcgaatctggcgcggaactggaagtagttggtgaagacggagagcctctcgtcggaggtgccgatggagatggcggcggccagcgtggggccgaaggcagccaccctcagcacaaagtctatcagacccaagcaccgccggaggccgtcgccaccgctgccgccgctgcgcagcaggaacggcacgtcgctgctaccactgccagccttgcgatgcccctggaaaggcgccggcgccggcgccggggcaccagcaccgtcgtatgacgatgaagccttgccgtgcccgtgcccgtgctcgtcgacgtggacgctgcccgaggtgtcgctcccgctcatgctgcctgcttaatcaataatctcttctgctttcttaatttactactgctactatttgatcgatctatattatcttggtgttggcaatctatccccctatgtatgaaggtatatatagagtgccctctgctatatatacatattactctatttgcagaggagttgtagtagttgtttgggtcatcaaatcatactactaactgcttaataatcaaatattatcattgacctgagatctttgctggttgtatatatatgtaaggactcagcctaaatgatgagtttcaattcatatatgtgagtgaagaaaagaagttgagagttgctgttgcggatgaagtttgctagctccattacattcaatccactatacattggagcagttgtttcattgcattagctgcctgtttgtgcctcctttctttctaactgctcactcactcactcactctgccatttgcaatccatcatgcatgctgcaccattttgctttctacctgatcgatcaatgtaatgtactaccaactccctgcactaattatagacttctccgacgttacccaaaaatgtcctcccaagtcccaagtttcagttctgtattgtatttcttcagcattctcaaactatcagagattcagagacggcactccaacccattacctgaacatcaataaaatccgtcacgccagctgatccccgggagctacaaattaatcatttcatcacactccatgtagtaattcaacacttcactttgggcagatttaatttccctttcttccaaaaattgatttatcgggataacgacattactcataaaccatatttgtatattctcttcggaatattacatgacattcgctttatttaaggaaacggcacccaacagcactcataccagtggcacaagacaaacccccagctcatcatcaggcaaaaccatccaattcatgtgcaagcacaacggtacagaaaagtcttagccaacaccgggaaaatgatttcatctctcgagaagatatacactcgttttgtatatgccatctaaataatcaattaaaaatatgaaaaaaaattagtaatatagattaatatgaaatatatcacttcacaaatatacaagtttaaatttaatttgtacaagctgtaagaaaaataaaaaatatagttgcgaatgtgcaaaggagctagccagatctcgtactctgctttattggcaaactagctagctattgtactccgctttaatttgttctcctctgtttaattaagtgtgcgcgcctacatgatacaataactgagaatggatattcaatttgtcatgctaaatcaacactagtacagtaacagcacgtggtaatatatcatatttatttatgaaatgaaggaaacaattacagcagcaagcacataattaagaaatatgttattattggttaattgtgcttgtcctccgttatgatcatcttgtcgatgttgctgagcacctcggcatccctgtgggccatgttggtggcgtcatcggcggtgagcggcggcggtggaatggtgcagggctggtagtcggccacgtactgctccctggactgcatcatgaagtcgcggtcgcggcctcggcgggggcacgccatggactccgggcacagctccacggcgcggtccggcacggtgggcttgtagcggagcagcgaggcgtagcgcgtgagcacgtgcagcatgtagtcgtagacgtagtccatggccatgtcgtccgtggcgaaggcgctgccggcgaggcccatgcgctgcgcctgcgccgggtgggcgttgccccatcgcacggcgaagcggatgtcgcggcacagcttggagcgggaggggtcgatgggccagtagtgcttgccggcggcgaggcctcgggagaagaagtcctggtagggcgtggcgacggcgaggacgggcgagtcgcaggcgaggatgtacttgcggctgacggaccaggagcggccctgcacgtacagcttgtagcggtggcgacactggcgggccaggttggagtcgcggaaggcgttgcggttggcgaagccccagtcctggcggtacaacctgaccgtgtcgtcgggggggagggagtggttgcagcggaggagctcctgccgcagcggcgacacgtccgggttgcccttccagtaggcgtagggctcccttcggctccacggcagccgcgccttctcctccgccatctccgcgagcagcggcgcccatggccggatgttcacctccggccatccccagaaggaccagtccgggaagagcacgtccagggtggaggggtccttgcagtagcggaagaggggcggcgcggcggcccggtcggggtaggcggcggcgcgcacctcgggcatgtcgtcgcagttgaacatgaggtccaggtcggggacgcgccccgggtagcggcgga

SEQ ID NO: 18201 - DNA, 6060 bp, Oryza sativa
  unsure (1)..(6060): unsure at all n locations
cgctccaccgcctcccgactgatgcctgacgccaaccacgccgccaggtccagctctatgtgccggaagtaggacggacagtaatccaccgtcgacgtctgtggtggcggcggcgacatcgatgcaggcgccggcgccggagctgacgccgcatagcgggggcatgtgcccgtgtcattgccgctgccgcaggtgaatggaattggaatggaaacgagactagtgcggtgaggcctgtggcgccgtgcaccgtcaccattgccaaactgcaggaacgacgactgctccatccatccatcatgcatgtacagtacagaaaatgattaaatttattaattaactaatatataatcggtcagatactagctaagtatagatgattaggtaaaataaccagtactactatttattacttaattagtgaggaattaattaatagtagtaaagtctagttgtaattccattgatgcaaattaagcatgacgggcgaccaagactagctagttgtaaggaagagtggttgtaattccattgatgcatgcacgaccaagacgacgaatcgacgagcaacaggtacagctatacatctccatcaaatttattaagttgccgtatggaagccgttgtttgtcgatctccatcggaagcgcacagcttcaaatattgttaaattaaaatcactttaggtcaagatgataatggcctaatgtatgtttattcaaccatcatcgattgtgatggattggacacgtactcactagctcgcttagctatctagttcttcgatcgctcaaagtctgcgagccaaattaaaagtcgaacaagtttttccacatgttgtggcgcttaatttcaacgcgcggttttgttagtaaatgaattattccaacctgagatcgtacagcggtgagtagtaacgtcatgcatccttatatattctatgtacttacaacgtacgcagttgactcaactcaacagctagcctcgaagaacttatatcattcatacacgtatatatatacttaggctaaaaacaaccaaccatatacgcgcattacgtaattattatactacccttaatcttaatttcactataaattctaactaatgaggggttaatttgtcataagtaatgaagtgtctccttttaattttgtatctctaatggaaacatatactcctagctccgtcttaaattataatgcctatatttttttacacgctctttaataacatactttgaccattaatttatttcaatctatgttttcaacaaacatgcaactagcatcacaagaaagtactttaaaatatgaatctagtgatataacgtgcataataattagtatatgtagtacatagttagattattagttaaaagttaccgagtttaatttttcttaaaaataggacgtcctacaattggagtactatttttaatcaataaatatgtgtgttcaaaattaagtaaactacatgcatgcatttatgtactactactgtttttggcgatttatagtgcgttgtgatgcatgatcatctggtttactttccttgtgaaaaaccaaggcgcgcgccgcagaaccatagaaccactagtaatagtaacataattatatgtactagtagtgttttttcactcgttataaatatatctgatgcagtagtcttttgataggattaatatatactccctccgtattttaatatataatacaattaatcttttatcagcgtttaaccattcaatttatttaaaaaaattatgtaattatcattaattttattgtgacttgatttattctttaagcatggtatttttatatttgtaaaaaaaattgaataagataaatgtcaaacattgtttaaaaaatcaacggtgttggacatggagcgagtactactaagcttaatatccccaggagttaatcaactactccagcttagcttaacaaactagctacagtgccgtgtatctcgtgatcaagcactttcgtcgtgaacacggaccatactgcttgcatggctttgcttgctttctattggatctatatatccatctagctatctatattatattaattgatctgtcagtcgtctacaagtacagttataagcccaactatatatgcatgcatatatatatgcatacaaaatacaatttgggtgaaattaattaatttaagatgcatatccattgatcgaagcgtgttgattcaggtgtatacatgtgtaaattaatatagagggtggaaaatggaaatgcgcactaacaagcagcgctagctagtttccgtggatctgtagctagctatatatgatgtggtcatttgttggtggaaagaagaattaagctagtcaacattcaatgcgtgacagcatgagcatgctgtaagttagttaccactagtaattagctagtaatccaggtgctaaaccaaataaaactagctagattgtattgggtacggtgtttgacgtcaaacttggaaattatggccggccggtcggcatgtgttcacaactttaccaaatttcatcgttactaaattttggtagagtaaaaaaactaaatataatcttgatcacaattaattattacataccttatataatataatttggaaagttctttctctcagaagaaaaaactccaccaaaataaatttgttaaccccaatatatgttgaaattttaattgaggctgatttgagcgacaaattaaagtttcgtatatactaatttcaattcatcaactaataaataaatataactcctgggcctgtggtcgtgcgtcgtacgtgcatcgtcgctagctgctagcggtaaaaaaaaacaagtggatcgatcgcatcggagttgaatgaatgaattatataaggtatatgcatgcacgatcgaattgatatattgaagaaagaaatgataattgagcgagggacttgacttacaacggcgccggtgaaatcgacgagttgcggccaggtggtggtggtggtggcggcgacggcggcgagcaaggccagcaggacgaatccgccgacgacgacgacgatacccacgcgacccggcgcccgcactcgcttcttcaccgccgacgacacccacgttgaccaccaattgctgtagccgtagccggcctcctcctcctcctcctccgccgccgccttatttgagtccggctgctgctgctgcttcgtcgtcgtctcgccctcttccgctacctgcaccaaggccacgccttcctcctccgacttcgacttgtgattattgctacttcccctcatgatcgatcgatatattgtatttgatcgatcttaatttggtttaactaactatatattagtaatagtatcccgatcgatacatgcatatctaactatannnnnnnnnnnnnnnnnnnnnnnnnnagatacgtatatatgagatgaccggagaggagaggagatccaagtatatatgcatacatgagtgagctctacatagatagatagatagatagatgatagatagatagatagatcagctgcttctagctgctgctcatctctcgccctctcctagctagctaactccttcgtcttccctctagctagcatatatatatatatatatgacttgagcggctagctagctaattaagctacatctagctatctatctcgtctcttctcttgccatccatcaatatatataatcaggagggagctagcttaattagctctgtttatttatatgtttatatgtggagtagctaggagcgagtcagctatagcttgcgcggtatatatagacaagtctccagtctcagtaataaagtcagtcgtacgtcgtcgtcgcctgcgcagatcgtcgatgtaccaattaggagtactagacaaattaccttctgatgatcgatttccttttttctttcttcaattaattattccattccccttttatcgatggattgaccggctggccataaggaggatgtttcctaacccttagacaaaaccaaatcctattttttccccaatctttttcaacaatactatatatgtacatgtactatatatgtgaagcagtaatccaatattagtattacaatacaagagaagggaaattttaattttgacacagtggccgcccggtttatccattatctttagaaaaatatataaataaggggaaattaaattggcgaattgtttacttatatataacactcaactaattaagcttgcgcaactattagttattgatatctcagtcaaaatccaagtccatcatggtagcatatagttgcaccaatatgcagtgaatattttttttaataacaaatctcaaatataatttgtttgatacttaatttagttcacaggttccgatacaaaaccattgacttacacaatccatacataattctacgctaaacttacacacgtacgatcgaaatataaatggaattgctaaaaagcgtttgacagtttctgtcgtaaaacttttaaatacatatatgtcatcgtcagattgccttgagatttgtgtggcatgcaaggaaaaataataccctcaaaactttagaatttgttaacatcggaggattgccacgacaatcaatttgtgcggcctgcaaggaaaagtgggttgcaagcttagcttgtggcgctaggcacaatgtccacacgtgagtttcgataagttatatacaagttatctataagttacatcctaattacaataaattataatataattatattataattatatcaattataatataactacattctacgaggatgagctgctggtgttcatgatatacagtacgtggttttattttattcttttttttctaaaccaaagccgccatgcagtactgtatatatgtaggaaggttgatttggctcgacggcctggcaatcaatttgactgcagggtcaaattagctcatgtgcttaataatataattatccactcgaccgatcggcaaggttacgcatatgtcacggctgtgttcagcacccttttcccaaccatttccttcgttttccgtgcacacgcttttttaagctgttaaaatatatgttttctaaaaagtttctatataaaagttgcttaaaaaatcaaattaatttatttttaaaaaatagataatacttaattaatcacgcgtaaatagaccgttccgtttttcatgcgtactgttttggttggtaacaagaaattgcgaacacacccaaatacattgtccatattttaatgtatgacgccattaactttttaaccaacgtttaaccatttatcttatttaaaaaatttatataattatcatttattttattgtgacttgatttatcatcaaatattctttaagcataacataaatattttatatttacaaaaaaattgaataacatgaatggtcaaacgttgtttaaaaagtcaacggcgtcatgcattaaaatatggagggagtaatatataaataaccaacgggcttatttaagtttgtccatctatatgatctggcttgctagcttatttatgtgggtttattaactgtattatcttaattatgtattggtttcgcgcaaacggcaaaaggtacggatgttacgttcgaaacacgttgcgtacgtactgtgctatctagctagccaagtactcccacgtactactacatgtgccgatcccgttcatgcatccagctccctcaaattttgacaacttgatcttttaaaaaaaactatttttacaaatgaactaccgccaaaacttattttaaaaccgacccatttgttcaacgccaaatcatgtggcgctgaatttagacacctcaacactaaatagtatggcgctaaatgttcattggcacgctgacttagcctttcatccgtggtagcacggcattcagcgtcaattgacgtggcgttgaagtgtctatgttcagcgctacatgatttgaggctgaaaaaaaggtcattttttaaataagtttttgcgacggttcatttgtaaaattagctttttcaaagggataaattgttaaaatttgtgcatccagctacc

SEQ ID NO: 18202 - DNA, 7565 bp, Oryza sativa
taacagagcaatatattccagcagatctcttgctagctgacggtttcaaaaggaaaaaagaaacatctaagctactccctctgtcctaaaatttaagtaattttgattagatgagacgtattctaatactacgaagggattcgtaatattaggatgcgtccctttcatccaaatctattatatcttgggacggactgagcagtgaacttatttcgcgacgaaagcttagagaatggacacgtcttgtgcacttaaccctcccgtcatgcctacatatatacgatgaagcaaacaaagaaaagcaaagcaaaagctagtccaatcgatccaattgattgatcgagcgagggactatatatgtcgctataccacgaattaattgaaaggtacgtgttgaaaatcaacattgacagtataattgttgctttgtgtgcaatagcttaattggccaagtattaattaagagtagtattttttttagacagtgtacactatagctagctagtcaattaacacagtctctataaagtgcaactaatttgataagtaactaattactactccacatgatatatgtagactattacaataaattattatcaagcatcttgattatacatataaaatacaattttatttcgtttttatttctaggcaaataaatcgaaattttaatttgctgcatatatactccctccgttttttaatagataacaccgttgactttttcttatatgtttgacaattcgtcttattcaaaaaattttatgcaaatgtataagatataatcacacttaaagtactatgagtgataaaacaactcataacaaaataaattataattatgtaaattttttgaataagacaaatggtcatacggcgtcatctattaaaaaacggagggagtagcatgcaatctatgtttagttataagtagagctagcgtggcgaggatgcggtgcatgcagatagccacagccacaccaacgtatggttgccttcctattcagggaatctagatagatacctcatatagatgtatcacaattcgattagcgttcatttggttcaaaggatataatagggtgtggattggtttgggtcaaacttatttttcagtctgttttgtttgagaaacggtgagatgagtaatccctaacaaggaatattcctaagttagagtttaatatataggctctgtttttttctccaacaaaagttggattaaattttggatacttgtggcacgcttttcaaactgctaaatggtgtgtttcgtgtgaaaactttatatatgaaagttgttctaaaatatcagattaatctatttttcaagtttggaataattaaaactcaattaatcacacgttattacaacctcgttttgcgtgaaatatttaatatttatcttcatcttcatcttcagaatattcaaacaccacctatatattcttttttttcttatagtttatacagatagaaattggaagtagtaaaaaaattgtaacttaaaaaagaatgaacatatcgtattgttgtgtcaattttattaaatatatagtgagagaaaaaacaatatttacatactccctccgtttcaaaatatttgacaccgttgactttttagcacatatttgaccgttcgtcttattcaaaaaattttgtgaaatatgtaaaactatatgtgtacatgaaagtatatttaacaatggatcaaatgatatgaaaagaataaataattacttaaattttttgaataagacgaatggttaaacacgtacttaaaaagttaataatgttaaatattttgaaacggagatagtagtaactttagtaagaaatgactggagatgatcgatcgaggacatatatccgctcgagggctctagggggggaaaaatcattgtcaagagatggccgggggggagcgggtgatatgatatatcgagttgatgtggatggcttggctggctagctgtggctgcggctgcggcatctgcgcgcgcggcggcagggcgtccacgtaattgtaaccgccacccaactaactaaactaaactagtgctttcttttcttttctttctttcttgcagttgagttggggtgctacgcactagctactcaagtgcatgagctagctcaaacaatcgatcgatggcgatgaaggcggtgatcaagggcggcgatggcggaggcgggtgcatggtggtggtggcgcacgtgctagcggtggcggcgacggcgatggtgttggtgtggtgcgttcacttccgcggcggactcgccctgcgctcccacaacaagcagctcatcttcaacacccacccggtgctcatggtgcttggcctcgtcgtcctcgccgccgaggccatcctctcctaccgctccctctccatcatcgtcagcagcagggacgccagaaagaaggtgcacctggggctgcacgccgtggggctcgccctcggcggcgtcggcatctacgcggtgttcaagtaccacgccgaggccgacatccccaacctctactccctccactcctggatcggcatcgccaccatctccctctacgcgctccactggctcctcgccttcctcaccttcttcttccccggcgcctcccacgacaccaggcgctccgccgtcccgtggcacgcgctcctcggcctcctcgtcttcgcgctcgccgtgggcaacgcccagctcggcttcctcgagaagctcaccttcctgcaggccccgccgctgcgcctgtccaggtacggggcggaggcgctactcgtcaacttcacggcgctggtggtcctcctcctcggcgtcgccgtcgtcctcgccaccgccaacgtcgactccactaaatacaccgccatgtaattccattttattatacatatatttcatcatcttttctttattattactctacatataatcgatcgatctagctacacacccgtagtacgcagtgtcgtaccatatatacatgcatcgcgctgagtgtgtgcgcgcgcgcacgtgtcatgtggctttgtgtaattaattaattattattattcctcaattccatcgtgcatctttaattaccatgcatgtatatatatatctggccgagtgtaaatactatgtatgtatgtatgtatgtatgtatgtatgtatgtatgtatgtatgtatggatacacacttacgtactcatctgtaaaatacataatatattgcgtctcatctgtgtacgtatatatagcaaattgtttttgccgtctgctgtatagcttgttatatatcgcgattatactatcataattttaccgtgaaatataggagtatatatatgggcgggccttggctttaatttccttgcttttttatacaaagcaacatatataatataatgttcttttttgttgcacggaaaggatttactggttgggctactataccagcatcagtacgagatgcaaaaataaataaagcaaaaagaaaacgacagcctaatcgagagagatgtatccccaaaagttaaagctaggaaaaaaacagcactttaaatagtcatcaacaaaatattttgttttctacttgaaaacccaaacaattaacctgcataacatgactatgagacacatatgcatgttaatataactaattagtgttatgtccgtgcgttgcaatgggatttttttctacaatgttaatataggttttttttctatatgtttctttttgttgattttcacatgaatacgtactagttattttggtgcggttgtttttagagacagttttttaagtgggaaactatgatgatagagaaagagtttaaaatactgaaaatttgacattctgactattttctaaaacttattttacaaatagccgtagcaaaaactttaactaaaacaacaaacgccctttgtctcagcgccaaacaccttgcgccgagatccaacatcaacattacaactatattgattatttccccaataaacgaagactttttttttaaatattacgtatttaattccatccataaatcgacctcagcgccaggggtattggagttgtgcatccaccgtctatgatatatatttcattatatttatttagtattactctacatataatcgatcgatctatagctacacacccgtagtagtgtcgtaccatatatgcttcgcgctgggtgtgcgcgcgcgtgtgtggctttgtaattaattaattattactcctcaattccatcgtgcatcttataccatgcatgtatatatatatggccgagtgtacatactatatatatatgtacgtacgtacacatctgaaaatacataatatatattgcgtctcatttgtgtatgtttatatacggattaagtatagcaaattgtttttgtcgtctactgtatatctggttatatatcccgattatactatcataattttaccgtgaaatatgggagtatatatatgggccagccttggctttaatttccttgcttttttatacaaaccaacatatatagtccctctgttttatattgtaagtaattctaccatttcctacattcatattattcatatttatattaatgaatcatcaatatgaatgtggaaaacactggaatgacttacattgtgaaacagaagaagtagcgttcttttttgttgcacgtatggaaaaggattctactcgttgggctaccagcatcagcatgaggtgcaaaaataaataaagcaaaaagaaaacgacagcctaatcgagagagatgtatccccaaaagttaaagctgggaaaaaaacagcactttaaatagtcatcaacaaaatattttgttttctatttgaaaacccaaacaattaattaacatgtataacatggctacgagacacatatgcatgttaatataaatagctagtgtcatgtctgtgtccgtgcgttgcaatgtgattggaattatatataggttttttttctatatgtttatttttgttgattttcacatgaatacgtactagttatttttgtggggttgtttttagaggcggtttcttaagtggggaactatgatgatggagaaagagtttaaaatagtgaaaatttgacattctgaccattttctaaaacttattttgcaaatagccgtaccaagaactttaactaaaacgctaagcaccctctttctcagcgccaaacgccttgcaccgagatccaacgtctcagcgctagaggtcttggggcgtagagcatccgccgtctgtttacagacaaaccaatgaccaatcatttcgagtagctcagttgtggtacaatgatttctgtgcttttgatggtccaaaccatccaacatttcccttattttttccacaaactagtacctaaccagaaaaaaaaatataaaaaagccaaaaatgtgtcgctgctgttaagatgcaaactagggttgctagcgctaccgaaggcaagagctaccatcacaccacgttcacttccatgctatataaggcatgttaattctttttaatccgtggatgcatgttagtgccagcgagctcaaaaggtccctgtgttgagaagtttgcccttagcaccaagaagtttagcgctaaaatttggttcattttctaatatagtttttgccatgatctaattataaaataagttttgtaaaatgggtaaaatactaaatgtatggtttaaagtagttgagaaatactgggttttgggtagggtggttttattatgaggcggttttttagtggggacttcgatggcggggaaggatgacgatgactctacttttaaattagtatactagtgttgtgaccatgctatttcactgtaatcaaaacaatgtagaatacataaagcattgatacatgaatagcagatagtggggtcatagcagattctcctgcgaatattgtatagcaagcgatatggcgaacgttatatattccgatagcgaaataagaaaaccactcaattctgcatatttgtgaggtagagtagtgcttaatttacagaaacaatatcatattatagacgacatatgagttatggagataagtaaaaaaatgcggtactcttccttcatgttgaaaataattatctatttagacaaaactaatatcaaactttaaaaacattgactaccaataacttctaaaatatttgtctttataatcatggagaccatataatacacagattaatcttaaaatatacttaagtaaaagcatatatttattgatatttctacatacattacatacattgtagaagatcgcaaaccaaagtcatctgccacattgtcgggagcatacctctcatcaagttatcacatttcatattgtagcctttaacagaaattaggagttaatgcatttttttcaccgtgtacctatccaaaacaacaattatttttaacaattatttttaacctaaaaggattgtattttctataatatgtaccaaataacacctactatttttcacatagcagacgtaatattcctccaccattttagtagcacagcatcaccatggtaatataaaaaccacgatactgctatttagtaccatcatgcatggttataacataggggtgtatggggatagtcatgctatacatataaaaaacttgcttaatactagttaattttctagtattagtataattttttattttagaaaaatagaattgtgataaagggctggtttggtttgtggcctaacttgaccttaccaatttttgtcaataccaaattttagcaagttttagcatatgcaaagttttgtttggattgaagccaaaatagcctaagttaactattaaaatggcctatttttctaggtttggcagaaattgacttcaaaccaaataaacacttaacactattgaaattaccaaatattggtaaggccaatttaggacacaagccaacagctcaaaactcggctggagtgttgggccggcgtgggcttgttatacgtaaccattgttagaaagcgtattttatgggttaaggaggcgcactcgaagaaaggcccctccccccgttttccccttgtctcaaagcgcattttggagattggagtttggagtttggagagagagaaatgcaaatcggaatttgaagtttggagtcaccgccgccgttgaggtccgtcgtctcgtccgagtccggtccgcgcggaagtaggggcggaagtgcgggcgggagatgggggtgaagaacctgtgggacatcctggagtcgtgcaagaagaagctcccgctccaccacctccagtgagtccccgatcgatcgatcgatccgccattaaaattaaaattaatttccggggagggtttgctaatggattgggaaatgaaatggtggaggaaggaacaagaaggtgtgcgtggacctgtcgtgctggctggtccagatgtacagcgccaaccgctcgccggccttcgccaaggacaaggtctacctcaagaacctcttccaccgcatccgcgccctcctcgccctcaactgcaccctcctcttcgtcaccggtaatcccattctccttttctacttt

SEQ ID NO: 18203 - DNA, 6343 bp, Oryza sativa
ttatttatttatttcttttcttctttcaggatggctgtttcacttcagactcggatgcttttctttttggcgctaggactgtttatagagatgttttcataggtgaagctgattgcttattggcttgcatcacaactcatcaacaattttgttgctgcctgctgccttgttctattatcaactagtctttgcttatatatttatctggaaatcctactcatgttctcaatcaaattaggggagggtggctatgtcatttgctatgaaatggaagacatagagaaaactcttggctttggcaggaactcgctggtaagttgcaatgaatttgttctgcccgagtttcaacttatgggatctcttctgaacaaatgttttgactgcttgtgacatatcacaaagatgtaaaataaacttacttaaatatgccccttatgctcctagaaagatcacttagacttttgtcagttaatggcttaacacggtcaaagcaactaatagataaagacctttaagagtagactgcactgcaggcacaacagcttagtaagtgaatgcaatgtgctgatttaaaacaagaacttgcaagttgtatgcatagagcaacaccattttctcaactctgatatcacaagaaaatgtctcagcgcactcttaaaaatcctttgggtaattatcatgtattagtcagagattacgggatgttgcatgtaattgctgatgacttgtatgacaatatgatgcaataacaatattacatctcccaccaatgacttttttttgggcttctgattctcaggattttttttttgtgtgataatgcgtaaattcttattgtcctgacttgacaacctttccagatatcacttgcagtgctccttggtagtgattattctaatggagttaatgggtttggcccagtaagtacaaaaaaaactgtcattttcattgtcttagtataacatgcatctgttcttatatgtttctatatgaaatctgacactcgacgacaagatgggaatcatggagcttatcattatatttgtaatggtgctcttttaatgttccaggaaacagcatgccggcttgttaagtctgtaggcgacaatttaattcttgatcagattttgtctaatggagttaaagctactagaaaatgtaaagggaaaaatagtggaaacaaggtggacgacatgtgccccaaagcaagttcctgcggtaagcagactctgtggtgcttttctctaaaatttaagtaattagctatgccataaacatgttgtggacagggaatacgcaacatcatttatgtaatatccttgttttacagaggttggcatgactcaagactctgatggtcaatttcgtgacgtcataaatgcatatctggagccaaaatgtcactcacctgattcggaagctgtgcagaggtaaaagagttagtggaaaactacttcgctgtatagtttatttgtctcggattttgaggttcagccccaattgctgatatgatactttgctttcagtatgtgttcacctttttatatttttcttgtcatttttgggtgattctgtggaaaattgatcagggtgttaaagataggggttgcttaaattgcttttctgaaggttcgtttgttctatctccatagggtatgcggacagcacccatttcttcggccacagcttcaaaaaatatgcgaggaatattttgattggagtccagagaaaactggtactctctgaagtcctcgactgttatgatgattagcattattagtatgtgcaagaggaaggcagtaacatgttttaataggtatggatcctgacttgttttcttctgtatgtctgcagatcaatatatacttccgaagattgctgagagagaacttcggaggttttcagaccttcgctctgcgtcttcagcactaggaataaaacctttgttgagtgaggtaaaaactttggtctgtctgaagcaaacgttttacatgtacctttctcaagtctaagtatctaatttacagataccagtaccatgccctgtactggcgattgtgaagcagaggaaagttcatgggaatgaatgttatgaggtttcatggagaaatatagaagggctccaagtttcagtagtccctggggatcttgttaaaaggtagtaacactgtaacagtcctctcttatccggcaatagcaacagtgattgtgtgctgctggcacatttttctgaatattgcgaggtgcgattatgcacagaaagcatgcataagacacatattaggagttcaagtagaagtctattgaatccagaagttagttgcttgatgcaacaaaccattgccgctcatgcacttttcattttactcttaaggaggaggattcttgcccttcctaaatgcttttgcctgtgcaattgcagtgcgtgcccggagaaaataacagaatttttggagaagaagggtgaagagaagaagcagaagaggagagcaaggccaaagaaatcagggcaggctgcagtgaaagatgttgatgaacagctccaagagttgctgcttggtattgaagctgatagtggtggcatattgggtgctacagccagtgtgtgtcagactctgacagcagcctacactgtggctgtggaagatgtagttgatctgtcgtctccttctcctcctcttcggaagctctccaagtcccaaaagaagatgatggccgaggatgtcaatgtggctggtatgaacatgaacaagatggagtcagaaagtagttttagcacgcaatcaagtactagtgatgttgacaaccagctgattgatctgtcttcacccctggctggtggtgataatggtatgaaaggtggaagaagagccctggcagacataagcaatgttggttcacacagcactgagacagacggaggaggaggaggtggtggtggtgtggcatcggtcggccatggaaccaccatcgacctatcttctccgtcgccggccataggcgacagatcaagggttcatcacgatgatgatgatgtaatacacgagaggaaagcaagggacctgagaatgttcctggacagcatacggaacgagctgtattgagtgattatttatgaatgtttggctggcgttttttgagatgatagtgaaatggaattggaattacaaatccgtttgagatgagacgatgcgttccctgagcgcgcaggccctgaggtagagaagggcgtgggcgagcatcccgcagaggaagccgagcgcggcgctggagcccaccagcgacaccgccgtgcacagcagcatcacgaacgcctccgccctcgtggacatgtccctcgccgccgccgcgagctccactccggcgaacagcagcagcgcgccgagaagaccgacggggaactggacgaggacacgcagcatggagccgcccagcagcaggcccagcgccagcttcagcacgcccagcgccgccacgcacccgccgctcctccccccgaacttgtactgccccgccagccctcccgcgccgtggcagcacggcatggcgccgaaccagcaccccaccaggttcatggctcccatcgtcaccgacaccgacgtcggcgactccttccgctccgggaacaggtcgcgcgtcagcttgcacaccgccaccaccgagttgagcaccgacagcgggatctgcggcagcgcgcccttgatgaacccttgcttccacgcctcccgagagatgtgcaccacccgcatccgcgacggcccagcgcgcagctccctcaccgccgctgggtgacgcgccaccgcgaacgcaacgcccaccacgaacaccaccacagccgaaggaacggaacccaaccgacgacgccaccactgttgctgctgctgctgctgctgacgctgctcctgctcttctccggccccgttgacgagcacgatgaagcagaccgccgcgatggcgagcacgaggccgtcgaggcccacccaggggcgccgcccgagggacttgcccttgcccaagtcctgctcgtagcgtatgtacttgacggcggccatggcgaagttgaggccctgggcgagctggatgccacgcacgacggagagcgggacgaagcggtagacgaggtccatgaggcgggtgaggccgaggaagaggacgaaggcggcggtgaggatgccggcggccatgatctccgggatggcgaaggaggggtcggcgagggcggcggcggcgatggacttcatgggctggacgggcatggggacgccgtagaggaggccggtgatggcgttgtagatgccggtgaagacgagggtggtgccgaggtccagctgccgggacagcgccagcgacagcacgatggggatgtacgtcccgaggtcgcccatggcgccgttcacctcgccccacaccgaccggaacctcaggttttccaccgcccgccgcgccaacccttccttcatccgcccatctccacctccatctccaccgccgcccaccgcctccggatctactaccacgcccacgccggccatcaccgctgctcgtctcttctcttctctgctcgccgcgcaggatttataggatcctacctgtctctagtatttgtcactgatgatgtatttctgccatggtcaactaatacagtataacttctcgtcaactacaccctccaaacacaagtatgtcctcctaaattccgtgaaaatgccgttaacaaatttattattagaaaaactctcataactgttacatttatggaactactatttccaatttatgggaaatgatttaaacggtgaaaaagagtttatatatgtatcataaagaatatttttttccttaaactcgttcgtccatccatcccatgccctcgtactctcaaaatgtagatagaagatcttagaacttgtttagggcatgtttgagtagcttctggcagctacagtttaatttctagctactagaaccttctttaaacagtatagatttttatttagattctgagaatatgtagatgtgaaatttagcaaatgaattagaggttttccggcttctccaaattaaactcttccaaacagctcctaagcgtgttatttcgatctcagtttaccatgattccagcgagatcctatgtggcagcgcggcgctgatgtgtcatgtcaagtcgtggttggagatggagggcacgaggatgtgcatgccgaggagctgatcgtggccggagtccaaggagggattggccccagcggcaacagtggaaactggaaaggaggataatctagattatcctgtccagccggataaaatgtcaaacgtactcctgtgtagtagtgtctacgtaatttagagtagcagtattgtagtgtcccattcatgcaaccaagggacgaatgaacagaccggcctcattctctcaggtaaaatcttaagtactctacataaaatattgtctttagtacttcctccgtttataaatatttgacaccattgacttttaagcacatatttgatcgttcgacttattcaaaaaattttgtgaaatatgtaaaactatatgtataaatataattatatttaataatgaatcaaatgataggaaaaaaactaataattacttaagttttttaataagacaaacggtcaaacatatttaaaaaagttaacagcgtcaaatatttacatatataaatatggaacagcattgtccctttcctttcagtttggctgcaacggcatgcaccgagatttatccaggtcattgtcaatatattcctctcttcacatctcgaaatcctaacatatacagacgacatgatggtaagcaagcagctgtttgctcgctgacttttgatgccaaattcccctatcaattcatagctgagaattgcttctttctataacatattaatgttatcttccgatacaactagatcaacgtgatagagattatctgataccgacggacagcaccttcaaagtaagaagatagggcctgtttggcacagctccagctccagctctacccctcctggagctggagctcagccaaccagtgtcatctgcactaaaactgggagtggagttgggtggagctctctcacaaaatgaactaagttgtggagctgggtttaagcagctccactactccactccaaacctaactcttggagctaaatttacgaatatatgctgaaacagactagcacattgtgacctgatgaaagcattaacataccagctgacccaaggtgaaaacgtcacatattccttgattattaatttaaaataaccaacagaactaatgcaaagattaggagggggacacattcgatgccaaaagaca

SEQ ID NO: 18204 - DNA, 17374 bp, Oryza sativa
gggacaatatttgcaacagcaggcaaaaattgctacaattcaccaccattcatttatttcatgaatatatcaactaataaattttgtcctactcttggtgtctggtaacttcaataatagtataatttagaagtcactgcaataataatacaatcaatttgttagttaatataatatattattcctgtctcaaaatatagtaacttttagctatatatgtttctaatcatgctttttttgtctagatacattgataaaacttgttatattttgggatggagggagtagtacattcattttgtcagtttatttctctacctgttcatgtctaattgatattgaaggggaaattccatccgcatttactgcttgggttgaaattttctgctgcatatatattggattggcaagtcattcagataattatatgcactccattcaattgctcccggtattcattcaaatccgcatgtggtttagtcaaatgtactgtggatttgaatgccatgtttagtagtagtaccgattaccgaagatgcacagatgtgctggaaaacagtaccaaaaaaaactgtaatgatctgaggaattatccttcgtgagctgtacgtgtacgttataatgttttttttttaaatttctgtaagattcaggatgttgtccccttgctaatttgttttatttttgtagtactagtgtggaagtgctctgaaaaccataaagaagacaaaaaagaatactccagcctgcctgaaactgctttgtacatcagaggcgaagggttggattatttattaatcgtacgtgacataaagtttgtgattatattatactaattgggagtgcagcatggcattggcaggttcagccaggtgagaaaggaaaggaatctgcatgcattgcactagcagcagcatacaagtgcagtactggaagcagagcacccagctgatatatatcatgcatgtaattaagcaagttcatgtgaaaattgaagtttgcttaattttgcagggcaggttgagggacatgacagatggatatattttatataggcagattaatgtgtgtgcatcaatcttagtatattcttgttacagaggagttagttgtggagtcgattaattgagctggactggatcggagcctcttttgtgttgtctttgtctccaagtgattaattagttgtagcaagtatgtgcacacttgcacatactccatatgtgtactggactggagtcagtcacctatcctttattattccattttggacttaagcggcagactaacacttccacacaaattaaacacaagcatgtgaagatcgatcgatataattaatccatcgagtcattgcatgcatatatattgattggatttaatatgcacacaggggtagggcacaaatctcattcaattcatctatgaaaatttaaccatatttgagaaggcataagaaggtaacatattttttatataaatttaaaatctctaggcactagatatatcaagatatcaatagtgtaaatttaggtatcttgagatatatttttttaagaaccataaaattttaccatttacctatctttaatctgatcaaattactttgtagtactagcaggatcgaggatgggcggcctgtcctaagagtaggtacaatagcagactattaaccagctacaaatatattttaatgagataaaagatgagagagaagagcagtgggctacaggtctgtagccagttgtagcacggactctaagacgcaacatgtgtatgacaggtgggaccatatactaatagtatagtaagcaactattgtataaattggctattagattggctatagatgaattgaagctagtagttggctatactattaaccttgctctaagtgcactactctagtgcttaattagttgtacacaatcccttcaaaaaaaataaaagttgtacatagatataccagggaacaaatcctatgcacataaatttctcgtgtacatcaactaacaaatgttacgaaaagttcttaaaataatagatatttatttctaatagtattacacatatatgcaaagtcttatattaaaattcattatattttaggctaaaaaaagagaaaaatctgacagttttaagggtaaatatctgtcagaattttgttacggctaaaatataatgaatttgaaaataagatttcacacatagatataatactattggaagcatgcgtctaattttttaagaattttctatgacatttgctagttggtgtgtataggatatgtccccgacacatcatatgtctatagtgtgcttagttaaatatatatgcatatatatggtagtgcactcctactacctgcacatatatgtgcctaaaatcctctttctctctctagctacatcgatcggtctcacacgagctaacttattagcttctcatgaactccggacggtccatctgaattctatcttgtctgatcccatccatatcaatacattagctagccatggtgaataggaagaagaagaagaccaagcttggtatcacctctcttctcttcagcagcagcagcagcagcggcagggacacatccactactactagtggcttgccgtattcgtattcgtcgtgctccaatatgtcgtcgtcgtcgtcggcggcggcggcggcgtggcaatggccatcctgcaagcagccgaggacactctccttcaggcagcagcagcagacgatgatgaagaccatgaactccgcttacttatccgcgggcttctccttcgcctctcgagacagccacagctccacctgcagctgctgcaggagcaggacggcgtccgacgcctcggcctccgccgacgccgtcacccgcgcgctgcgctccgaccgcctcttttttgaccctgacgcgtccccggccgccgccgccgacctcaagctcaacaaggccaaggccaataagacgaagaagaaggtggaggcgttcggcggggcgacggcgatgaccatcgagtcgtcgaacccgtaccgcgacttccgggagtcgatggaggcgatggtgactagcggcggcggcggcggcggcgctgatgactggcggtggctggaggaaatgctggggtggtacctccgggccaacgtcaagagcacacacggcctcatcgttggcgccttcctcgatttgctcgtctctgctgccgcctcgccagctgcttcttcttcttcctcctctccggcggccaaaggcaaatattcctcttgctgcagcgcctgttcctcttcctccatcaagctggaagaagaacatcagctacgacattactaatatataattgatccacacatctacggtaattaatgttcgtttaattaatcaattcaatggattaattatatattggagcgtgcattttattaactactccagtggtagtacatcatatactagtatattcgaatttcatacatccacagtttcccctctcaatttgtgaataggcggagtcgatcgccatcaccatatgtacgtgtgatattttaatttgtcagtcaccgatctctccctatgacatgctcacttcgtactaaaataaataaattataagatgaaatgtgatacatcttaattattactacgatatgtccagattggtaaatcagaatatcacatttcatactaagtttatttattctataatgaagggagtatatacatgtgcgcatcaatcgatggcatatgcatatctctctatctactatgtgacgcactacatagtttttcatagagaaaatatataatgcaaaactctatagatactacaaatctttttttttgcggggatagatactacaaatctgaaactactgtaggataaaatatgaatgtctgatatttatccatatctcaatgagtggtatagtagtgtttaggccctgtttagatagatgggactaaaacttttaattccctatcacatcggatgtttggatactaattataaatattaaacatagactattaataaaacccatccataatcttagactaatttgcgagacgaatctattgagcctaattaatccatgattagcctatgtgatgttacagtaaacattctctaattatggattaattatgcttaaaaattttgtctcgaattagcttttatttatataattagttttgtaagtagtctatatttaatactctaaattagtgtctaaagacagggactaaagttaagttcctgatccaaacaccaccttagtgagcgcccagcacagctagcctagataggccaggcgtgctgccttgctatgttgatttatatatcgattgagatctactggaacaatgatgcatgagatgagatcgataattgtatatactggggcgagcagctagcttgtgatcattggacataagacggtcgatcagacatcattaattacagtatatcaatgttgtatatttcagcagtgccgttggacgactgatctcatccagaaatatggcatcgatagccactcggcctgtcctttttgcgctcagaagcttgagacggcgaagcacatcctactcgactgcgtgttcgctcgtcaggtctggttacgggtgctgtcgcctcctggctggattgccctctctcccctcagtggcagctggcttcaagactggtggccatcttctaggtcatgtttacctaatcacctccgtgccagtttcgactccctggtccttctggtctcttggcaggaacacaactccagagtttttgactctgcgctttcttcggtctcagtgattctagagtccatcctttcagagggccgttgtggtcgttagtgggcgttgcttactttggatacttgttaggagtgttgcgtggctttgccccctcccgctgtttgaagtagcgttatccgttgtacgagtttttctttttcttccttggtttttgtctttattttcttccttccttggcataagccggtctggctgattgtgttgtgtaacaaaaactctattcttttaatttattgacgtacaatctttttactcgttcgtgaaaaaaaaacagtatatcaatgatcgatataccggggaaggtcattttgtcccataaatggttgtacaatagggtgtatttgacaggagtaaagtagaagacggagaaaatatatgattaattaagtattaattattttaaacttaaaaatattaatataaaattttgaaagcaacttttcttttattaagaaaatatcatttagcggctcaaaaaacatgtgagcgacagagggtattttctcttagtccactactaacgcgaaggcaaccttgttctttctagctatgtgatgtaattaaatggctatacaaaattctaaaaaatattaataacatagatatgtaattgtgtgagatatcattacacaacatacaggtttaaatataacatatacaagtctattatatatactattataaaaattgaagatgtttccacggtccgtcatccgtgtttgagtcggttttaattttatgttttggttttaatctatatctcttctctatctctattattataaaaattaaagatgaagatgtttttgccggtattttggttcatcatccgtgtatgagttggtttttaagttcgtttgcttttggaaatacatatccgtctttgagttggtttgtaagatcgttcacttttggtaatacagaaggaatcatataagaaatctgtttaaaaaaactcgcatgctaacttgagacgttggactcctaactgcagctcatgattttctaaaaatatatatatgtaagcgaactccgacaaagaatttcatcttaactaatgtaacgctccgcttttcgtgagtcgttaaaaactaactcggtaaaatcctaattgcgaaaattttcgttctttgtgtgagagtctaagttgtgccaaggatcccaatttaatcccgttgttccctctcatcgaaatcaaaatcctccacctcgaaaattcctcttccgattcaagtctctggaatcaaattccgaaagtcaatcccttcccttgaatcctccccaaataattgttcccattcccgaaagtatcaaactcccactttgtttccttactcgtctccttgaacccttgtgtacaagtatcaaaatttagatccaaatcccaattccggaagtcactctctcccttccttgaactcgttgccaaatctttctcccgatttcgagagaatcgtttctcatccaaatcatttccttgactccaccttatattcccgagaacaaatacccaagtattccttttgtatcttttccatgacttctccttgagtttcccttgatacatccctaaaccctcgagttcgaatatcaaatttgaattcgaatccaaaccctaaatctctccaattctatccaaatcagttttctctgtgaaagtctagtttgcctcccccaagttctatgggccgaacgcccctccccagcccatttcctccctctgccgtcctcctccctcctctcgcacgtgcgatgcatccgcgtgagccgagcagagagagagttctctcgctctctcgtcctcttcctctctctcgctgtttctctctctctcgttcgatctccctctcctcggcgccgatttcccgccgccgccgttcgaaatccggccgcacccccgcgtcgcgcgcgcgctcgctcgcgaggtggccgaccggccgaacgccgccgccatcagtcctcgcgccgccgacgccacgtgcgaccgccttgcccccgctccatgacaaaccgaccgccgccatcatcgccgacgtcatccatggcccccccgccaccccacgccgcacccgtccaagagtgggagaagcagctgctctccctctcctcctcctcctcactctccctctcctcattatggcaagggaccaagccccttttttacccttcttttccctttcccgaccactgccggtgtcactgcctctacgccgcttgaccgaccgcgccaactcgctctccttgaccgcgccagcccgcgctcccgcggtttgatttccgccgcttgatccaccgccttcgccgtccaacgcatccacgccgtcgccgttttcgcactgcccacgaaaccgccgctgccacccgtgaacaccagccgagctcccttgaccatcgaactcctttccaaacaattgtcccaactccgaaaatatgtggtttccttcggatccctctcaaataatcccttgaaccgccaaatacaaatctatcccgaaaatatcaatttctcaccttgatctcccttccctggttccttcatatttagctgagttcaaacatgcaatttgaattcgaatttcaattcaaatccaagccccaaacctcccaactcaaattctctgtataagtctatttagcctccccatgttttggatgggccggatttcctcccctcggcccaccttccccgctgctcctcccctcgcgtgctcgcgcgtgcgccatggccgagagagagagagagctctctctgttccttctattctctctctctctctcttattctctctctctctcgtcgagctcccccaccggtgccgatttccggccgccgctgttcgaaattcggccgtgccagctgctccgcgcgcgcgcgccgtggtggccgaccgcctggtcgccgctgccgtcagcgcccgcgccgcccgtgccctgtcaccgcccgaccccgctgctctgtgcgctcgcgtccaaagacgcggaggcagcgcctctctctcccacgcgctccatcctccctctcctcgtccaaaatcgacaaggagctgagctcctttcccctccccctttttctgcttttccccctctcagctagcgtcacatcctctgcctcccgtgaccgtctgtcgccacttgaccgcgaggccgccagccgagctccccttgaccgccctcattggttccttcccctcgaagccccatctccacctataaaacccgcactcccctccctcgttcggctcctagcctctccaccatcgcaccgtttctcaggccaagaacgctcgcccaacgccgcggcctcctccgtcgctggtgttcccttcctcgccgccttgcgtcgccgctcggccaacgcggtgctgcctgccgtgaacaccatcctccagacccagcgccgccctccccgaagcccggccgttttccttcgccggcttcccgtttgctcgccatcgacgccgttcatcgccatcggtgagctcttcacctaatcctcctcgttgtcaccctcctggatcactgtagaacactcccgaaccgccgctttgatcgccggacccctctccctccccggcggcgttccgcccttccccacaccgcgcctcgccgtcgccggcctctctcagagtctctccgccccatccgaccccgagaacaatttcccagagtcctagagatgctcccgccaccacgaattgaccccattctctcccggcgtgttttcccccttttgctcgccgccggtggccgccgtcgaaatccgccgcctccgtccagttccggccacatccgagccgaggaatggagtctgcgtctccttttccctccctccggtggtctcccttcctcccgcctcgcctcgcggccgctccgccgacgcgcgccgccgcctgccgtccatctcccggtcggtctcgtctttctcctctcgccggcccgcgtggctgccacgtaggcgccacgtcggtgccaactcggctagaccgagtcaaaccggccagcctggctagccccctccgtgcgcacggaccacggtgcgccatgcggctgcacgtgggcccgtcgcgcctcggtccacccggcgcaccaatcgtgagccgcatccacccgaaaccctaaacgccgcccgcgtgctcccatccctccgtgaaccgtgtcgccgacatgcgggccccacccgggacctcgcatggtgggttcggtccacccggaccgccccctctcccttccgcgcgcccctaatgggccgcctccttgcgcccgcgccggcccaatggcttggccgagcctccttcaacccattgggccgcgcctcacgctcggcctaaaagtccatatttcctccctccgtccaagtcagtgtccatctctcatgagctaaaagtccatatctgctccctcccaatttactcctctctcaccttttgtaggccccacatgtcaatgagtaattaaagaatattccaagaatattcttttccacgaattcaataaaccatctctcgtattccagaaaaattcgacaaatcatttccttgtccagaaaattcagataaacttccaatattcatatctctcgatccgtagctccgatcgactccgttccacttccagtatttctataaaattgagatctatttaatggcactattaattagtctaaataggatccttcttttggtcttttgtttaggttttctattgtttgcgtatagttacggttgcggattttcgtcgatcgtggttatctcgaagattcgtgaagctccgtgaaggccttgagcaaggcaagtcaccctttgatcaattgcccctataattgaaaagtcattattattttgtttgcaacttgcatgattagaatcacacacttaacttgcttggcctcggtttgcgtgccaaaccgacggacctacccagtagtcgcactaatttccgtaggtcgtactaccctgattccttgtcgctccacccttgtggtacctcggtattcgtgctctctgagcgcgtataccaaatatcccacatacaccgttgtttgtcgaaaacttgggaaatgggtttgtgaagccttcaaaacccgacatgtggtgtcggtgtgtttgaaaataaaatgaattgtgaaaactcgcgatgcgggggttgtgcctatgtggcactgtcccgtattcgcatataaggaccgattcctgtgggaaactcatcgaacataatcaaagtgcaaccacaaggtggaatgggacaccctggctaagtaactagtcggttcagggaaacctcgcatgccaatagttgggaacgccggggcggggtcggacaaaccgggttcctggtaaggcaatgacgagaagcttgctcacttaccgatcaaggtggttggagttgatttgtgaatgcctaaaatggcctatacttacgtgaggatttgatccttctatgtggcatgaggtaaccctgggtcggcttgggaaaggctttgtcgcgaacctctgacaccgaccagtgtctggagtaagttcgtgtcttgtgggtaaagtgtacccctctgcagaggttaactaactgttcgaacagccgtgcccacggtcatgggcagatgtgaggtggttcccgttgcgtagatttgtttgcctgtgctttgtgaaaagttgttgtggtgtgggaatcgtaaccagaatcagcctatgtggcagatggatgacctgagtggtcagaaacgaatctgtgtgattcgggatgtctgcgggcatcatagactaggcttcccgagtggaagcggattgttatgctgctgggcagctggactctgggagtctgagaaaatgaaagaagctctgggagccgattaatcaagtggaatggctctgggagccgagaagtaatgatctgacccgggaggtcggtacattaccaaatgagctgttgaaaaacatctcttaaagtcgaatcgagacgcaagtctcttttcggcccaaacttagaaagaaataaatcacttagtgatttcaaaatgtcttcaaataaaagatttgcaaaacaaccttgcctctcttccaagcttgcattaaacacctaaattcccgtgacttgctgagtacgaaagtactcacccttgctctatataaatatatatatatatatatatatatatatatatatatatatatatatatatatatatatatatatagttcctccgccctgaagagaagataaagtgaagtgaagattagggtttcgtcctggttcccagccgtcgcctgtggtgttgggtattagaccgttggttccgctgctgctgttgttggtgttcgcctcgtccgtgtcatcggttgtattctcgggctgtctgagctgcaacctaagttaaggtaaataagtcctctatttattttaaagattgctatgattcatatttgtcaccgtgggtaccagcactatgtcctaggactggtaccgagatcgcggttttgtaggaagcggttcgcgccgttttccctacgacacgctcctatcaggtgccgttgtacggcggtatcagattggggtgtgacaactaaaccataaaacaataataaaattaaaatagacttcacccgttgcaacgcacgggcattttttctagttgagacaaaaataacaaatctgactatgaataatagtgcttgtactactaattagggtgtaatctagtagtattttattactcatgttgtggatcaaatttgaaaatgacttttttggtggatgtagacgagtatcagttaatgttgtcattcagatttttcttataactatttgagtagtatttaagatttacagagaaacgagtactggacatacagttaggggagaaaaggaaaaagcagttccaatcgatgtcaaagtaactaggtgtcagccaaagtaactaattaacaatgaacaagtaagtatgtagggttaactatactgaactgaaaataaatgccatatatatatagttgcatggaatggaagatgaatatatatatatatatatatatatatatatatatatatatatatatatatatatatagagagagagagagagagagagagagagagagagagatctctaaagagagatgagtaataattggatcagtaggagatgtggcaggtggtggggtggaagtggtggggattatgattattagtggtggtggtggcgttggaaggagaagggtggaggcggagcctgagggggcagtcgagcttgatgttggggccgggcagcctgataatggcggacggcgtgagcttgatctcggtcttggcggccatggtgacgtggatggagtagatgccctcggtgtcctcgcggcggaaggcggcggcggcgaggccgcccaagagctggtggcggccttggaaggagggggtgatgcgggtggtgttggtggaggcgggctgggagaagtcagggaggagggcgtgggcgaagcgctggtcgtggtagtaggcgtcggcggcgatggagtggtagcggagggcgaggcgggcgttgtgcctcgtcaggtccacccccaccgacaggttgtagctcagcgtccactccttgagcgccagcgagaaggtggacagctccgcccccgccgccgtcgcgtgcaggaggtttggccggaacatgaggtacaccaccatcgccaccacaagcacgcaccccatccccgccaccacgcagctcgccacgccgcacaccgccgaccgccggcaggggtagcaaacctcgccgcccgctcccattctacctcgatcgcatcgaccagatgactggaattggatgcgagacgaggggagtaaggcgctgcatgcttatgcccctctttgcatgcgttgaactggcaacgtacccactgcaacctgcaagataaggcctaaccagcctagcctgcccagccacatcatggcccacttacttccagccacggcccaactggaaatgggccgcatcaaacagtttaacaaacaagagaaagttctccttgatcacatccctcaactaggggtcgagttttatctatatattatattgacggtgatttttgactgacatggtgccctcgtggcacattgatattatcatcatcctacgtggcgtctaggtggtgcatacatagccccaacttatgaaagtccctgatatggacccacacataagtctacgagaaaaatatagtgaggtccgcatatcatctccccctctctctacacttttatattcctcttgatgtcttggttgtccaccgccaccgggcaccaagggcagtacaaggaggtgctcccttcaagcctcacctatcccctcccccctccctctgagctggcagccacaacgccaatgccgagggatgttaccagggcaagattctccgacaacacagcctattcggttgcaaagaaccctgccaccacacgaatcccctaaccttgtgagggccacaaggaaggagcaacaagggccacaaactggcactccaccagctcccattggaacacctaatgtctctaccatcgggatgagatcggtggcgggtttaggtggcattgctacctactcccaacatggtgggatgggactgggctcgcaagtggcagccgggggagggggcatctctgcatgatgatagcgggctagaggacgtcagtctcgcatcgtcgctgaccggctcagccctcctcgtgcttcccctctcattcccttggctctgtcgagatccttcgtagcctcacacggtcgatgcgagtgcaatgcgcgaggaacaccgatagtagctagggagagagagggggtggaaggggaaggagataagagtgaggatgacacctggtccaactgcacttttttattttttaactagatacccactgacatgtgggtcccacatatatgttttatttttaacaggattcccacttacatgtgtgtcccattgttttttcctctagtgacacataagcatcatgtaggcacctcgtgggacgaaaacccaattgaataagcatcccacgtcagccaaaaagctcttggtaccgcagaggaatttgattttcatttattttggatatagggaatgcttaatacccgattttatggttgatatatagatgtacattactactctacctctatttgagtgacttaaagtgaacattttttagcaaacaactagtagggcctagctaccgctcctttctctcctttctctctcacgaaaccatggcatggcaagttggcaactcctcctatttctaggctgcggtggcgccgcagctaccaccgtcgtccatggaatgccggccactctcaccctaaagcctgcgacctcgactatcgcctgcgatggaatgggaccctcccttttaatttgagcagccaaaggtaattaatacttcttctatttgttctttaatatatgacattgttgatttttagatatatttgatcattcattttattaaaaagttattgaattattattttttttattatgatttgatttatcattaaatatttttttaaggatgacttatattttttatatttatataaaatttttaaataagataaatgactaaaagtttatcaaaaagtcaacggcgacatatattaaaaacagatttagtaataatcagccctggtttctgtttctcccctaaaatccatctccatctactatttgaagaaattaacagggtagctgatggtatgtgtacggtgctaaacctccaaatcggatattactactccagttggtagtgcaatgtcatgtcgaattgatgatattttccttttaagtttgcttctctatcactctatctgcacccagcccaactactttgcttggatcttaattacacagtccgtcaaacccaaaatttactagtcaaaactcaaaacagatatgatctttcaaaaatcaaattacgagtaacaagctagggccaaaacaaagtacacccagtaaaccttcaaagaaaaaagaaaacccaccagtattgtgccttaaacaaaatccaaggaattgaattctgtgaaacacaggggtattaattattaatcttgacatatccatgaatttgtattccggcagttacatattctcgtatgttcatcctggtggcaattgtattattgcgtatcacatattcacattagtttataaattggtgtcaaaattttaaaacttattttaaggttgattttaaagtttattttgatcgtagtttatttttcggcatcgacttttaaatcgtgagtaacacacaactataaaaaaaatttacctacaatattttttacttctgttccattttcatctaagcagctgtaggctaaacgatcggaccaagccaactttgctaaggtctccttcgaaacatatgaatttttcataagaaacatttcaatttttctaaattttttatgaaattcctccaatccaaaataggcctaggaccggccggctgtgaggatcaaatagtgcaggcaaagaagataagattgatgcaacaagccacatatatacatgtagagatatgtatatgggtgtaggtgtttgccccacttagtttggacaaatgcacgcaagagtccagaaatgtcatcatgcaactataaggacatctcaactcccaaccatctccttttcttttcttgttcttttttcctgacaatcaatttatttgctacttctccactcaactggacatatagatcgatctttctagctagtgatgagtactgatactagcatgtcaacaaattaaaggagctaggtaaggtacctggtgaccaatcctttgacaactcgttaattagtgagtattaattaacaatggcaggtaattttcatctgtaatacctttttgtcaataaattaatgttccgggctggcgttggacaactgctgtagtttcctaaaataaataaataaataaataaataaataaataaataaataaataaatatatatatatatatatatatatatatatatatatatatatatatatatatataagctagacggacgtttcatgtatcaattgtaatatgcctagcattatttctgctactagcttgtttaatttattgattaatagctagaaataaattgaaggtgaagacgaacactctttgttgaaaaatgaacagaacattaattgattacaatgttgcaactatgtagtatgcatgtgaagataagtacaattattatatattctagtagtaattacaagattgtagcaattgcttaattatcccctctctatatgcgaattattactacaagtagctgtacacctgaaccatgcagctagccacaagcatggcactgtacgtagtaccaaaaaaaacacaggcatgaaaattaagtaagaaaaaggtcaaattaattcgtactgtaaatacataaaaccactggtggcaggcatatatgcaagattactccgatcctcactcgatcagttgagctgagcttttaattatatagcttcttcatcagggctgtgcttgtagaatgtagatcgatcaattaagcaagcaattatatatggaaggaggagaattaattaaggatgatatgatttgttggatgcatgagaggaggatgaggagatggatggatggatcagacgtcgacgacgcaggcggcggctcgctggaacctgaagtagccgttgccgccgccggagttggagccgtagcttccccggccgtcgttgacgatgagcagggcggggcacctgacgcggaggtggtagtgtccggtgatgaaggcgccggccttgtagcggatccagccgtcgacgcggatggtgacgagcaggtagccggcggtctcgtcctgggtgatggagacggcgaggtagggcgggagctggacgttgttgccggagaggaaaggggaccagacggtgaggtccgggtggccctggtacaccggcggcagcgacgtcggcacggtgatgcggaggcccttgtactcggcgtacacgtcggcgcggtcgtagtagatgcccacgcgctcgttgccgttgcgggcggcgagggtggtctgcatggtgacggtgaggaaggagaagtagccggaggaggcggtggcgccggcgtaggaaccaccggtggtgacgttgaggcagacgacggtgaggtcgttgaggtagaagcgaggcttggtggggcggaggatgagccagacgatgaggacgatgaggaggaggaggagaaggatgccgaagatggccgcgcagcaacgccggtacaggcgctgccgctcgcaatccttgtgttgctcgcagtgcttgatcgacattatatatctatattcttgctagctagctagtactatttctctaaatttcttgtgtaattcttcccaactctctctcaatctgctacaacttgttgcttcaattccttgtagctagcaactaactgggactaataatcgatcttactaataattgaggggtatggtaggaaaggaataattgagaggtatggtaggaaaggaagggctgcaggaat

SEQ ID NO: 18205 - DNA, 6457 bp, Oryza sativa
agcgggggaaaaagggaagagaaaggactctagaggggttctggagcctgaactctcttgctctccggctttctgtaactccttcacacacagatccaccagaacacaggagtagggtattacgcttctcagcggcccgaacctgtctacatcgcccgtgtctcgtgcacttgctctctcgcgaacattccccagatcgatcgaggacgaagaacctcacttagcgcccccggccgaaccggcaaaggggggcctacgcggtctcccggtgaggagtcccacgctccttcatatatatatatatatatatatatatatatatagagagagagagagtacttttacggtataatatactatactagtgctatatattgatagtataaagaagattatgttggaaatttctcacaaaatagaaaatgttctttagtacgtaatttcgtgttagatgttaactcagataataatcctaatggatcatgcgtcagatcggattactgactggatacgtttgaattaataaatggcacaagatctctatagattgctcaaacacataaaaacattagggcttgtttggtttaatactaacttaaattttggtaacttcaatagtaacaattgcatgtttagtttggtaccaaattttattcacaataattcaaattcaatactatccatttggcactatcaagattttggtaggataaaaattggttccaaaccaaataggcccttaatttgtgttatagctagagtgggagagattatctagcatagagaaagatcattttacccccattaaaattttatattgcagtcgatttaaatggatatataggcaaatcaacctacacccttgaattgtttctactagcggtatacattgtaccataaaagttctctctatatataatatatatatagagagatacaaagatagatatatatagccccaggggcggagctagtgtatattagggggtgcctaggaacccggttaagaaaattttttagttataccttatctatttttaccatgtatgcactcccctcaatacaaacttagacatccacatcagcttaaactcggtctaaagtatagtaaattaagcaagtggtaccaccctctatttcgctctagctgcgcccctgtatagcccataaatccatcatccacatgtacatatacgtgtgcacatcgatcgattgatctctgcctcctcctatactacactactactacgtcaacgcctgcgttttgagtaattacgaaaaaaaaaactgcggggtttgacaccatcaaaacatgacaaagtagtagtacaagatatggtagttgctttccaattcagttccagcaacagcagcttgaaatcagtctaagcgcattaatctagcttagctgctcactccaatctcgatcagcaatcgggctaacttagctcctcacagtacacatatatatagtcacacgacacgctcttcttatgtacatgtatccttcaaacaagccctttaatatatatgttattttgtttaaataaaaggcccttgaaatgttacttgtacgtattatatatgaagatactacacgatagatgttatattgcacacacataaaaattctcatacatagttagctaactatgttgataagaaagcatcgcatttttttcaagtctttgtagaaaagacaaattatgcaaaaactggagtagatcaggtggttatgtaccttatgataggacctactaatttatactttttataaagttatagcctactaaatctaaaactcaacatgcaacattgccacattatcacccattaacaataattgcatatttaacctcatgcaaacatacaacggcatctataatttatttaattctacaaatcaatatgtaagcatatccaatcatatcccctcacatcatttgcacaatattttaacaaatctatctattattttttataatatttaaaatatacttatcaatatgtttcacattaaaacacgggtatcatatgtttcatgataagcactgataaaacctaatgtttcatttcattatttaccctgattgtcgaaaaaaacatattgagaattgcttagcaattcccgtagcaaaatgcggggaaccatctagttttataatagtagacatcgtacccgtcgacgtcaaagtgcttgtactagtttttcttccatttcaaggtacgctgattcatagagataggagagagaggttatgcgcgagtggacatttgtattgagtttcgtaaaaagaataggaaaagaaaaagaaaaactgtaggaaaaataaattgggtttatcacggcacgtaagtggtaataagaaaagaaaagaaaataggtaatgggtagagaagattgctaacttgatcgttgagctgctgtcggatgaaatgaaatgaatgaaatgaaaggtaggaagcttcttaacagaaaaaaaagagcggttatgtagagtatataattatatccgcagtaaagcgaaagagatatgtatgtgtgacgacttggcccactcaaatctatcaaccaaaagctgatgagaagaaactgactgactaagtgcaccatataaaccaatgaaagcaatccacgtctatacgtaaatagttagggacagattcagcacaaaaaatgtatcgtattcaagcagcagaacatcgattgagatcgatcgatcgatggatgatcggtccagctagcttaatgaaattattagtaatttgacgttgtcaaaaggcaagcgcattttccattttttgaggacaaaaggcaaggcattggtgaatggtgatagctactgcaattcactttttcttggcgatcgctagctttatactaatattttgcaatcgatcgatggagtgcgtccatgcgaccttttgttgactcgatcgaacatcgatgtatcctcctacctcagcttacatatatgcataccaaatcaacgggaaaaattcaagcaacaattaataatttcagtttgcacctctctctctatatatttaccaacggggccggctagacagtttactttcaggcaggcaggcagcagcagctattactatcgagctgaaaacgagttcagtacagctgcgggcatcgccggccggccggccggctgctccccttcaaccaaccaaaaaaacttaggcttaggtcgtcatggagcagcagttgtcctcgccgtcggcgtcgcagcgtggcggcgggagggagctgcagggtccacggccggcgccgctcaaggtccgcaaggagtctcacaagatcaggaagcaggagccggtgcagcagctccggcagccggtcatcatctacaccatgtcgcccaaggtcgtccacgccaacgccgccgacttcatgtccgtcgtgcagcgcctcaccggcgccccgcccaccgcaccgccgcagccgcagccgcaccaccccacgctcttggcgcagatgccgccgcagccgtcgttccctttccacctccaacagcaagatgcttggccccagcagcagcactcgcccgccgccatcgagcaagcggcagcacggagctccggcgccgatctgccaccgttgccgagcatcctgtcgccggtgccggggacagtactgccagctatcccggcgagcttcttctccccgccgtcgttgatcagccccgtgccatttcttggtgcaacgactacttcttctgctgcgccgtcgacgtcgccgtctccaatgggcggcagcgcctactattgggatctcttcaacatgcagcagcagcagcactaccaccaccaaaattaattaatttcatccatcaattcagatatataatttgcacggatatggcgcggtcatcatcacaatattggcatccatttaattagttcctaagctagttagggtttaccatattttttttagatatatgacgtcatagtcatacaggagaaaatccactgtcagatgatagagtacattgggattaattattgatagatagtcgatgctaattacctcgttagctagctagcttaattagttagagtgcacaactgtaactaactctagctagctgcaaggaagcttcatcgtatcgatcgccagcacctactaattgattttctccgatgtacttgctgtaatttttcactcttgtaggcaccccacttaatttggaggtgataatatacctagatgccacagtgtataatgtaatattcacttcattcattttttatataaactacaggtatgttaaccagttgtgccctcttgtattatatatgctcttgattctaccgtacgtaccacaccatgcacgcattgcggtcagttcagagagaaaaaaaaaatcagaattgctaacctactgccgacataaattgcacccctaaatcttgcagattttgagccactggatgagcttcgagattcatgctccaggccttctactccaactccagtgacctcctcttcttttccagcgccgacgacacctagactccggcagaggactctacgggttaaggtctcgaggtgaggttggggtgggaggggcaaggggaaggggaggagttcttcggctctagagggttggctaggagaggcggcagcccagcggtgggcggcgagacgccggcagcggcgccggagcgcagggctggaggagggcggtggaccagcgttggtgtcgggggcatctcgccgccgacggcttgaggaggaaggaggggggaggaggaggaggctggctggccgagggatctcaccggcgccgttgacgccctccggccagccggcgaggcagcaggcggcacagtggggcggtggcggtggaggaacacgcgatgggaggggaacgggaggaggagcgctagggttaatgcctctgtacgaatcttaaagcatatttgatggtccaaaatttgaaggataggaggtgggattttatgtcagcagatatataggccgtctcaacaaaaaatttgcgaatgtatacgatcgatcaatgaattaatcatgcattcatatatatacaagagtgtatgcaaccatgtcccgcgactggcaaaagaactagtcgttctcgctctcctccctcgtcctagttttgcgtaacatagccgcatcgccatactcgggcgctgttgtctcccttcctcgacgcggcgaggctacaccaactggctccttggacgagcagtcgccagaccgtgcatggttaagttcatccgtcgtcaatggatgccgatcgagtttaattggcgcctcctccgacgccgtcgacttaatcttggtgagggcggcctgccttaggagcctatggtttgcatagctctgtccatccccattgccgttgacctgatctcgtcgagctgaggcctatgacgatcgagcagatcaacataacgagcatcaacctctccacgctcctccgccaagagcatcaacatccgttgctaacaagtctagttggaggctgcccagtgaaacgtcccatcctccactgtcagattggagaaattgattggggaggataaatatctataggagtgagaacgaaaaaaacaaagagaggctgataagtaaaacccattatcagattggagcgcaagccacatatggctctaaattgtttgcctagctaaccaaataagggcacctttgaatcaaaggattttatgtagtaatttcatacgattcaaattctataggaaatttttctatgtggccatttgattcaaagaattgaagctttaatttctaaagaattgaagctttaatttctaaatcctatgaaattcctatggaatggcttatttcatataggtttttgaaggaaacatagcaagagctctaacctcgtggaaaatttcctttggatctatctctctcatccgatttctgcgtttttcatgtaatccaatcaaacgatcattcatgtgttttacctatattttgcaataatctattttaaacttacattcatgtcttgtgtttttttctattcctccgtttttttcaatcatgcgattcaaagggaccctaaatgtttggagaactaaaaatatccactctattagagatgctccggtgaagtgtccaatgcatggagatacaaatgatggcaaggaaaaatggcatggaatttctgtttttagcctactcactcattaaacaatctgaaaatagagtattttcatttggatcaccttttcattgttgtagtaattaattatcatcaatcgcacaaatttgatggtttggattaaactatctattaaaatcaagacaaaatttgttctcacctgtcaaaatttgttcattagcaattattgcttttaaatatgaattaaccactcgttataaagatagattaaaaaaatggagggagtactcgtgtaattttattcttttttgtgctgg

SEQ ID NO: 18206 - DNA, 1480 bp, Oryza sativa
aattacaaatgtctacaactgaaaagagactagacatcagctaattaactttagcgtgtagttttaaaataatggactaggcttgtctcttatgtgaagtacagacatcctacatgtgttagttgctgtgctatggcttgttcaattcttgaggcgcataagttattagcacaaggcgcataagttctctgtgcataagttctctgttttgtgacagaaaggtcatccagtaaatttgatgtctttaatactaacctttcacttgtgtattatgtaggatcgaaacacaagaactaggccaaccagaggggggtgaatggttggtatacccaaaaaccgaaaacttttagcggaagtaaaagttaccctcaatttcgatgagatcggtctgaccgaagtagattagccggtctgaccgaagcgtagcagccggtgtgaccggtgttgatctaccggtctaaccaccgagatggcttgccactcgttgtcgccgccgctggtctgaccgccgtgctcccgccaatctgaccgccgcaatgccgccggtctgaccgctggtgagttgccgattagaccgccgaaacccggtgaaacacaaatcgaagaactcttaaagtagatgacaactttattgattctctctgtgtttacaaagtacaccaacagcactccttataaaatttcaactaaactcgaaaccctaactcaaaactcaactctattgctctgaaaagcgataccgggaagcctcacgctccccttctatttatacatgaggtaggcagtctaaagccacgaaccaaactcatactaggagtcctaaacaccttaggaaaccctctagtacaagaaagaagctttacataaccaatcgtaccaaatttggattccttccaaattcaactctgcatcccatacgcacacaatacctccatcatatgccatatggaatctccatcaaccacgtgcatcaactctagcctaagtatcccgcatgatctctgaccaccacggacatcgtcttatccccaagccgactcccggtccatcaccgcaaatactctcccgagacatcgagtcacctacacatggaacaaacaaagaaaccatattccaagtccaagctatctccaacttgactcattagtagcaaacaatagtattacatacgtatagtatccatctagaagtcataatcatgaaataaactcggatattcaaataaacaacccgaaaccgaaaccgacacagtgtcggccggtcagaccgcgggctggccggtccgaccgctcgaacaccaccggtctgaccggcaacacctgcccggtctgaccggtcacatgaaataatgaacctacgattcacctgtgaaatccagtcatctccaaaaccacttcgtaaataaattccaaataacaaaaccaataatctctaatgcccaattgttcatcacataataataaccaagggctgcaggaat

SEQ ID NO: 18207 - DNA, 1570 bp, Oryza sativa
attcatgatttcatacaatttataatgcaacatcttaacaagcacataggttgaagaataaacactaaacacatatacctattgcatttatcactctttctcaaataacctttagcacagaataaccaagagaatttgttttaactttttcttttcttgagcctttttgctcatatttttctcttttattccgggtacgtccctgtcgtcaagactgtttccagggattcggtacccattattttgctcacatcgaatatgtccttgtcgtcaagactgtttccaaagattcggtattcatttttttatatttttattctctttttcacaatgagcaattaaagctatttgagaaataacaagtcaataaagcatataaagcatatatatatatagagcatttatagatcaaaccatatgctagcatcaacattgcatattttcttaattcaagtattgaggcaaaagatttgccgaatatattagaaaagggccgagaagcttacattacaaattcaatagaccttacagaacagaattaagacaactaaatacatcttacaaggacacattgtcctacaaaacccattaaaaaggtcttctcgagaggcttatttggtttatattttcctgagtcaaagaagccacctgattttcagtcttctaaatctgttgaaaaatccttcgattacgctcaatccatatattccaccatataataatcaagtctccaagaatcttctttcttctagatgatggtgagatttggcataacatattccaccactccgcatgggaattcgttgtctattgttgtggaatgttactatgtccctgccattggtagattttgccccacactgctattgagaaggggcattccttagctaaacggcaattatcttcaaaagtgcttgtgcaataaaggcaacatatccaatcacaaggccatcgtcttttaagaagattctctgcagttagagccttttgatgaagtaaaatccatccaaaaaatctctgcttcggtttagcttgtattgtccatattggatcgaaagaagcatgggtgatagaaccctgaaattgcgctaagtatgcactctttgctgaatattgtccattttccgttcatttccacaagatatcattggggcagtcttataagagtgctacctcttgtagtcgagattacaagtgctacctcttgtagtcgagagcctaactgaatcaattcctcaatctcttccagcgaagtaatttgattcagcaaacttaaccaatggttattctccaagtccatctttaattaggcaatttgactttccctttgccagtcaaaaaatagagcactccttaggcgatcttccttccagccagttatccatccaaaacttgatcttcttgccatttccaattgaaatagaagtgcctgctctaaagagcgttgtatcagtttcatcacacggcgtttgcatgttaatccaaggttttgagtcttctttccattcaaaccatagccatcgagttgactaccaattaactgcttcttagaatcttaagctcccacaag

SEQ ID NO: 18208 - DNA, 12864 bp, Oryza sativa
attggcacgcctgcatctcatcaaactttggacctacactggagctaaacagatctcccagaccgttgtattcgtcgacttagttcgcgcaacacaattccggcaccatcgactaagcgcggatttttcgtcaacacaaccctacctaacacgacgatcaaatggaaattttcttttttttaaatatgatgattaaacggaacagagggagtataagttattcacaagaaaaaaactaataagaaaaaataaatacaaaattgcgatataacatatcgcacaactttccttattctccgacaacatagtaattcctctctaaactctaacatgaaaaacaaacatgatgactttgtcacagaacactattcatgtataaattttgatcactcatcttttttgcaaaaaaaataacaaaaacaaaaaaacaaaaagataccatattatcaaaacgtgttgtatcctaaacataagcgttaagttttcactcatcctagtctaaccattttataaatattagtggccaaaatttaaaaagtgccaatcaatttgtgacaagtgtttggtaacaaagagagtagataatttagataaaattttcattttaaccgctcaactgcatgacatcgaagcaaatttcctttcagttactatccctctacaggtattgattttgcaggctattctttatgtacaaaaaaaacacagtttttggtagccaaagttgtaacccctaactgattgcggctaaagttaaaaaagggagagtatgatttaatttgacaaactgaagtgtgaagaagcgacatgagagcagttctgaatatccacaaacaacataaccatagtatatcagcatttgttgtttcaattaagttgatgaaatcagatacaagtcatgagtcaattcaccaaggaagcaacatatagagacagagagcagcaaaggaaggaagcccttgagaatggaatggggaagaagttgcactccaatcgaatccaaaaaaagagggataattaagtcgtctaatcattcattcattcattcacttgatgtgcaggtcacactgcaagcactagtagttctagtactagaagatcaccaccaccagaatcaatcgatactgctgctcccactagcatactagcaatgtgatggatccgccatttacaaaaagagaaggaattatccatccatccatccattggaccggtggcctagatgtcgtcgtctagctcgttcttctcttcctctgcaccatcttcatcttcttggtcgtcttcatcagtgcctttcttgggtggctgatctacctcctgctcgcctgcgttgccaccaacattgttctcctgccatcacaatattgatcaattgtttgtccagtaaaaaacggagggaggaccggagggaaggcaaagagaaaggaaaaaagagcatacgtcgctgcgctcgccattgtggtactcggccttgagctctgcagccttgtccaagtaaggcttcttgtcctcgtcagacatggatttccacctctcccctccttccttggcgacagcggagacgctcttgttgtcagggtgctccgccttgtactccttcctgaagtcactcctgcatattaagcatatcatacatcttcttcttcttcttccatgggaatggaagccaagggaagggaaggaatgtttgttacttacatgaagaggaaaaaggcagtgggtgggcgcttgccctttttggccccctcgccattgttgttgttgttcttgccgctcttcttcttgctcgctgccacctccacggcctgctccaccacctgagcctctgtaagcacagatcataggaagaagatgacgatgagaatcgcagattcgtaggcagacaaagagagagagaaatgagcagcaacctaggctgatgcggatcttgtcgtcgaggctgcagttgtgcatgtcgatgaggaccacggagacgctcttgccgcaagcctcgctgcaaaccaaacccaactcactcccatgtttggattgtattggaaatgcaaatgaaagggggaaatcaaagaaaaaggaaacggactgaccagcgggtgaaggcgctgccgtcgcgcgcgcgcttcaggacggcggaatccgtcgcctccacgcgcttcctcgtgcgtgcgccggatttccccgccattacagaggagaggaggagggctatggatttggaggagatggaggtttggcggcgagtcggcgaccgccacgcgcttatataatcgaatcgaattgggggacccaaatccaattttatttgcccgctccccgctcgcgcgcaatctcttctcttggatgccgcgaaacaacattcattacttggcgccactccagccactcatctcgtccgttgagccttccatctcgctggatccgacggtccacagtgctcgctgggaatcaggagctccgcgcccacccaaattcccaaatccatccaaatttccaaatccccgcttcgttttggtttggagccaaactgaaagcattttcattttcaggtcggctttccctccatccctcctcttcagtttagtttggttccctttcaaggcttgctaatattatattctcaagtgcacatcttaagctataccaatttcatttctcgacaccacacagccacaaaacatcaattcaacggattgggatcacctgcagtaggaatagcgaccgcaagttaaactactgcatgcgattacagccgttcattttggtgatgaatggaccagatcttccgctacagtactgacgcaagaatattgaatatttcttgttacagtgttctacagtatccggatgcatttgaaccgttagattcggatctaacatgtggcagtggactgcataagggcatccacaatgtaggggagaagtgggtattaggaattaaaatattcttactactaggtaagatacatcgtggaagtagtaaataactactaccaagccataagcttgctacaggttatagcactttgtggtgggtcctacctaatttttaattgtgacatggctcatgtttggggttctttttcagataggtcccaccttattacccactctacacatatatacattgtggtgcatcttcaatctactattaccatcttacatgggcccaccttactacctacttttgcaacatacattgaggatgccctaagttgcagtgatagtactaactgcacatgatacaaatcccaattcaacaccagctgctgtcaatttcatttcttcatccaacgatccaaactcaagcaactattccctccgtctcattttaattatagccataattttccgtgcacaactttaattgcctgtcttatttgaaaaaaattaaaaacataagttacgtataaagtattattcatgttttatcaactcataattataaaaataaataaataagatagacgatcaaagttaggcgcggaaacttatggttgcagttaaaataggacaaagggagtagtactactaccactacagcaattcaccacaaatgccacccttttcaccaaaccacaaaaggtatcttcacacatatgtacacagctcatcttttttcactggaatgtatagtagcaaagccatttgggttagtttcctgagtacttctcatccacaacttaatactcagctaaactgtcttatattcaatgcagtgcatcatgaaccctaattcaatcttattaactttaattgaacatgaatatgagctaatcttcactaagcaataaagataagaagctaaacagattatattaggcttatttgactcgaaattgttcatgtcgaaccaagatggcaccgatggcttctaatcacatggatgatgtgaataaggaattgagtaggctaaagttaagctctaataccacaatgttggagttctaattcaagatcttattcttttagcatataaataatcacctttcaattacgaaaattaattctctgacttgagatgaagccattaaagccgatatctggttttgaaataatttcatttagaggctaaaataatttttcatcaactttatttggctaagaaggcttataaacaaatttcttaacattataagcattaaaattgacaggatttagttaaatttgctttcggcccagggcttccgaagctggcccaaacttgggccggcccgtctttgctcgagccgagtcagttcgacggctcgcaagccgagcaaccgagcgcggcccacatacgcggcaatggcccgatgcacttctgtggcccattgggctgcgtaatcagcggcggcagcggcccgacacagggcaaatctgaaccgtccgatctaatggacggctccgatcgtccctgcgccggatgaagcgccgaccgggagagaggagcaaaaccctagctcctaaatccttctctcccgatcccctttctctccggtgacgagagagcggaacgatggcgaaggcagcgatggtggtctagcgagctggtgcgtgtgggtagtgacgaccgccgagcagctcctgcttcaccggctggggggcaccaagccatgccacggcatcggcggtccagcgaggcgggcgcgcaaacggtgatgagcgccgagcggcccagatctcgtcggtagggcaacgccaatgccaatgcttctcgtctccggcaagggacggtggaagagtgctccaggacagcgcacgcacggggaactcgacgcgactgcgaggaggagaaggtgcggcggtgccgcttcccggaaagctctggtgagattataggcttcaagtccggtaagtaacctgaacccttagcttaattgatttcaattttgactcttagggttcttacccgaaattagggttttttgaatttggagaattttgtcgggaaatttcaatctattttattccctctttttaagtctggggagttttgatgaaacaattattattattattattattattattattattattattattattattattattattattattattatatgggtattatctattatattattaaaacaactttgaaaggaggcaccacattccctgtggaggctgaaaattcccacattactcggagaaaaagaaaaaaaagaaaagaagagtccaagtagaagtataatttaaaaatagatgaaattcggaattaaaaataagcaatattgaaagaagtttccatataagaatcaaatacaagattaatcaaaattcgaaataaaaataaaataaaatctaaaattagaaaaggaaaggagagttcaagtagaaatacaatttaaaaatagctgaaaatcggaattaaaaataagcaatattgaaagaagtttccatataagaacccactacgagattaattaaaattcgaaataaaaataaaataaaatcttaaattataaaaggaaaggagagtcaaagtaggaatacaatttaaaaatagctgaaattcgaaattaaaaataaggaatattaaatgaagagttcatataagaaccaaatacgaaattaattaaaattctaaataaaggtaaaaataaatccgaaattagcaaaagaaaataaaataagagttcaagtaggaatacaatttaaaatttgctaaaattcagaattaaaaataagcaatattgaaagaagaacccatataagaacccaatacgagattaattaaaatttagactaaaaaaataaaataatatccaaaattagaaaaattaaaagagattttaagtaggaatacaattttgaaacaattgaaattgaaaataaaaaataaaaacattaaaacaacacaatacaatatcaactaaatttttttaaaaataaattctgaaattaggaaaagaaaaataagatttcaattaggaatacaatttataaataactaaaatttgtgataaaaataaagactattgaaagaaaagactatctaaaacacatgatgagataaattaagtaacatggctataaatgagtagagtggtggcggttgatatgacatataaaaattgttaataaaacaccaaatagaatcctaatgacgattaaaaggagggatgtcaggcatgccgtgaagcaaacaagtaaggcggttgccgggacttctaaaagtaaaaaaaaacccattgataatcatttcaatttttaaaatctcaatgacaataaaaagaagaagcagcgtgcggggtgtataagagtatagttgcagagccgccgacggttgatgggacttctagaaaataataaatgaattccaatgatagttatgttcaatttttagaatcataatgacaataaagagtaagcggcggacgggctgtagaggggcatagtggcatcgtttgatgggacttttaaaaattataaaaaaaaactacaagtccaaattttaaaggtttgtaacttttaaaaagtaaaaaaaccaatgataatcatgtttgattttaaaatgtcaatgataataaagaagggaggcaacgggcgagccgtagaggagtataatggcaaagccgttgacggtttggattttggcggggcttatagaaagtaaaaatgaacccatacgataattatgttcgatttttaaaatctcaatgacaataaagagaagagacagagtggacgggtcgtagaggagtataatggcaacatttgacgggacatctagaaattataaaaacgaaacccaacgtgacaataaactctaaaaactataaaatacattttttaaaggttccgagaagaatggattgaaatagtggtagaatatagattgtcccaaagatgcaaaattgttttcttttttctttttattctaactcgaataagaagaagaggaaaaaattgcaatggatttaaaactagaacttattcttacgtaaatccattgggagatgcttctctagagtgtcccatatatgttttccatcttgcatacgaaaactgtcaatttgtcaattctcatcagatcttcttccgtcttactcaaaaggtcaaatagtgtatgaatattagcccttttgagacaattatacgttctagaaggcagttctaattgatcgataaaaatacaatcaatggaattctttttttgtttttctttagattagttaatcttttttaaaagcttaaaaggggaagtaaacctgtttttattttcttggaaacgaaaaaaaataaagaaggagatgacataagaggtagcaactggtgtgacttttaaaactactccctctgtttcgaaatgtttgacatcgttgactttttagcacatgtttgaccgttcgtcttattcaaaaaacttttgtgagatatgtaaaattatatgcctacacaaaaatatatttaaaaatgaatcaaatgataggaaaagaattaataagtacttaaattttttgaataagacgaacggtcaaacatatgataaaaagtcaacggcgtcaaacatttcgaaacggagggagtatataattagaaacacgaggatgataaggtttggtctttcaaagtcttaagacaatgagacagctatttaataaattttaagtgaaatcatactttaaaaaatatatgatctagtttgatatatatatatatatatatatatatatatatatatatatatatatatatgggtttattttaaaaatttttttattattatgagtagttaattacagtaaaaggggaaaaaagagagaagggaaaaggcgacggcagaagagaagagaagaggcgggatctggattgtggagatcgaggatggtgaagacggtggtcggcgacgaggcgcaggtcaaggcatcggaggaaaccctctcagcttccacctctccagctcaggtttaccctactctctcatcgccggcagccgcagccatggccagattcatcttgatcttgatcgcaggtggggctcgtcgtcggcaagctcagcgcctcttccgaccgtgccctcgcctactccctcatccccacgccgcccaccgattccggcgctcccgcttgctccctcctccgcgccaagcccgccgccaaagctgcctcttccggcgcgtcctcgtcgctcgacttcgatgtcgactggctcgccgagcacgcgcgccaggtactaactaacgttccttcccaacctagctaagctacctcatcacaatgccaaatccttttattgtcttcctcctatatcagatgcacaaacccaatattttcatatatcaaaatctgatgtaacaatcacaacccccataatagtattgcaaatcggaacccccttagtctctctcactcatgaactttacgtgggtaagatgcgagcccccttttccctattttgtcttggaaacatctgaatacataccttctatcaatcacaggtctcgaggatgcttcttggaggaatgaccgtcataggtatttacatatgggcgtcagaagcttcattcaaagcgacttcccctgctgttttatcacaggtaccaaccttctccttccattgataatatgggttttgggagtcaggtttcatctttatatcatgccattttcttttgttttcgcatccacgccttttttttcccaatgatgcctcgtaatgtggcatggacctgtaatgtaaaggatagtttgcttctcctattttccaggttcttagagctgtttctcaggtagctcctttgtatggcactggtgttgatgagaggctgctcattcatatttcttacagcccaagaaggtgctccactatttattttttgcggctattgcattcttacccctactttgaagttcaattgtgattttaccctcgttttttagggtttgtatttttacccttgtttttttattgaaatgaagaatagatttgcccctactttggatggctgtgttaacggtgttaagtcgagtaccaaaagacatttatatccttgcttctattgcagattttctcttacttctgaacaaacaattgtgtttttaccctttatacatgaaacttggaactaactgtcgaaacaagatttcggcaatataaaggggtagcgcacgagacctaaaagtggatggatgcggagacaaggatttagacaggttcaggccctctcaatgagaggtaatactctactcctgtttgaggatttgaatccgccggatgtagtattgatctgacaatctggttgtgaatcatgccccctagagggcctcctgcccaccttatatagaatggggggcaggattacaagatagaaaccttaaccaatacggtatcggtttcctaaatctactttacaatattatcaaaccaggattttaggccgttccataatatacaaggaaacataatacccaagtcatgatccgttacatatttcatagatataagttatcccctataaccagtcagataaccgggtatggggtacccataatctccacactaacttgtacacaacgttttcttgactaatctctcgtcatctcgcgatgctgctacatcctgctcatgtgctccactccaggccgtatttgccggtccaaatgcttctctaactgcaaaaccatgttgatacatacatcaatattatagtttgtttgttcttaagattaatcaagatgtgcacacaagaaagtatgtttggaagaaaaagagaacaaatagcatctggaagactgaagaagtaggaggcttactctgcacgcgtcgacgaccggccaccgtggcctgcttctcgcgccgctgcgagtcaccactgcaaattgctgctagcgtcggggagatgtcactgctgccttctgctcgtgaagccgccgccgcgccctgctgcttgcatcgaggtgcgcttacctgcttctcgtgacaccgcgccgaggagcggccgctggggcttgctgctcgcgtcgaggcacgctgagaagccgccgctgctgcctgctgcttgtgttgtcgagccggctcgccggagccgcctccgccacctgctctttctcccctagagtttggggattccttggtgtgggataacaaatctgaccaaacatatttactcaagggtagattgggaatcccatatttcctaaatattttttcccttttcatttatatttctttcacttgatattgtgggaccaccaaactaccgtttaaagtaggggcaaacagtgacttcgtttagaaaaaaacaggggtaaatatgcaaaccctaaaaagtaagggcaaaatcacaattgagattgaaagtgggggtataaatacaattctcccttattttttcctacattactttggttccttctttaactgtccatgttctagaaccatgagctagaaaatcacttttttctttaactagtaccatttctactttcttagttcttttttccttttgcttcatgtggttcagcttgcgttctgtctatagcctaccccaacttggttgggcctaaagcctgatgattttattgtactttgtattcttctccaagtaagttatatggggtcagttgtccgcttagcacttgaatcaagctttatcacttggtgagcctggtcgtcaccaaatcagttgacataaatgaaaatttagtgtagttcagtgttatggtggttctggtattacaattctccttcttttgtatgccaactgatgatgctgctcttcaaattctgccctgctcaactgcattttgagttaagctattatattttaggataaattctcagtacatgctgacatgcacacctcataatacaaaatgaaaattttgatgtgttacaggtgggcctgtcgtatatgtgatatgagctcaggacgtttaaggccatgtgacttcaagtatagtaaactattagcttctcttcaaactttcagatgcacatataattttgagataaggtactgctttttgaattctgacgcatccttagatccaacaattcttgtctactttatgtcacaaagctagaaaaacaccattcgatgaagtgttctggactatcaaacattaaagatacataaaaaatcaactatgcatatcagttttaatgtgtcacatgcactttagttaatccatgcatttggcaatagtacatttccctgtattgcaatgagatcccttctgtcacattctgactgatgacatacaatttgcattgcatactgccatagactgccagttgttcaagctgagccttttaagaaggttatttcgaaggcaatcagtcatctcacgaagcaagtgcagaatgccaaagctttgattgatggagtcctggtatttacacaacttcttagcccttattcagctggagaagtgaaaaaaaagatactatgagtcagaataatttgcattgtcttagaattttggagtcctctagttttgtttgtgcttgacatcctctcatagttataatgtattttcaactagtttttggatggcatggacaacactttggagggaccacataacgttgaatttcttgtgcctttcaagaacaatttgcctgccgaaggtgccctagctaatgctatttcctattatatgtgatgatcagtttctctttatgtcattatgggagccttatggtaaatgcttgcactaaagaatgcagtttagaaggtgttgctgggctacttctctttgctggatctgtcagcgccttggcatacctgggcccaaaagagtccattgcagaagttatatctgatctaaaggtagttataatatactaatttccattatttatcactgcaccttgtcactttttcccatgatggactagccagaactttataaccaccttcacatgctaagcttctatgattgaatctgattgattatcaaggaagtggcaatgcatttagtggtgaaaatgtgagcaagctcttcagttaggatttcagcactggattgggaatttcaagaatctgatcctggaaaaaaaatactgaaacttgagttgtgactgtaatgtagctatatgtcttgagttaaggagctttatggctactggaattttgattctgaggtataatttttttaaagatgggattcccttatatggtactgaatagtgaataatgtccaaagggttcatatcatgaatctcccttgcattggttgatttctagtcccaaccatcgttttatagaactactcgaacacttgtcgctgttcagcaaactaattagtgctttgtgctgtctgtcgacctgtgcgtattcagctggacatcatcacaagcctgagaagcagattggacatcatactagatgaggcagatgatgactctactactaacaatttggagaattcactgtctcagaaggccactcaagttgtttttcatgagttgaggtacttcatattttccatgggacatttatattttggagtgaatcaaagtacacaaaccatgtcttacattttcaagaagtcaggcctgtttggtgttatggtccaaaggaacatatcttgatgatattaaattaaagcattaagatttcctgtatttacaatagatagaacaacaaatatgttgccacttagtctgttgttttcttcatgatctttgcaatgttttatgcagctgattacatccttcttttcgcatacagagcaccttacagttttccattccctagaagaattctgataccttggttggctggctcctatatttgtgactacttgcaacaatcagaaacaatggaggtatttgttttttcgtgtagctaatctgaatgcacaaggggccttttaattgtcttaattgtcaaagcctactagtaatattccaattcttctagaaca

SEQ ID NO: 18209 - DNA, 583 bp, Oryza sativa
tccgtcggtttggcacgcaaaccgaggccaagcaagttaagtgctgagagatcccctcataatttccccaaagcgtaaccatgtgtgaataaattttgagctagtagggttgcagccacgagtaagtcttcccttgttattgtgtagccagaatgccgcaaaacttccatgcctaagcgaactgttgagagtacgtttcgatttctgactgtgttagcctggaagtgcttgtcccaaccttgtttctgagcatgaacgcccgcaagccaacatgttagttgaagcatcagggcgattagcagcatgatatcaaaacgctctgagctgctcgttcggctatggcgtaggcctagtccgtaggcaggacttttcaagtctcggaaggtttcttcaatctgcattcgcttcgaatagatattaacaagttgtttgggtgttcgaatttcaacaggtaagttagttgctagaacccatggctcctttgccgacgctgagtagattttaggtgacgggtggtgacaatgagtccgtgtcgagcgctgattttttcggcctttagagcgagatttatacaatagaattt

SEQ ID NO: 18210 - DNA, 643 bp, Oryza sativa
taacttttcctattttctacctagcacataatatatagaaaaataataatagctaaatgatcatgactctcaagttacatgtacttttctcagtttatttgactttttgtgttatttataattaaattcaagacccatattgcacatatttactatatataagttagataatattgctattctgactacaaatatttgagcaaaatagcacttcgaaaatgatgaatgaattcaaatgtgtgggtctaaagtccaagttcaatcaccaccaaagaagcttggaaccagaatgcacactctgggcctgatcccgacgaaggcggagctacaagacattattagcgaggtggcatcatcaacttctacaagttcctggacctaatagcgcactaaatgattagatgaaggacaaggactaagaggaggggagcagagggagacgttccatgtcttcgacaaggactagaaaacagcttcatctttgccaccgagccccgccacgtcatgtccaatgtatcaaaagaggctcactgatgaggaggtcaacaatgatccgcgaggctgatggtgacaggcggatcaccacaaggagtttgtaattaaattcaaacaaaaatataaaacaagcaatttgattaaaata

SEQ ID NO: 18211 - DNA, 660 bp, Oryza sativa
  unsure (1)..(660): unsure at all n locations
ccagcgttcccagcagggagcgccctaccggcaagtggtgcaccgtccacaacacctccctccatgaccttgcggactgtcgcgcagtcaaaagcttggctgagcggacaaggaagtgggaggaggagaggaggcaggagcgccgggaaggtaagtccccggcggaagaatcagatccgagggaaaaggaatcccctgaatttctatagggacggcagggctataatactttgctgtcataaccccgccaggggtggtgatgagcagagggtttctaagcctttctacccccaactgatttctccccacgaatggcacagatataaacgagtgggaagctccagagtcgaacaaaatggtagcagggatggaatgaacgaggaacgtaccaacgatgacgtctggagttgtcagcacgtcctcggccgtcacatgattcacacggccccgaatgacatccttcccgccgttgttggagcggggaggcgcttggccttgctgacgccttggcttcnggcatttatccgcaaagtgccccggctcgaagcaggtgaagcacaaacgctgctgaccttgagcgtttctgcgggcctgaccagctgcacagctgggcgtagaggaccgggcgcacgaagtcccttgctgattctgttgctgctg

SEQ ID NO: 18212 - DNA, 955 bp, Oryza sativa
ttatccctgcataagtcaggctacaatagcacctggactacatgcagggattacaaaataggtggtaaccacatttaccgcgttaaccctatcaaattcaaataaattttaaaagtaatttgatttttttaataaattttgtatggtttctcaagctttattttgggtaccgtgcttactgccggaggcaatgggaaaccctcactagaagttgcacctgttcttgtctgtgcaccatatcatgttgaatcatgtgcgttgtgtcctttcggaagaaccgatttactacatgactcatcaattccactttacgtatcaaaaggtttgttatgggggcaatgcttttgtgaaattaaatttttattttgcgtcacgttgtatctagttaaacactacctacctaccattacaaaacctcattccacaaaacgatgcatctagataaaaaatatgacatgtaaagtgagtaatgactcatgtttattatcaaaaatcgataacaatcaaatgatataggtagtaaagtacctttgaaatggcatgtccaagtatgtgtagctccacctagcacaatatcccaagtgatcatcataaaaggcatacaaatacaagcagccgatgatgcacacaagaaacaacacaaattgcacaaaaccaaaagcaaccgatgccttgagcatagagatcatgctattcccactataaatacaaatgcaccatatcaagatgctcctcacccttactgaaaaatcacaaacatcaaaacgttataagagttctctagcatccatcacatagccatgaagatctttgtcatcctctctctcctcgccctcgcagcgagcagcgcctcggcacagtttgatgcttgcacctatgggcaatgccagcagcagccgtttatgcaaccgatcatgaacccgtgcaatgagttcgtgaggcaacagtgcagccc

SEQ ID NO: 18213 - DNA, 12259 bp, Oryza sativa
aactaaaatgtggaatggttggcctgggttggcttgggacgagctgggacccagggtcgggttgccagttcggtctgaatcatcgtaggccttgggttaaggcaggttcgtgtgggttcacggccttgattaataatattggatagttctaggatcgtgtttacaaagtagctttgagcaactaaacgtctttaaatgctgtttactgcaaccctaaccctttatgttataattccttgtactcccttgcatttattctgcatttgtgggtgtgtcttgttgagtacggtggttgtactcagtcttgctcaattttccccaagcccagatgaggagttcctggaagatgaaggctttggtgtctagctcgtgcctgccgtcaagcgcctgtggtcgtcgccctagtcttccgctgtctttcgttgtctttgtgtgtgctgggccttcgttgcccgtgtaataattttatatacgcttccgcttgttaaactctgatttgtatcaacttttggtgtaccttgcctcctgggacaaggattaatgcacgcacgtcaggaaagcccgttgggttatttccggtcgtgacagcaggactccctccgccttcagcacgggaactgggaggcggagctgaagaaaaagctcgacgccgcccaggggtttcttgatgccgccgctgcccgagagcagcgagcgacggagaccgaagcggcgctccggcggcgtgaagaggcccttgaggcgcgcgccatggcgctggaggagcgcgcctgcgtcgcggagaaagtcctggcggaccgcgaggctgccgtcacctcccgggaggcaacgctggcggcgcacgagtctgcctgcgccgaagaggagtccgcactccgcctccgcgaagacgcgcttgccgagcgagagcgagctctcgaagaggccgaggccgaagcgcaacggttggcggactccctgtccctccgtgaggcagcactgacggagcaggcccgccgcaatttggaatccgtccgcgccgagagagccgcactggagcagcgggctgccgatctcgaggcgcgggaaaaagagctggacgcgagggcgtgcatcggcggggcggctgcgggcgaaagcgacttagccgcccgcctcgcagatgccgaacacaccgtcgcggacatgcagcgcgcgctagactcatccgccggggaagccgaggccctccgcttggtgggcgagatagggcccggcatgctccgggatgcagtctcccgtctggatcgcgctggtcggcaggcgggactctggaaagggcagacaataaagcctgccgccaacctgggaggccttgcccagcgcctgtcgaagatggccggggctctccagcagctccccgaggagctcgagaagaccatcaagtcatcctcgagagacctcgcccaaggagcagtggagctcgtcctggcgagctaccaggccagggaccccaacttctctccgtggatggcgctggacgagttcccacctgggactgaagacagcgcgcgcgcgcaggtccgggatgccgccgaccacatcgtccacagcttcgagggttcggcccctcggctcgcgttcgcccccaacccgacgaggagggcgatgtcagcggtgcagacgacgtggaagacgaggccggcgacccgggcgcatcggattgagcccccaggcccccgccaatcttcaattttcttctttttctttcttctaaggccctcgggcctgttttctgtataaatcaacttacaatctgcaatcaaaaatgatgaaaaaattctttgtgttaattttattttgctatgcgaatgagatgaggatgatctgtgccgtgatcctttttttgtgtcttagcttgatttaagggcccgtgcccaagtcccagtcctctaatggctcgggtcggggctagtgcctggggagatccgcatgtcgaggctggccaggccgggaacgtggtgaccgagggttatgggtgacccgattgtgggtttttgccgattcccccccggagttcaccacgccccggggcacggctcggttctgggccccgtttggcgattttagctgaccgaaccgagcccccgagggcaaggttgagcacgagtgaccttatttcaagtcaaaattcttcaaaaggaaaaaacggcacagacacaacctttaggaaattgaaactgcttttattgaaatgctgaaataagagaagtaagaatgtgcatgcgtggtagcccccggctaaccctgcacacccgagggggttgcggggttggcccgagccaaaacctgacactcgacccccccctcaggggtagaagcgacgaaggtgttcgatattccacgggttaggcagctccgtgccgtcgcccgtggccagccgtatggagcccggccgggggacaccgatcactcgatacggaccctcccacattggtgagagcttgctcaatccagcacgcgtttggacgcggcgtaagacgaggtcgtcgacgcagagtgatcgggcccggacgtggcgctgatggtagcgccgcaggctctgctggtagcgcgcggctcggagggccgcgcgcctccttcgctcttccaagtagtcgaggtcatctctgcgaagctgatcttgatcagtttcgcagtacatggtggcccgaggagacctcagggtgagctcggatgggagaaccgcttctgcgccgtagacgaggaagaaaggcgtttccccggttgctcggcttggtgtggttcggtttgcccagagcaccgctggcaactcctcgatccacgaatcgccatgcttcttgagaatattgaaggtcttggttttaaggcctttgaggatttctgcattggcgcgctccacttggccattgcttctggggtgggcaggtgaggcgaagcagagcttgatgcccatgtcttcgcagtagtcgccgaagagttcactagtgaattgggtgccattatccgtaataatacggttaggcactccaaaacgggccgtgatgcccttaatgaatttaagtgcagagtgcttatcgatcttgacgaccggataagcctcgggccacttagtgaacttgtcgatcgcgacatacagatactcaaacccgcccggggcccgcttaaacggtcccaggatatcgagcccccagacagcaaatggccacgaaagtggtatgatctgcagggcctgggccggctgatggatttgcttggcgtgaaactgacacgctctgcatcgccggaccagatcaactgcatcattgagagctgtcggccaatagaacccttgacgaaaggccttgccaaccaaggtgcgcgaggcggaatgggctccgcactcgccttcatggatgtcggcaagaagctcaacgccttgttcctgaggaatgcacttcaggaggattccattagccgcgcgccgatagagggtcccttctaccagcacgtagcgtttggaaatgcgttggacgcgttcactcccttcacggtcctcaggtagagtcttatctgtgaggtatgcttggatctcagagatccaagcaatcaatctaagggagcttggagcgctcccttcgggtcccgaggcctggactccgacgggcctcgggggccggtcaggcgcatccgtctcccctaaggggtcgggtcgcgccgacggctgggtaagcctttcttcaaaggcgcccggtggggtctgggctcgcgaggacgcgagccgtgagagttcgtcggcaaccatgttatcccgtctgggtacatgccgaagctctatcccgtcaaaatggcgctccatacgccgcacttggcgtacgtaagcgtccatctgtgggtcagagcaccggtactccttacagacctggttaacgaccagctgggagtcgcctaacaccaagaggcggcggatccccagtccagctgccactctgagtccggcaaggagtccctcgtactctgccatattattagtcgctcgaaagtcgagacggaccaagtatctgaggacgtctccgttcggagaggtcaacgtgacccccgcaccggcgccctggagagacagagaaccgtcgaactgcatcacccagtgggcggtgtgaggcagctgagaggggtccgtgctggcatcggggattgagacggtctctggagccggggtccactctgccacaaaatcggcgagggcctggctcttgatagcgtggcgtggttcaaagtgcagatcgaactcagaaagctcgattgcccattttaccactcgtcctgtaccctctcgattatgcaagatttgaccgagggggtaagacgtaaccacagtgacccgatgcgcctggaaataatggcgcagtttcctcgaggccatcagaatagcgtaaagcatcttctgggcctgagggtatcgggtcttggcgtcccggagggcctcactaacaaagtagacaggccgctgcacctttcggcggggccgatcctcttcgctaggggccgcatccccggggcgttcttcgtccaagtggcctctcggggcgcactcgtcttctgtgccgatgacctcggggtcggaggatgacaggagcggccttcccacagtggcctcggggccgtcctgggggtcgggggctcctggcgtcgtcggacaagcgggcaaagggccaactctggtcgtcaggggccttaggcctccgttcggctcgggggcctcttctccctgctttctcccgggtcgagtcagcacagggttagcctcggggccaaacggcgataggtgcggccttcccgcagtggcctcggggccttcctgagggtcgggggcacccagcactgtcacgtcctgataaattcatcccgaaataaaaatcatcttctaaaaggaataatagaattaattaaaattcgaaaagaaattggcaaaccctaaaatacgtacaagaaaaattcaaatgtggcccggagaatttttgttaaattctccttggtctaaaaagagccctcaaattttagtggaattttcagagcacaaataataattgagaagaaataaacaaagttgaaaaggtttataaaaagaaaaatctctaaaagtcttcttttcccccccccttcctctcttgggccggctcggcccaactctccctctctctctcctctcccgcggcccatcggctccccgcgcgcgcgcgcgccgctgacaggcgggcccgcccgccactctcgctgacgggtggggcccacctgtcatcgccttcctcccgccgcgcccgccgccgcgcccgtgccctagcgccgccgccgccgcggattccgccgcatcccgccttccccgcgcgccttaatgaggggggaatcaatccccgcgattccctctcccgtttcccccgctttcccctctctctctccctcggattcgctcggatttaatcccgtaatcgtcgccggcgcatctatggaacccgagaactccgcggccggtttccttcctccccggccgccttctctcccttccgacgctataaaatcgtccctcgtgcttcgctcttccgtttccgccgctcgccgctcgctctcgccgtcggtttcgtgcccgcgccgtgctcctctctctccgccgtcgccgccgagctccgtttcgccgccgtcgtcgctccggtcctcctcccgactcggcgccacctccatcggcttcgccgagtggttgccgaccccgtccgccgctccgcttcgcccgccgaccgccggagcaccgtcgtcatcgtcatcccgaaccgcgccgccgctttcctccactccgaccgccgttctcgtcgtcgtcgttgtcccggggtgagccgaagaccgccgttcgctttcccccttctctccgctctctcgggcgccgctccaccgcgctgatggtcgccggcggtgaccatcggggcgcgggcgcgccgctcccgtcggccgtgccggcgaggccgccttcgggcgcgccctcgcggctgccaggtgggcccggccgtcagccgcccgcgcccgcgggacccacggcgccgaccgccgccagccgcgtgcgcccggtccaccgtggaccgagcggctgacgcgtgggcccccacccccgtggacccggtccgcgcgtcccctccctcggctgacgcaataaatgggattttttaattaaaatttaaatgaagaaattcgtaaatatccatttaaagagcatataaacttcaaatggccatatcttggccatttgaactcggaattggaccgttcaagtctctaatttttccttaagaagtcaagaacccatttttgtgctttgtttctgctgttatgtggagtttagtagtgaaaaagccttttcttttccgttggtcgtgtagacgctgcagcttcggaagatccgctcttcgtggaaattgaagccggcgtttgggaaagcgagcaaggcaagtcacatcatccttgagcatattgaatcccagtttacaaaattatttttttaatttaaattaatgcattatcgctttatttaaattcccgcgttatcactgttttatttagccatgcctatttacctttgttatgaccatactattattgttattgttattattaccttgttcaccctagaataaacaaaaccccaactagtggacactctatttatggttccactagtatgaatttaggtagatgcttcgctgattaatagaacaacattaggtggttttataactttagactttgggaaattctcatatcttttggacactatggaattgttggtttatggaagaattggacatacacctctcttcctctttcaaaacccctaaaacctgttttcggtggggtttgggtgcatgccagttgtgggaagtagcaccccggccactataaggattaagctcgggcctctgttgcaaagcactaccgtacttccacatgtctagtgggtaaggcttagtttgtggctcagtctggtcataaacaaaagtacacggattggagatggatgaagtcgggggtcgatggacattctccagggcaaatgaaggctacacgagctgcggcccggtagtcgagatgtcgaatggcagagggttggtgccctgctgctagggggctcagtcctgcctgcctgtcccgggtgtcccggccgtagggggattgggtcggtactcttgtttatggctaggatgggttgggaactatgtcacgtcttccgtccgtataccgtggtggtatgtggcacgtggttgcacgtgaggaagatgtgtcttgtgggtaaagatgtacacctctgatcagagtaaatctattcgaatagccgagccctcggatatgggcaagccgagcaatgtacccaagtcagtgttataattcttaaaatttgctcaacaactaaaatgtggaatggttggcctgggttggcttgggacgagctgggacccagggtcgggttgccagttcggtctgaatcatcgtaggccttgggttaaggcaggttcgtgagggttcacggccgtgattaataatactgtatagctctaggatcgtctttataaaatggctttgggcaactaagtgacttttaaatgctgtttactgcaaaacttaacccctatattattatccccttgtacccccttgcattaatcatgcatctgtcggtgtggcttgctgagtactgtggttgtactcattcttgctcaatctttcccctcttcagtaagagaagctttggagaagatgtcttaggtggagtcctggcttataccccagttgagcgcctgtgaagatggagccgtaggcccgctagtccgctgctgtttatttttgattgtcaggcctgaaccgcctttgtaataatgtaaatattatcgatataataaagatgagtcttttatatcatgtttgtgtggtgtaccccggctcttcctgggacggggattaatacactagcgttcgggaaaaggcaaattttcccggtcgcgacaagcaccgtctgacaagcgggcagagggccgactccggtcgtcaggggccttaggccaccgttcgactcgggggcttctcctccctgctcgctcccgggccaagtcagcacagggcgggggtgcgcgaaatgaggattgtcttcatcgcgctccacaaccaacgctgcactaactacttggggggtcgccgctaagtagagtagtaggggctcatttggccccggggcgactagaactgggggagagctgagatatgtcttcaactgagtgagggcactttcagcttcctccgtccaagtaaacggccccgagcgcttgaggagcttaaataagggtagcgccttctctcccagcctcgatatgaaacgacttagggcggcaatgcaaccggtgacgcattgcacatccctaagtttgctgggggggcgcatccgctctatagctcgtatcttctcggggttggcctcgatgcctcgggcagagaccaagaacccgagaagcttgcccgcaggtacaccaaacacgcatttatcggggttcagttttatgcgggcggagcggagattttcaaaagtttccgctagatctaagagtaaagtctcttggttgcgcgtctttacaaccaagtcatcgacataagcctcaacattacgccctatttggctacccaaagaaattcgagtagtacgttgaaaagtaggacctgcattctttaacccgaagggcattgatgtataacaataggttcctacgggggtaatgaacgcagtttttttctcatcctccctagccatgcgaatctgatggtaaccagagtatgcatctagaaaacacaaaaggtcgcaccccgcggtggagtcgacaatctgatctatgcgaggcagggggtaagggtccttaggacatgccttgttaaggtcggtgtagtcgatgcacatccgaagcttgccgttcgcctttggaacgaccaccgggttcgccagccactccggatggatgacttcacggatgaatccggcctccagaagtcttgccacctcctcgcggatgaaggcttgacgttccggggcctgccgccgcactttctgccggaccggccttgcgcccggccgcacggcgagacggtgctcaatcacctccctggggaccccgggcatatccgccggtctccatgcgaagacgtcagcgtttgcccgcaggaaggagacgagcgcgtcttcctatttgccatccagaagaccaccgatccgtgtggtcttggatgggccgtcgcccagggcaacctccttgaccgggacctcggcgcatgtgacaatccgctgcctcggggcggtgggggcggaggtgccaagcctctcgtcaccaccctcgggcttggacgcagcagcgaggtggtccgcgcgctgctccatgcaagcgagcgcgactttcaggtcgccatggacagagatggggccaccggggcccggcatcttcatctggaggtaggcgtagtggaccgccgccatgaacttcaccaacgcgggcctccccaggaccgcgttgtagggcagactgaggtccgccacatcgaagttcacccgctccgtgcggaagttggctgatccaccaaaggtgaccggtaggtcgatgtgacccaacggccatgtgtgccccggcgtcacaccgataatcggttgggacggctggagcaccatccccggggccttgatggcatcaaaagccgcgggggaaatgatgttgagggccgctcccccatctatgaggacacgccccaacttcacgttgcagatggtgggggaaaccaccatcgcaatctgccctccccgggcgacgcacggtgggtggtcggtctggtcgaaagtgagggcaacctccgaccaccgcgcccggcgcgtcgcctcatgagtaggggccgcggccagaagctctcgcttcatggccttgaggctccggcgagagacgtgagcacacgctcccccatcgacagtggcaatggtggccccaggttcttggaaacctaggtcattatcgccatcatcgatgtcctcggcgggggccttctgcttggcctcacttcgccgacggccggaaggaaccgccggggacttaccttcccggcgctcctgcctcctctcctcctcccacttccttgtccgctcagccaagcttttgactgcgcgacagtccgcaaggtcatggagggaggtgttgtggacggtgcaccacttgccggtagggcgctccctgctgggaacgctggcctccttctttttgtcgctcgcaggcctcccctttcgggtggcccgtgaagcgccctcgacggcgaggacatgaccctcgtcgtcggaacggactgacctcttcttcctcctcctgtcacgccgccctgactgagcggcggatccgggggcggccgaagctgccactccggaaccggaggggttccaagtccaggcctcctccttgcgagccactcggtccgcgagctaaaaaagctctgcggtagtctggggctctttggaggcgatcttttcgagcatgcggttgtgccgcacaccccccctgaacgcgtagattactgcgtgtgcagggatgcatggtatggtattgcggacttgacaaaaccgctgaatgtacgatcgaagcgactcatcgtcccttcgctgtacagcgtgcaagtccgcttcctcaccggggcgcggatacgtgccttggaagttcatggtgaactgctggcacaaatcctcccaggagtggacagacgcgggtggcaagttcattagccaaccccgtgcttgccccttcagggccatgggaaagaaattcgccatgaccctgtcgtcacccccggcggcctcaatcccggttgtgtagacctggagaaactcggcggggttgacgctgccatcatatttttcggcgatggtgggccggaaccttgggggccaacggacattccgaagactcgccacgaaggctctacagccaacaccaccaaccgggggcacggagggctgattcccacgtccgtgtcgaggtgacactctggacgaggaagcgccttccattgcgtgggcagcacttcggtcattacgccggcgctcgaggctggcgcgggcgccctgctccctacgcagatcttctcgggtcgaaggagtcgatgagggagtggctaccgaacggcgaacagcggctgctgctcgtcgtgcccttcgtcttgacgacgcggagccagtggtagcagcaccagaggtcttggtggcggaggaccgcccaccagcatctaggcgctgccgcgccgtcatgaccaatttggccacgtcgtccagccatcgttgggctggagattccgggtcagggacgacaggcgggtggcgtaagagcacgcccgcagcttggagcgcgccctggggcgtgctgccgtcgccgtagacgaggaggcgacgctccccatctcgccgttctcctccatcgcccgcgatcggtgaagccgcggatctttcgaccctttcgagcgcctccccctgcttaggactttggcgaggaggaggtgggggagtacgagctcgacggcgtgggtttggctccccgtcgtcgccgctcacactcggagagaggtcgtgcacctttgcttgctcggccattaggctgaacaagaaaaacttggcgcacacggaggaggacgagagctcagaaaacacacgctgagccccctacctggcgcgccagatgacggagctcgtggctcctcaccgggagaccgcacaggcccccctttgccggttcggccgggggcttagggttcaatctcaagctctctcggtatgtggaaagatcgccagctaggaagaaacgcgagacacgggcgatgtatacaggttcgggccgctgagaagcgtaataccctactcctgtgttttggtggatctgtgtatgaatgagctacaaagtgtgagccgacctctccctcgttctaggctctgaatctggaaagcatccaaccctttctctatgggcaaggtcctccttttatacttcaaggggataccacatgcacccctccctttccaaactggacttttcttcttttcataaatagacggagatttgcacggtcgtcctccgaacatcctcctgacgggacggcacatacctacctccacttctgcctgaggcgggcacgtcgtgggaaggtggctgtgtgctgacgacatgagcagtgtcagaccggcacaaatcggtcattcttgtccacc

SEQ ID NO: 18214 - DNA, 8058 bp, Oryza sativa
aaaacgcgaggggtcggggcgcctcggccctcgggggcgaggctggagtggtccgaccccccccccctcgggaagaccaagaggtgggcgcgcacatcaccctcgggcccgacgtcccccgagggtgccaggccacgtgggcgattgtgtctgcctcaagcctcgagtcatgatactcccggtcccatgtcaccgacaaggacgatttccccttgccacggatcgaccaactcgtggattcgacagctggctgcgaactcatgagctttttggatgcctactccggctaccatcagatccacatgaatccggccaacatcctcaagacagccttcatcacaccattcggcaccttttgccacctcaggatgccattcggcctgaggaacaccggggcaaccttcgccaggctggtgtacaaggtcctttacaaacagttggggcgaaatgtggaggcttatgtcgacgatatcaccgtaaaaagccacaaggctttcgaccatgcgtccgacttgcaggagaccttcgacaacttacgcgcggcgggtatgaaactaaatcctaagaagtgtgtttttggtgttcacgtgggcaaattgttgggtttccttgtttccgaaaggggtatcgaggcgaaccccaagaaaatcgatgcctttcagcaaatgaagcccccgtcgagcgtacgcgaagtacgaaagctcgcaagcagaattgcggcactcaatcgattcctctcaaaggcagccaaaagaggcttgcccttcttcaagaccctccggggcgcgggaaagtttacctggacacctgaatgccaagcagtgttcgacgaactgaagtaatatctgcaaagcccaccagctttgatcagcccagcaccgagaagcgaactgctactttacctagcagcttcgtcggtggcggtcagtgcagccctcgtccaagagacagagtcaggcaagaaaccagtttatttcgtctccgaagccttgcatggagcaaagataagatacattgaaatggagaagcttgcttacgccctggtgatggcttcgcgcaagcttaaacattactttcaggcccacaaagtcacggtgccatcacagtaccctttgggcgaaatactccggggcaaggaagttactagccggctcagcaagtgggcggcggagctatctcccttcgacttacattttgtcgcccgcactaccatcaagtcccaagtcctagctgacttcgtggccgaatggacaccggcattcgccctcgagcccgagcctgtcgaacaactctgggtgatgtactccgacggctcgtagtcgcacaagggggcggacgctgcagcagtgctttcttcgctagggggcgtgccgattcggtacaccgcaagactgcagtttgacacaaccaacaacgcagcataatacgaagctattctgttgagcctaaaaaaggcgaaagcattgggggttcgacgcttgctcatccgaactgactccaaattggtggcaagtcatgttgacaaatccttggaggcaaaagaagaaggaatgaagaggtatctggaggctgttcgatctatggaaaaatgcttcgccagcataacggtcaaacacttacctagaggccagaacgaggaagcagacgccctggcgaaatctgctgcttgtgggccacattcgcctggcatcttctttgaggtcctatacacaccaagtgtgcccatagagagcctggacatcatggcaatcgaccagacagagctgggcgaagacccagaggactggcgaaccccgttcgtaaagtacctcaagaaaggctggctcctggaggacaaagcagaagaaaagcgcctacagctcagggccgcaaaatacaagcgggtctcgggacagctatatcggggtgctccaacccttgcttcgctgcatctcctttgccgaaggtgaggaaatggcgaaagaaatacaccaggggctctatggtgcacaccaggccgcaagaacagtcgcctccaaagtgtttcaacagggtgtatactagcccaccatgctgaaagtctgtgtcgagcaagtcaggaagtgtgaaagctgccagcgccatggccgaagccaaaccgcgccccaatacgagctgcagcctatcgcaccaatctggccattcgccagatgggggctggacatcatcggcccattccctgtggcgcgaaacgggtacaagttcgcaattgtggccattgaatacttctcccgatggatcgaggccaaaccacttgggtcgatcacttcaacggcagtacagaggttcgtatggaacaacattatttgtcgtttcggagtaccaaaagaattcatcactgacaacggcaagcaattcgactctaacagattcagagaaatgtgcgaagggctaaatctggaaatcaggttcgcttcagtcgcgcacccgcagtcgaatagggcagcaaaacgcacgaatggcaagattcttgaggcgctcaaaaaaaggcttgagggggcggcgaagggtaaatggccagacgaaatgctatctgttctctgggctcttctaatgacccccacaaggccaaccaagttcagcccgttcatgcttctctatggcgacgaagcaatgaccccaacagagctaggggctaataattcaccaagggtgatgttctctgggggcgaagaggggcgcgaggtgtcgctcgaactcttggagggggtgagagtcgaagcactagaacacatgcgcaagtacgccacaggcacttcggcaacttacaacaaaaaagatcgaccgacggagctgttgcctggccatctcgtcctaaggaagaaggcgaacccagtggtggtcggcaagcttgaatcgaagtgggaagggccgtacctcatcaagcacaagtccagaacaggctcctttcgcctagcgacactggaaggcgaagagttcgaccattcctggaacgcttcctcccttaagcgtttctatgtgtagaacgggtggcacccaaatcgccaacttgtaaaaatgtacatactgttatgtaagcctttcggcactatgtaagcccttcggcacaaaaatacaaaaaaaaagaaaaaagaaaaaagacaaaaaaaaactggatatagggctattatccatcccggaggcccgaaccagtataaagtcttcgtgtctttcgcctttttatttgtgtgaatgataatttgtggaaaaatcccaaggcaaacgcctcatcagtgaaaatgccaggggggcgaaacgaatcggccgaagcaccgctcaccgaatgttgaaatcgcaacagcttgtttcgggaaacaattaaccgaacaccgttaaattcgaccaatatgaaaacacaagcgctcctttcagcgcggaatacaacagatcgaaaacggaagccgaaagctgaaaagtcagcaaacctatttcgctaatatacgcaaaggggccgacacgttccgacctaacaaaagcacgaagagtgacaatgcgagaaatagcgaaaaggaagtaaagcacatctttattaacttcaaaaaaaaataatcgaagatcccaagtcttacaatatgatacaggcgaaggaagcaacggctttacagccgagcttaaagataaattataccttcgccaacacaacaatcctcaccccctaaggaatggtttggcgaatcgggtttgtcgtcactactgatatcgtaaacaaccctcaaaggggatggaggacaaacacaagctaaactataacggcgacgggcgatcgcctcttggcgaaccgatcttctaaagtttcgacaaaagctcaaactatcttcgcgacgtgatacacgatagcgaccgtaatcctctaaggttcggcctggatgcacgcgcatccatttagcaacgcttacaaccttatagttgttgccattaatcaacatctcacggtaaacaggccgaaatgggcacttaatcttcagcaggctttttattgccacgaaattctcgtttttgtttcgccatttttcagcgggaggtcaaacgcatacctttcggccacaagcctgctagcaaagcacaaagggaaaaggtgcaaaacggggggaaatatagacgagatcagttccactttcaaacggaacaattagatcagcgaaaggataatactttatcagtagaacagagttcatattgattacaaggcgaaagcagctcaaagccgaacatgcaaaaagcctatatacaaacctaggctaccaaaaagcccgaaaggactaaagaaaaaaaataaagcacacgagggcgaagggcctcacacctcaaggtggtcttggcctccgttgccttcgccctcgtgctcggtggcctgttccgacggcccgggatcccctccggtgttggcagcagcggcttcctcgtccctcgtgatcctttcaaggttctcacggagtcgagttttcacacaatcccgaccaccatcctcccaaaacccttttcgaaaggcccttaaggcagccccagaacactgcgtgttgctaggccattcttctttcacgaagtcgggaaaattcccgatgtggtcacagccgtgcgcatgcaaaaggctaaggacaaatcccgccgaaacacaagcgcagcagtccccgtaggcaccagccacttcaacgaccgagcccgctgcttcctgcgtccattcggagaagtcgaacgcggtcccgccttcgcctggagcaccttccgcccgcgccccaaggtcattgagggccggccggaaagtgtaacaggcctacttggcagactctgtggccgataccaaggtcgcggcagcagcttcggccgagacaagacgagcttcgagggatttgatcttctcttcggccaaagcaagttgttggtctcgttcggcatcccgcttgttcgccgcttcaaggtcagcacggagagacttgttgtcccccgaaaaaaccttgttttcagcattcgccttctttagagtctccgccacgacgcgtctttcatcttccttgtggcgaaggtcttcttcggtctttcgaaggcgaaggcggtacccgtctagcctctctaaggcagatttcttcgcacttaagtgcgcggcaaggccctggacaaggagaaacaaaaaacattacggcaggacactagcgaaaggacaaagttcggcacacagaaaattcatacccgcacaaataggctttccacggccacgcagctttcaccgaactcgtttagctcggtgaagagcccaaggccgtcggtcggtgcaatgacctggcacacaccgtccacgaacggagtgatctccggccgcgtggcaaaatcagcggggacgaaatgtggggcgatgagcgtcacgtccgaaatggccgcttcgaccgccagagcttttccctctcgttgacgggcaggcgaaggaatcgcctcaacccgttcgtcctcggaaacattcgccttagtggctggtgccaaggcactcccacctgtcgccgcttcagcatcgctggcaggtggcggagacatacgcctaccacgagaaggtgcgcgccgcaaaaccggcgaagtaggcgtcccatcggacccttcactgtccaaaaagccacggccgacttgcacaaccttccctttctttttcttcctcctagcagtcatcaccggtttcgctgctgtactggaaatcgccaggagggtgttcgccacaacgatatcttgcggccgcgtaggcgaaacatgagaacctacccgggatttcgcaagagtaggactgggggtgtagccatgggacccatcatcctcagaaccaacctccccatcttcttcttcctcctcctccccatcactttcgaccgcaaccttcgcgctgcggcgagttcgaacttggccacctttcacaaccgcacgcttgcgtttcttcgaagtgccaactttgtcatcctcagctctggaggggttcgatcgacttggcaattcgccaatatgaacccaattcacccggccgtcggtctggcgctggagcaagcgggcgaattcggccgtggttagagctcctatcatcttcgacgcctctatttcggcgtcttccaaagtccgtgctgcgaaaaaagtagaacaaaaatgagtgtttagcctaaagggcacttccataaaggaaatatgcggcttagagcaaaaaaaaatctcactttcgaccccagtggggagaacaaggtggggaagcccgagaacctcttcgccctcgttcatggaaacatcccaaacacgggcgagaggggaaatccaaaggaggcaaaactcctcacaaaggtcctgggtgcttagccgccgagcgaccttacgaaggagtataagccgggactcgagagtcccatcgatcttcatgttcggcttcacgatatggagacggcggaacgctcaaaaaggagccaattcgccttgacatcctcggcagggtaggggctggcgatgtagaaccatttttgcatccagttcctatcccacttggccattgacgtgggtaccggccaagcgtctgagcgctccggccgcagcatgaagttcacacagccgaaaacagttttcctcggaccggccggtgtctgcacgtctttggtcgaggcgcatgctgtaaacaaaatagcgaatagctcggcggtaggggcgaacccacaggttcgacacatccaagcgaaaaccgccagcttcgggaatgctgatgggctaagctggggaagactaacctcatacgtcgcgagcacagacgacaagaagtcgtcacatgggaggcgaagcccggcggcgaagtaggcagcgaagacaaccgttcgtccatcactaggcaaagggacaatggcttcgcccccacatgatccttggccctccacgagaacaccggaggataccaactcgcctaagtcggcctccttgacaagcgatttgccaaggaagcacgaccacccttcgccaaggctgccagggtcttcaccagttgacccggctttagtgggcttgcgaggagccatcaggctcacggccaaggaaaaagccgaaaggctaaagcacgacggtggcgaagaagctaaggggcgggcaaacgaagaaagcacagagcgcgtcaagcggtaaaaaagtgaagagtgcggggggtgagaaaacagcaggccggcttggggttatataaccccgtcgcgagaccgttcgcctgccaaccaattaaaccctgacacttgtccaggggcagacgaaacggtaaattcccatcgggccggagccgaacagtgaaaaggccgattgcgggaaaggagaggcccacggggcccattagtattcatagtaataaaagagacaagctaacccttttttacactttgtaacaaatgcgaggaagggattttctcaagaatcttttgtaagcatgaaaacaagttatttatttcgcaggactatatcacagatttcggcaggaacatcggccgaaagggggtgcctcgtggtataccatttgatctgcacggtctcagccgaagctccctactcacccttgcccgtgaggggcttgttggaggcttgccacggaaggccttcggccgaacctgccgaaaccaaaaagttcaagcagcaggctcacgccgaaggtggggggcgaagggcaagagtgaagccatacgggcgaaagccgtgactagggtaacaccaccttcgccgagtggagttctcgctagaaggcggcacgggcgaagatgatgtggcgaaagcctcggcacacaggcacgggcttcgccatagcaccaaaccccgttgacgggggaggcttggtgggccgctacgccctcgggggatttcgccagatagatgggccgagctatttaggcccagtaggggcccgtatgtgtaaaggacacagtgtgccctccataatatccctatcataagggtaaccatgtaaattcccatgtataacttaaaccctagtagtgggaacctgtaatggggctataaatagccccctagggccatgtaatagggggatctcaagaaaaaaat

SEQ ID NO: 18215 - DNA, 3406 bp, Oryza sativa
ttccacaacctcttctctctccccgctcattttcctcctctctccctcagcttctcttctaacgattgatgggcatggggcgcaggagcggagtagctgacgggcacatgacccgttgccgccgacgaaggagtgggggtgatgagccaaaaaaccctagctagatctgttggccatgggattggtcggggcagatccagtagtggcaggaggtggcgggcttgggtgatggcgggagcagtggtggtggcgtcaacgagggctatggtgggctcggcctcggaccgcgtggatctcgtcttctctcctccctctttccctcggcttctcctctcatgatggccaacggccgtgggattttccgccatccaccactactagaaaaacgatttttcatggtgtcaccctacgattttcgctggcttaagacgactaccagcaaaaatgaattatcgctggcggccgataatcgctagcgaagatcttgatcttcactggcctttactttgtggcggctccaaattccaccagcgaaaacccaaaatggccaccacggaagatggttttcgtagttgtgcacgaaggagtggggacggtgggatggagtgcaacggtgactggttagcaacggatctttctagggttccgattttagtagtttttttcaccgaaattattttcatgcggtcggtataggtgacgacatgtaaaaattctgtttttcgcatgcagatgtggtgcccgcatggaaaaatattgattttttcaaacacctgattgcaggtggttgctttgcctacatgcgaaaaaaagtttgcctgggtagcccgacgagttacccacttatttacctataggtgggttcacgggtctactccattgcagccttaatgtttgtgcatcaaaattaacggataagttcttgtcacaatgcgtaatgggctggatcgttgtgggccggacctttgtcatcacgcgattatacagcaaattagacgggcgcccgattaatcgctaatgatatgatttatgcgtaactgattaacgtaacagactgccagcctacccgtattaatggctgttaaaaccgttttccattttttaacataatggaacgtaacatcccggtttttctcaaaaagttacaaccaattattacagtctaaactctaaaagtgtgtagttcaaacaaaacatcaaaaacatccaccaaaaattaaagaaagaccaaacttagataaggtgaacacatttattgaaggctatttatgtggcaaagagttgcataatcgtcgtatcaagcttacgacatgcaacttttataaactcaccatcttcatcagatctttgtagttgaacccagagccggagccaatatgttgccttgaaaattacctacatatatgaaatagatggtcaaaaaccatatcattcctagcttcctgcacaaccacaaaacccaacatatagtagaaacttctacaagaataaacttgctctcttccttgtccaccctaaaagccaaccaccaaaaaccgttttccatagtatagaggtctcaaaaaccattcgaaattttgttcgaatctactttttgtcatgtcgaaacctccaatttttatgatttttttatcgatttttattgaaaacataaaccatgccctgtgttagccattttatgcaatatgttgattttacttgtttctactttaacatagagggtgtttagatctaggggtgtaaaattttggcgtgtcacatcggatattatatagggtgtcgcatggggtgttcggacactaataaaaaactaattacagaatccgtcagtaaaacacgagataaatttattaagcttaattaatccgtcattagcaaatatttactgtagcaccgaattgtcaaattatggagcaattaggtttaaaaaattcgtcttgcaaattagtcgccatatgtacaattagttatttttagcctatatttaatacttcatattggagtttaaacgtttgatgagactaggtgaaaaattttggggtgggagcggattattattgtgaattatccgcttggttatggggtaaggtaaaattgcataatccgatcagacttaattccttggcgggccataccagctagttgtccagcgtagttatgtctcgagctttttcttaaccaaagaatgatgttacttccagctgacagcaaacacacctttcactcgaccttattcgagaactagtttaacttggctgatatagtccactacaaatccatgtgaaaagaaaataggctgaatgacctactcacgtgtgcggagggatcaatttcggtctaacaatattaaggtgggtgagcttttataataaaatatgttatggggttgaatctcaaaataaaggtaatgattaggatggtttatataattttgtcataaataaaatattttaagcaatatcgttttggcggaaatgtatttttcaaagcgtttagcgaacaatctgaaatatttttatttttagaaaaagaacaagtccattgtcgtttcgtggaatttaattaaatttattttaaggattttcagcatatcacatatccgcatagctattttatacgggactacttagaaaaaaccgcaacaaattttttaaacaatttttcactatattatactataactaccatacaactttatgtaagtattaaataaaatacaatttcatactgagttatgtagagatacattgtcattatagttatgtagttataatgtaactataatataattatattttacaagttactagttataccacaaaacttaattatattgttacatataaaagttttctcaaaagtaacttcccattttatatacccaccctctctcacgacaacatcatcacttcattatcacatgacagaccaacatataatgatgattaagaaaaaaaataaaattgttaacagaatacggaaggaaaaaaaataaaaaaaaaaccggcttctccgcctatcgtgcccaggtgtgcgcggctctcttctcctccatcggcgacgagccactcctgcgatgagatgagattgcccgcatcgtcgtcgtcggcggcggggctgcaggagcgcatctgggacctccacgacaatctcagccacgccatcctctccctctccgcctccgcccaccgctgctgccgccgccgcgcccccgaagggcgcgtggtcgtcaaggggtggcggcggcagggaggatgtggggactgcggcctggagcaggaggcggctgcggcggccaccatggcggacgcgcggagccttcacgccgtccgcgccgcgctcgaggacctcgagggccacctccatttcctccacgtcagtatcctcctctcctccttaattcttg

SEQ ID NO: 18216 - DNA, 6630 bp, Oryza sativa
tgacctgctagatactagattatggagttctccagcaccatctaattaaattatccaaaaaataacatggtgcctattgtgtcaacaatacttgcagaacattcaattatgtcaggtggcagaacgagatgccgcgattgctaggctgcagcaaagtcgtattctgcttgctacaagattggctgaacataggtggaagaagcatgaagttattgaggaggccttagcttttgttgatgatgcgcttgacaagagtcgatttgtctcaccagaagatgtccgtgggacgcatacacacagccaatcagtagagaaccagtgccccaagatacatgattcaaacttcttggtgcgttttttatcctgtacattagctatagctaagaattctttaagatttgagaggattggtggtgcactcggtaataccgcgatgtttgcagtaagtatgcttgcattcttgcagctgcaacaagtggcctttggtaaacaaactccagcagtacaatgtagacgagtcaattattttcattctcagatgtctgtaaagaacactaaagaaaagcatctggtcgtattgttagctagaggatgaggaaatcatcattgtttgatgtatagataagttttgttctgttcacatttcttgaaagttttgttaggacactaatcatttcactcccttggattggctggtctacagcatatctttgataggaagttgtaccacatgagttgtaaatggttttagattggcaatagatgaactggcagggcttgtaagcttgtttctttttctgcagctgaacgacaaccaccatttatggacaacagatttcgtaattgccatgtttatgtgaaaccatggtatcagatttgatctttgggttgccatgttacatgaatttcttgtcaggggcttgtggatgttcatatacatcacaggctgaggcactacaccaaaatgaccccataaagacgtttttctctagatgctttgaaacacgtctctgaatatggtatgagatagaaaaaaaaaaagacgcttcgggagacatttttatgaatcgccacaaaatttctatggtaaagatgtctttttcagggatcttaatcaccaaaacagcgttcttgttatccttccgagcagctcaattccgacagtccaaagcccaactgttcgcggttgttcgtgattttgtccttctaattgtcccactatatatccatcccacaatataactgattttgtccttctaattgccccactatatgaggaattttggcatactacttatcatatataagtgactttattctacattctagtatgtgaaaaattcctgaatttgaattgatatatggatgctatgtgaatatgaaaaatgcttgcatgatgtgattattgttttttttctcttttttttgggctaaaaataattcttccatgcaagtgacttaagatgctgcctgcgaaaatacgcggtgctcttagtgcagccgtatgtgaaaacgatttttgtagatagtcaaaggtccgctgcaggtctttagtacaggtggagtatttggccgcctgaaaaacgtgttttggccacgacaaaaattgtttttctaatagtgatagttagtcagccatcaactccaattcaaatttctacatatttttaaccctcaactatccactcacccacaaacatatctcaccccaactatacattatttttttcatgattttatcttgcactagttattttttagaaattaactaagattaagtttacatataagttcctattgtaaaaatgtatttaggtgattgtaaaatttatattgaattgtactatgggtcggttattattgcccgagtttcattttagactaggttatatctaatgttttcactttggttcaggttttcttactttctgttgcacattggactattttttttgtgatttcattagcgagcttaccagcaacataataaaccaatcaatattccatctgaccttgatttcttttactccttgatttagctgcttgacttctaccattttccccttaaaaaaatcaagtgagcttagagcaaatcactgtattgagcttgcaagcgacactgcgacagctacaacaaccagctatcaccaggcttgattttgctggttcctcaagctcaggaacagagcagagagagaagggatcccagtgttttgattgatcatccacggcgcagctgcttaatagagaaaaggagggaagagaagagatggagaagaagggtggtccaatttgaaatttttgtaaatttatctagtccaaagtgataagataacttcaccccttgttcaaagtgaaacttaggtaaaaattcctagcccaaagtgcaattgactcttttctatatctctttgcgtaagactattatgtttcttttatatataaaactaggtgaaaccccacacattgctgtgtgagtttagtatgatagcactaagttaagtaatgtgtaagatagctagacaatataaacttatataagttaacatggttcatgatagtttaaatttaaatagtatatagaacgataatttaaatgtaaaagtaagttgttatagtcttatgagaaaagaaaaggagatagagagagtttggataatagaataatcatctaatggctaaaaacaattgagatgatatgacttaataaaagaaaaaaataagggagataatttggaccataggacaaaaacaattgatgtgatattgcttagtgagagaagagagagaacattaactaagttaggagttataataaactatatatgtatataagatgttataaaaaaagatgaagagacatttaaatattatatgaattatgtgtgatgatgatataatatgcttgcatttgaaaagctataaaatttaataaattataaaattatagataatataagcatgatgtttatatgtaatagagtaaataaagaacaaaaaagaaagagcactacaaaaatggtaaccaatcagcaactaattaaaaagctcacatcttgtccgttctctcccgatcggacggctgctacgccatcagagcagctccagaagccaccgcgccagtgcgccactgctaagtggccccctcccaactccgacgaccccgccgccgccaccgccgccgccgccgatgcagaaccccaacggcaccatcctccagctctaccacgccggcaggctcgccgccgccctccgcgccttcgagtcgctcccctcctcctcccccgcctccgccgccgccgccccagcccctctcaccgccgcgacctacgccgccctcgtctccgcgtgctcccgcctgcgctccctcccgcaaggccgccgcgtccaccgccacctcgtggcctcctcatcctcctcgccggatgcacagctcgctgggaacaccgtcctcggcaaccacctcatcaccatgtacgggcggtgcgccgccccggactccgcccgccaggtgttcgacgaaatgcccgccaggaaccccgtctcctgggcctccgtcatcgccgcgcacgtgcagaacggccgcgccggtgacgctctcgggttgttctcgtccatgctacggtcaggaactgccgcagaccagtttgccctcggcagtgccgtgcgtgcttgcacggagcttggggacgtcggcaccgggaggcaggtgcatgcgcatgcgttgaagtcagagagaggcagtgacctgattgtgcagaacgcactcgtcacaatgtactccaagaatggcttggttgacgatggattcatgctctttgagaggattaaagataaagacttaatttcctgggggtcaattatcgctgggtttgctcaacaaggttttgaaatggaggcactacaggttttcagggagatgattgttgagggctcgcatcatccgaacgagtttcattttggtagtgcctttcgtgcatgtggggctgtgggcagctgggagtatggagagcagattcatggcttatccatcaagtataggttggaccgtatttatatgtaggatgctcactgagcgacatgtatgcgcgatgcaagaatctggactctgcaagggtagcattttacaggattgaggcaccggatttagtttcttggaattccatagtaaatgcatactctgttgagggcctacttagtgaggccttggtcctgttctctgagatgagagactctggtttgaggcctgatggtattactgttaggggcctgttgtgtgcatgtgttggccgtgatgccctatatcatggtaggctgatccactcctacttggtcaaattgggtttagatggggatgtttcagtctgcaattctttactcagcatgtatgcaaggtgttcagatttatcctctgcgatggatgtttttcatgagataaaggatcaggacgttgtaacctggaacagcattcttactgcctgtgcccaacacaaccatccggaagaagtcctgaagttgtttagtctcttgaacaagtctgaaccgagtctggataggattagtttaaacaatgtactgagtgcttctgctgaattgggttactttgaaatggtgaaacaggttcatgcatatgctttcaaggcaggactagtggatgatagaatgcttagtaatactctaattgacacttatgctaaatgtgggagtttagatgatgccatgagactctttgaaataatgggaaacaatcgtgatgtgttctcttggagcagcttgattgttggatatgcccaatttggttatgcaaaggaagcatttgatttattttcgaggatgagaagcctaggaatcaggccaaaccatgtaacgtttatcggagttcttacagcatgcagccgagtcggttttgttaacgaaggctgctattactacagcattatggagcctgagtatggcattgttccaacacgagagcattgttcatgtatcgttgatttgttggctcgtgctgggaaactaactgaggcagcaaattttattgaccaaatgccatttgagcctgatattataatgtggaagaccctgctggctgctagcaaaatgcacaatgatatggagatgggaaagagggcagcagaaggtattctgaatattgatccttcccattcagcggcctatgtcttgctgtgcaacatatatgctgcttctggcaattggaatgagtttgcaagattgaagaaggcgatgagaactagcggcgttaagaaatcacctgggaagagttgggttaagctgaaaggggagctaaaagtctttatagtggaggacaggtcacatccagagtctgaggaaatatacgcaatgctggagttaattggaatggaaatgataaaagctggttatgttccaaagcattcatggaaacatgctattgttgatcatattgatagtgatttgttcaatgaagagatgctagctgaatatggttgagtgggagataaagaaaacagtaattgctgactctggggtattcgcatgtcttccttgttgtaagaaatacttgttaatcaccaagataattattaaagctttgtcagaattacaatgcaacatacagaagttgcataagcttggcatcatgcaccatttgagaacttaccagtatgttatagattatattttgcctaaataatttgaaagaagaagtaagtctgacctggatctttcctttccctcgcttcactgctcatttatttggctttcagatgtgaactgcctaacatgaggaaatatgttttgcaaggtgggttcgacaaatcatgcatagtcagcctgctgaaggagctaagctattcatgtaatcttgctaatgatatgcgaagcacaactggggcttatgtatttgtttgatctgtcacatatttctgccaagtaagatttaatccagtgagccatacacaaggtaagagtttgacctattctagaatctccaaattcctgtttctattaatctactctgagaagacctttttatctgtagccacttgtcaatatcgattttgtgaacagggggcattccttttcctcatccagcttgctactcctttctttggcttccagatatgaacttggctaacctgaggaaatgcgttttgcaaggttcgttgacagtgatcttgctatttgatacatgaaggcaggctgtatttgttttatcagccagatatttctgctatgtaggtttcagttcagtgcgctatacacaagatgagaacttgatctcttgcagaaaggtcaaaaacctgtcttttaatctagggttaattgtattcatgccattacaaatttgcccgttttgaaaattatcattacaaatctgttgaaatcggaaatatgtcactacttacgttctatatgcactgattcctttatggaccaaattacccttatgttctacctcagtcccctcctctatctctctctccctgtccaagtatcgtcaacgagactggcgtcggtggaaggtgggagcagcagcagcctgatggctggatccgccgcgtcacactgctcatcgacgaactcacctgtggggcttgaggatctggtgagtaggtcggctttgcgagc

SEQ ID NO: 18217 - DNA, 3886 bp, Oryza sativa
tttgtcagcaagtacaattgctactataccttcaccggtggaaaggcggttggataccggaatctatttgcaattccatggtcatcgttcatggctgatgacagcctcttcttcatcgagggggtactacacttgagagctgaattaaccataaaacaaccctagatagtggacggcgtttaactaacagcgtctctgttcttgctgtgtccaaattagtgtgaaaaatgttgtgtgattcggacttactgttgttttctacttgagcaacctaaatagacagtttggaaacggcaagtaaaatcccttttgtttttacatcaaaagaggatcatgacatgtaacgcattgttatcgaactgtgaaaagtgattcttctaatcaaagttatgctgaatggtccacatcgtcaatgacattaagtgatggaagccataatagtattttcaacacaaaataaatgtaataatacatttaatgttagatttagtgaaactaatttggtcttttagatgttattttttttcctatagatttagttaaattttaaaaagtttggttcttaaccaggaggctcaatgtcaatgaaatgcgtctggctgagcaagtctgactttgttgagctgcctgcgctactttgctaatctcgcgctcatttcgtaatctggagattagctttattattatatttgtagagtaatagataataatagtaatctgggtagttgaagtttctattgattttcatagcaatttcctgtctctattggacggggctgatttaaggttacgtgggtgtgcttgagaagaaggggattggggagattgtgaagatacgcaaaacgaggtgagctattagcacatgattaattgagtattaattattttaaacttcagaaatagattaatatgattttttaaaacaactttcttatagaaattttttacaaaaaacacaccgtttagtagttcggaaaacgtgcacgcggaaaatgaaacgatatttctctctttctcctgcgctcgaacgcacccttaaacgggctttaaggtagaaagtacacgtggactgcaagcttctatttagaaactgcaatgctgtgccttctccaaagatcgataaacaagagatatttaaccatttgccatatttagatgtggcaattaattttttatcactagacccatatgtcatagacacatgtggacccacatgtcattgagatatgggtggcaaatagttatttgccaaatctaaaagtggcaaataattaaaagccccgataaacaatgcttcctccgtttcacaatgtaagttattttagtatttttatattcatattgatattgatgttaatgaattcagttaatataaatgtggaaaatgttcgaatgacttacatcgtgaaatggagggagtatatcagtttatatagtcctgatcaatgttggcggttaaggataatacttaaggagggactaatttacttaagtcggtgcaaaaatggtcaacaattttgactggcttgcacaagtataacgtgagctgtgacgtgttggtcctagtcccaagtcggttaacttttgactataaaatgcacatctaacattcatctttcagcactactgtctcgcgagaaaacttctttcattgttttgtaactaagcggtgtcactcctcaaagctacacaagctagctcatcctgaaattctcagacaacctgagctcagctagcgctgagctgagctccatggcgtccaaggaccaaaccgcatcctcgtcggagacgacgacggcggtggcggatgatacctccagccaacaagacgcaccgccccacccgctgcaggtgacttcgccggattcttcgttgccgtcgccgtcgccgcggcaacgccggtgcgtggcggcgtacatggacctgacgcgggaggagtgcggccgcctcttcccgtcggggcggctccgctcgcagccgctccgcctcgccgggcggccgttctacctcacggcgcgctgcaacatggaccagcgggacaccttccgctgcttcggcctcttcctcgccatggaggtcgacgacgaggaggaggaagaggagggctcgccgtcgccggcggcgagcgtcaccgtggaatacgacttcgccgcgaggacgaggcagcagtcaggggatgagttcgtcagcatgtacaaggggcactacaccttcgccgccgggaagtcgtgtggataccggaatctgcttgggatgccatgggcgtcgttcatgggtgatggtggtggtgacagcgtgttcttcatcgatggggtgctgcacttgagggctgaattatgtgtcaaagaagatgcttaattagatcgatcgaattaatatggatatattgtacggcgttcgtgaattgagaatgcttcatagccttttgaaaatttgagcatgagagatcatagggcatatgataatggtgtttgacggagcgtggggctcctcaccgggagaccgcgcaggcccctctttgccggttcggccgggggcgctaagtgaggttcttcgccctcgatcgatctggggaatgttcgcgagagagcaaaacgcacgagacacgggcgatgtagacaggttcgggccgctgagaagcgtaataccctactcctgtgttctgggggaccggagctcggggaggagagaaaaagaggaaaagagtctctagagtttgaactctcttgctctccagctctttgtaactccttcacacacgccagatgacggagcgtggggctcctcaccgggagaccgcgcaggcccccctttgccagttcggccgggggcgctaagtgaggttcttcgtcctcgatcgatctggggaatgttcgcgagagagcaaaacgcacgagacacgggcgatgtagacaggttcgggccgctgagaagcgtaataccctactcctgtgttcaggtggatctgtgtgtgaaggagttacaaagagctggagagcaagagagttcaaactctagagactcttttcctctttttctctcctctccgagctccggtcccctcccttcggtgggcaaggtcctccttttatatctcaaggggataccacatgcaccacttctacctactcttcttttgggtggggacctaccctatcttgaccaaaacttggcttgccccttcgcctggaagctaaatcacaacttgtccttgagtgaggctcagcgccgtcactcgcgactaccctgtcatcccttcattaatgggcggagatttgcaatggccgctatccaaatgaccatccgacgagatgggtcatacctacctccactccaccggaggcagatgcatcgtgggagcacggttgtctgccgatgacgcgaccggcgtcagaccagtcacagaccggtcattcttgtccaccacgtgtcagtttagcatgctacacgtctgcccttcttcatacaataacttccttgcaatggttgcgatgaagcctggaatgtatctggccggggctgacgtgccaactccaggagttcccacgccggctccggctagggacgagtgcctgaaggctctcatcattccgacgggacggggcgaggcgtgcgaaaggccgcctgttgccacctaacccgcgatctgaccggtctgtgaccggtcacacactgtgacctgtcacggaccgagtgtgctgcgctgcattaaatgcggcgtggggcgctcgtccaacccgcaataaacgcggttaggtgagcgccgctgtgctcacctaacccacacacgtggcgccaaacccacagggggtcggggcgccccaaccctcggggccgaaacgggagcggcccgacccctcagggagacagagggaggggcggccac

SEQ ID NO: 18218 - DNA, 2234 bp, Oryza sativa
  unsure (1)..(2234): unsure at all n locations
ggttaggattaaatggaagagggagaatgaatggttaggatttaaagatgggtgaaatcatttcccttttccatttgccaaacattgcccacgtctaagggcctgtgtagttctcaccctaaaattttacaccttatcacatcgaacatttgaacacatgcatgaagtatattaaatataggctaaaaaataattaattgtacagattacgactaatttacgagacgaatctattaagcctcattgctctatgatttgacaatatgatgctatagtaaacatttgctaatcacagattaattaggcttaataaattcgtctcgctgtttactgacggattctataattggtttttttattagcgccaaacactccgtgcgacaccttataaaatattcgatatgacacgttaaaactttacacccttatatttaaacaccccctaaccttttttttcttttgatttcgacagcgagataatgttacgattgtttgatgactgttcccttggtagactcagcatatttccacgcaccaaattccaaaataattatgcaaggatgcagaatgccgaagaagaaattaaggtgtaaattacagtgagtgctttgtatacagctagtggaacgtatggaaacacaggaaccgaagccaacagcaataattaaaaaaacatgtttcttccgctcgttttcagggcctttcaccctatcacatcgaccgtttgaacacctctataaaatattaaatatagacttaaaaaataattgcacagattgtgactaatttacgaggcgaatcttttaagcctaattacttcatgatttgacaatgtggtgctacattaaacatttgctaatgacggattaaataggcttaataaatttatctcacggtttattgacggattctgtaattagttttttattagtgcccgaacaccccatacaacaccctatatagtacccgacatgacacgccaaaactttacacccctaaatccaaacaccccctgaactctacctcaagcatttcgaacttcagtgccattgacctaggttcaaatatgaggaacatccattcccatatgaacggaagacctccaaacagtggaaccttcaatgccattcgacttctcattttttgaaagataatgtaaacttgattgaacttagccaataacattaaggtggtacaacagtactaagaacataatggatcaataaagcacaataaaaatgcacacaaccaaaacaccacttacataatagtttgaaaagaaggaaaaaaaacaaggacaattaagggccaacaatccgtagaatagatcaccacccatgttcctatataaaaaactcattgaccacttgctccaaatatcgacttgccactgcaataaagtctcatcaataacccatgaatggtgccagtggataagtaaggagataaccaacaaagaagaaatatttttcttgtcaaaaccgcatcattcatgcataaccatagggaccacacatggtggtcgctcatagcaggacttgaggtctcgtatgtttggaaactagcaacaaccaactcccaaataaacgtgaaacactatacggtggacactatattaataatagaccacactgaatgaacaaaacaacattggaagaataaatgtttaattgcctcctctttgtgacaaaaacaacatttcttacaatcttgctaatttttcttggctagattatcttttgttcagactacatcacgatgcaattaccaaaggaaaatcaaggaaaatccaacgaaaatcatcttgctcctatgttaacacaatattagcggcacggggtaacaagttgttccacgccactaatttttagccaatcaaacccttctctatgaaaagttgaatgggtatgtttggaagacatttgaaatggtagattgtttatgcctaactatattatatataggcagggatattgatccaacaaggccgcattacccaaccatttgtcttcccaaaatctgatttgagatccatccttaattatgaaggacccatatcgaagaaaatcatgtttggccttcataaagctacctagaaatgtgaattcncccagctttcaatagggggcttgtgataaatgctgaaatccaaatattgcgtatcatttcttgccacgtaccatttgttgtaagcaacttatgaagccatttactaactaaaacattattcttta

SEQ ID NO: 18219 - DNA, 10523 bp, Oryza sativa
gtgttgcaaggagttgggaccaagataagaaaaggcacagagtgatggtcccaggaagataccacagaacccaaaggaggtaactatagtggtgcatgtgggtgtagaagcgaactaacttagaatgtgaacacgtgagctgttaggatgagtggtgcaaggtaaatcaatgcccccaacaaggtggcaatagcaacaagaaagtaggcttctttacacaggtaccagtgataggtcaaagctgaacgaaccactcactgagatgtttctccaccaagtcaatgtagtagcccctgcggtggatagggttagggtttgggtagggaagggctatttgatgcgatattggagtcaagattcttttccagcctatggctaatggtcatcatcatatatataaagcacgcatattctgtacagaacatcagagtggcattaagccaaaccaatatttcaggtgtatttactaagcgccgatcttttgagtggaatgtaccttaaaacccttacttttcatcgcttgataaaaatacattgtatgcacaagataatccagaatgtttgttctgtataagcccactacacttccatttcacacttccacacgtgcattactacatttgactattgtatttgtttcattttcactaagaaatttttgttaataacttttagctacaactattctatagttaagtagcccacatatgtttgctatcttatatatttccaatgttttctttttcaagctaccttctcatcatcttccatatcttgcatatattttccatatcttatatattgcatatcttgcatatatgaatctagatgacaaatgtctagattcattaacatttatatgaacgtgggtaatgctagaaagtcttataacctgaaacggaggtagtagtaaagatttgtccttttacaaataaatatttacctgcaaaaagaacacccacgataaagccagaccaatccgtaatttctttgcattggctccatttgctggaattgaaaaaacaaggaacattacactcaatgcacatgatcatggactattcatacacccaaactaatttgttcatatgtaaaatagtctgcatacttaggccaggtttggatccagggactaaactttagtccatgatttgacaatgtagtgctacagtaaatatgtgttaatcatggactaattaggcttaatagattcgtctcgcaaattagcctccatctgtgtaattagttttgtaagtagtctatgtttaatactccaaattagtgtccaagcatccgatgtgacagggactaaactaggatccaaacaccaccttaaactagcaatatttttataaagtgtgtcataggttatatagcaaaaaaaatctaagcatttcagaaaataaagaaagtaatgcttcgtctccagtattgggaatgctagttcccatacattatgaggcaagaacataaccaaaaggatcaatgtttgttttctatacaatactagttgagaatgacaaagctcaataacaggttgaataactatggttggattgacatttcagtaagcacataatgtaactggcacgtttaactttctgcctttcaagatgctctcatgatagtttcctttctgaaaaggaaaaatgttcatatgatcggatagcaaaaattggtatcatttgagtttggctacaaaaatgtaaacattcatgtatttaggtgtttttaatcatatgacaggattcagtttacctctgacaaatggtaaaatcaaatgcttctgtagaccatcatcaaatttctttccagaagtgctttgctttttcactcctttctttacctatcaatgcaatcatatataaataaaccggtaagaaacagttaggaaaaatgtaaatttcgcacacctgagcatctgggttaaccgcaagagcaagcaaggaaccaagcgcttccgcaaatgaatctctaactgctgacacattatcctccaagccctttagcatgtcattaatcaacgaacagtatcaggactatcagcttaaaaaaacatagcaacaactagctctcaacatgcattaagaatgagaaacaaggttagcaaataccttaacgcaacaagacatagaagtatcaatttcagccatccccaacccaggcccaccgatattagcgaaggccttcaagcatcgagcagccgctactctgacaatgaatgatttatcactcacacctcctcgcatgataatgcggaaagcctccaaataagctgcaccactaccaccaccaccagaaccttccaatgcattctcaagcaagaggagtgcatcttgtctcacaaagtcctgatgtttcatttaagagaactgtcaaaatccttttacaggtagaaatgaggcatgaccaacaaaaacaaaaaggctgacatcaatcacaatagtttttaagagttttatggttccactgggatacaaaaaaagaatgaaagaaaattttccacaagtaaatgcattgaagatttgtggtaagttccaccatattgtttcaatccttatttacagaaaagaaaaatcaaaaaagatacatgcatcgtaacagatctgctgtactgcaagagaaatccacaaaaagacttatggatagaaaacaaagttaagatagtttttctatagaagaatatgaagacaccaaaaaaaggatgaaaagacagtaaagaaagtgcaggagaagataacctcatggtacttcatgagttttgctacaatatttgatgtctcaattaagcctgcagtaatcttgtgtccaaataagcggtaaatttctcccagacattgcgctacacctgttaggaaatattgagttttttttagaaggagaaaaaaagtggatgtgcttacttagatttcaacattgtacatcattaaatgtgttgcttgcccaagattgtttagtccaggatttgcaataactttagcatgggatcaagggcctagctaagaagatatggcagtataccagtatgaaacctagcttgtactagtctaattcattgaagttcaagcagtagttttaggcttaatacaatggtagccattatgtcagtctattttaggattatatttttaatagtttttgtaaacatatagtttgaaaaggtaatgataaaacatgcgcatttgagatttggagactgtcaatgtccaaagcatcaactaaaaaataatggaattctagtttccgatgcaatttaaaagaagttaagaaaaaactagacaatatgaattacaattgctgacctgcataggccatgggatccgttctttttccatctaccaaccacccttggagggtactcgctcttgagtataccgatattgcatcacctctctcgattatcctccccattgctgacgatgccaatcgccgaacagggcgacgagccccaaggaaaagcaaggattggagagcatcctcacatttcctttgccaaagctgtatggtctcctgaatattataggatgtcaggaccgccaaaacacaaatttcaacaccggagttactaatccagtatttctgcatattactgctttttaggtaaacataatccgaaattaagcctgcagatgttgactcacgcagtagaaatttgctctaagttgacttaatgcgggcaggaaaggagagactggtttttctttcactaagttctgaatatttttgagacatgctccatggttttggttaatttagaacacaagcacccgagcatggtcacataaaattgtttgttcgatacttcaattgccatcttatgatgttagtacaactgcacaagcctggaatactacgacgcaaccgccagggcaactcacaagagatccatccaatccacgcggctccaagaacaagaaagctccgcatacgcaacgccattcgttgcgccaccgagagagagagagagagagagagcatgggcgggcgtgggatctggggcgctagcgctagggatataatagagggagggagaggtggtatggtaagaatgaccttgggggcctcgtcgagggcggaggagagctcggagaggaggtcgaagcagaggagcgcgtcggggggcttctgcctggccgacgccaccacggactccagctgcgccaccagcgcgccgaaccgcgacagcgggatgggctcgccggcggcgccaccgcgcttcgccatggtggggaggagagaggaggagggtggtggtaacgggagggctaccggttcgatcgagatctaggtgtgctggtgctgtgatctgggaatcgtcggggggttgggggccgttgggcgacggaccgtctgctcgtcgagctcatcggacggtccaaacggtttacggactgtttattttgagctctttttttttattttgaccatgctttttcacgaagtgctttttataaaaactgtactccgtaataaagtaaatcaatattttaatattacaaaattattagttaatatttgagtcgttatatgctaatgatcacctatagtgttttccgtaccagtgagtaattgattggtcaagcatctgatttagctagggcttaccggctatagactttgtgcgtcagtgtgctcattaattacccaattaattcaccaggacagtaaggatggagcggctcattttacgattgacaaagctagaacgctcccgaaaatgagtctattgattatctcccaattggttggatcgtaggggcgatgatttacttcacgggcaaggtctttggttcaagtccaggatggcccagctgcgccagggcgattaccacgaaaaccatgtggttaccgcaagatatactgtggttttaaaaattgagaagattactgcatgtgataacctgataatcacacggttttataaaccctggatttaactatatttaactagggttatttgtctttttactcccaaatttaacagttaaggttagtaagaattaacggaacaagagcaaacggtttgatttgtttcaaagccattgtttagttcccaactttttcttcaaacttttaacttttccatcacatcaaaacttttctacacacataaacttccaactttttttttcaaacttccaattttagtctttaaacttccaattttggcgtggaactaaacacaccgaaaaaaaagtaggggtaaaaacgaaagaataaaaaacaagggcaaacaatattggacatcaaagcaagggaaaaaacaaaattgccccttttagaaaactccgaaaaacaccagtacgcaattctaagaaaagagaaccacttcaacaaagacttttgagcacttttcttattcctagacatttatgcagcatccccttaatagtatggctttcctattgacccaagtaaatgaaaatttacaatttaccaatagattttgtgccgctttcatcaaaactccattcataagaatattgcatcgaacatcatctcatggggggctaatgttccttcagactttctcaattgtaagcatttgtcctcactaatctgattgccattgaccatcaaaataggaggctagatgcacttccagttgcacaagttttaacttgttcatccgaaaggtaggagtattgcgggaattagtgacattatttattaacataagcatggtgcttaggttagttaaatgtcgttagatgtgggtatgctccacgaaaagtgaggtagacatctggtggtgacaaccatgtccgtcccttgtattcctccacgctctggtatgacctaagagttcgtaaattaccataaccacgttggtagactaatagggagtgatcgaactaagtcctagcctagtttgttagtacttcctccgtttcacaatgtaagactttctagcattagcatctatatgaatgtgagcaatgctattatgtatagattcattagcatctatatgaatgtgagcaatgctagaaagtcttacattgtgaaacggagggagtatgtgttaaatgtaaactaaacattagcaatatacaagtacacacgaaccttagctttctatagttcattattagagatgaatctcctgtgtgtcacgctagtccacatgagtagattggatctatatcagtgtaggtgcaacgcggcgtgtgaatagaacatggcgcatattgtcgaatgatcaacccccattacggtttcctgttgccccttatataggtgcggaggccaccggctagagatggtgaggtatcccttataatctgggtacctatcatctatttacattggataagactgactgtctaatcttcaatctttcttaaaacaagtgaacccgacggacccaaagcatatagtccatcccatacgacaagctccaagaaccatcccgtggatactcaggcatcatgtacccaacagtaatttttgagtactaagtttgatgaagactccgaaattgatgaagtccgctagaagaagaggtgagactagctaagtacacatccccagcctagccgagtcaatctccctcagccgagtaattgtttccttggggaggtattgtaaactttatcaaaaagatcttttgggcggaatttcaccaatgcggttcggctgtcaataacgccatactccaaaccaggcttgaagaacacgatgttttcatgatgccacggcacaatattttggtgtgatcctacacaatatgcccgagaatcctgtctttaactcgaccgtagcctaagtaaaggctatggtcaaagccgccgtcgtccaacaccaagagatggcgccaaccgtcttcaacacagaagctgagtcgtcaagacaattattctgtggattccatggtgccatgtgccctacagggttggcaattttgctacggaatagctatatttatggtgttatatattttttttaaaaaagtcaacatgtatttacattgtaagtccctaaatcacgtatgtaattttattatttttttaatgtaagtcacaaaattacacatgtaaatagaaaatagagtgtaaagtagggtgtaagtaataaggtgtaaattagcaaaaaagaatgtaatacttgatttcctcggagaaggtagtaaagcaatttactgttaaacgctagtaacaaagcaaagaagattggatagtcacagtgtgtggagaaattgaacgaccgaaaagaggcacagccgaatacttgcggatcaatcggacggctagtaataccgaccgtaatcagctcagaaatctgtcgaaatcttgttagcaattccgtttccgttttgctacagttagttttgtgttgggttggattctagcaggcccgcgtgccagtgggtgtgcgctcgtcaaacccgagaggaagaagaaggcgaggccagataggcaggcaggcagattagaggcaaggcaggcaggcaggcagggctcgagctcccccttcccacacccatgtcctcctccgcctcctgcctcgcccctccccctcttcgtctcccgtgctcctcctcctcctccccctctcccgccgccgccgcgaggttcggttctcggaggagggcggtagccgcggctgctccggccaaggtacgccgcgcccgcccctcgattccggcttgatgcgtgcgtgccggggagtaatttgaggttctcttgtctctctctcagggatggaggctggtgcgcgtctcctgcttcaggcaggaggatgtcccgacgacgtctgacgacgggcccggcttcgagcacatctcgcggccggagagctcgcggggcgcggaggcgagtggggaggagggggaaggggaaggggaaggctcgagcgggcagcgtgagcgcggttccggggaaagggatgattggttcctcagagcgcaagaggttagccctgattgtttttttctagttgcaaagcattccattcgagctcctttttgtgttatgaggaatggtagtcaattcagatttagaaatgctatttactccctccgtttcatgttataagacgctttgattttctttcctagtcaaacttctttaggtttgattaagtttgtagaaaaaaaatagcaacatctacaacatcaaattagtttcattaaatctaacattgagtgtcaaaagtttcaatgcatgtttgttttgtcttaaaaatattactatatttttctataaacttggtcaaacttaaataagttaaactaggaaatgtcaaaatgtcttataatatgaaacgcacggagtagttagatgctagcaaatggactgtgcaaggtaccagctggctgaaccagtttctaactctcgtttcacgtcacgatgccgcaattgtgcaattaccattagaaacccatgaatccatagttgcattctctcagtggcttggatgttttattacagcggcacatagatcagtgttaaaacttaatctatttagttagatggagttggtccacatttacatatactgtccaattcttctaatgcataataactgaaatatggggtacacatgaaacacactcttatgttatcctctatatggtctgtaaaattttaattttctatctacttgccttaaaacacagaagcaagggaaagagcaccttttatacattcaaagggagaaaagttgtacatctgtctgcttaacctctaaaaatgagagatctgctggataggaaccttaacctatagagtagaaggatcatatgcaaccacaagagagaagttgctacacttcctgatgttgggagaattagcagtatcaccacccacttgcaactcatatttaagaacctctgacgaacattacaatcatgccaattcttgcatttcgacttctcttaaaggaaataagaatcttgaacttaccctatgtaaaatatttgtactttcacgagtttatggtactggtgatgttccacatcttagtccttcttaaccaagtagatctaggcttgtaggcttacttccgaaccaagcttaagccaaggactaaatactgtacctatcctcatgaaaaaagctgaagcctgttgtgggattatagctgcagcttgcttcacccagcattttgggattaactaagaaacttgtttattaatcttaacaccgagctgtataagttactttttatgatgagcacagtcaaagtgcaatcgaggctttagcaggcaatctttttccttgttatcaaaatgaacaaaaatctagatcactttatttttattttttttctcactagcaaccttttcctttacactttgcgttgtacctagagaaaataattaatatttttcattaaaaatcagcttttcatgactgccaacagaaggataaatgaaagcttaataaattagcaacaaatctcccaaaagaataacttaatcaataggtttagccctgaattgtgattctttttttttatgtatatatagtggacgtagcagaacattctaatcttcttgctaaaaaagttacttgtgcatactgtcccatcactagtttacaatgcaatttactcatacatacattgtcagctagtcttgatattgtattttcttgtcttcagtgtttgtctttgtcgactccttatcatcacgtaggctttgtttttatcttaattttataatttgtcttgcagataaagagaaatttacgagaaagaatattcagatttcagactcaacgatggactgtaccttggaccggaaaaaccattgctcaggttaattctttacttcttcaatccatgctctcggtgctcctttgtctattgcagtaatagacactagtagacagctagcttacaactgattttatcttaaatgtgcatcatctacttaaaatgggagtatgctataaagatgtattgcgcatctagtgttgatatggattgaaacatgctatctgttatgatcctaggatcatcaaagggtaaacatccatccagagggaggccggaagtagaacagcggtatgatggagggcctccaactggagaggaatagatctagaatagctggccatatgagaggccagaactgcaattagaggctagaaacatgttcagtcatctttccttgcttaatgaacatagatacaacctcatccttgtatagatggatgatttctctaaaaaatataaatagatctgatgattgacccttaagaaacttatctctaagatacaggaaatagatgattactcaatctaatcttaactctgaaataagatacctaaaattgctgtacaggaaatctgaggctgtgttcatgcacatgaaattttacacatgaattgtaattcctgtaagcgacacttaatgtgctgaatgaatggagatccaattcaagatttttattttagcattgtactgatttgtttacatatggcttcttagttgttaggttgtagatgatatcactatcttttatttaatatttatgcaaacaaactaacacttttttccttcaatgcatgttcca

SEQ ID NO: 18220 - DNA, 4602 bp, Oryza sativa
ttgagtccccgttttggcatcatcaccacgcagtccatcccgcgggcagtctttgttggtggctggctgaccacgcggctgaagcgttgaacggcgaaccgatgcgaggagacgtggacggaagcaaggaatccctcgacggcccgcatggactcgtgggctctcctgccgtgccgtggccgtgacccaaacaaacccagaccgcgtgcgcgcctggaagcttccagagcccaccaccaccttcgattcccccaacccaatctatttattcgcgccgtcgcccgccgctctccgcctccccacctcgcgttccctcccctctcccctccggccatggcgtccaagcggatcctcaaggagctcaaggacctgcagaaggatcccccaacctcctgcagcgctggtaggtatcctcctcttcttcttcttcgctgtcccccaattccagggttcacgggcgattttgtttcttgtcgattcatcgacttcttagcgtgccggctgctggatagtggaatcctctgttgactctttagctttcgaaaaaattttgaaccaagggaaggggaggagggggaggtcatactgtgcagtgctgcaattttgtgtttgtttatggttttgctaccaatttcgtgcatattattatcccctgagcgggtgtggagctgcgttttgttataattctggagctgttaattgttcttctttcgcaaatttaacgcttattacggctggctggatagaaggatagagagctcaagcagagacgctggatagagggatatacggttttagaggttattgttcgttcaacctgcttagttaggagtataccttcgttgttttagtaatttgtggaagcatggggtagcatatctaggacatggataagtctcgttggcaatgataccaggccacaatcgttgtttacaactcaacaatttgtgtaactggaactaattcttgtgtaccgatgaaataataataccctcaatatgtgtgtgatgataattgttcttgtctacatgctagtgtaccccaaacaagacatgtggatgttgtagaattgttttgatatttctaactgaatgtgacaacttgtgtggcgaatattggtttcatgatatgttctgttcaaatgcattgcaacaattgagattggattggagtacctttgtatgactaacacgcgaaatacgcctaacaggccctgtgggagaagatatgttccactggcaagctacgattatgggtccagcagatagtccatatgcaggtggcgtcttcttggtttctattcacttccctccagactatccgttcaaaccgcccaaggtatacattccttccacttctttttgtgttgttcaggaaactgtttgtttttaggacttgtggaagtttattataagagcatcacttgcttcaattttatataatcttaaggcccttgagtaactgattacaagatatttgctgttagggctctgctctaagcattcatagctagggataaaatgtcctgttaatttcagtctcaaagtggagttctaactgatcctttacaaagcataatatacctgtaaatgttagttttgtaaaggtcctgattcactttggcaaatgtgcgttaccaattcaacaaactatgaaaatgcttgtttcttccaccaccataaaaaaaaatgcttcacttgagttcaacggtcactgtagctttgttctgataacaatcatttttcaggttgcatttaagacaaaggttttccacccaaacatcaacagtaacggaagcatctgccttgatatcctgaaggaacagtggagccctgcattgacagtgtcaaaggtgaattgatcctctccctctccaactaagtcaagaaaccctttgagacagcttgtgcatgtgcaaaagcttagcttctttgaagttgtcacatagaaactacttacttgagaagttaggcactttggcaccatagaaatgttaggaagttggagctctcatagtctctagggcttaacaaatgcccaacaccgtatatcacctgcgtgctaatctggttggagtaacttttgttttccagttgcacgaattatctaacgtttgacacaattttcaggtactcctctcaatttgttctctactgacggacccaaacccagacgacccgctagttccggagattgcgcacatgtacaagactgatcgggccaaatatgaatcaactgcgaggggctggacccagaaatatgcaatgggctgaacgacgtaggccgatagtgttctctagcgatatatgttatcttgttgatctagtgttcatgtcctgctacatgcctacatggggtgtaatttcttctgtcactgaatttatgtcaaattctcgattgatggtagaagttattgagaaaaatttcaattacctgcaatattaattgcttccttatgagcttgttcggttaatttaattcccatcaggaatgaataagagaatcagaggggaatgaatatgagaatcagaggagattgaggggatcaatttcacaactagatgtgaaaaaattctcctctatcccttttgaagaggaactaaccgaacaagaacaagacctatcgtggttactgctttggtgtatgcaaatctggagcttcgtgtgatttattttggtttcaactgtaaatagaaattttgctgctgtatttcacttgttaggggttgtgggtggatcaaaatggcagatactcttcaagttacagaaacaatagttcttctcttgaaagttactactccgtaaaaaaaaaaaaaaagacaactcctagtaataaacctagactaaaaaaagataacccctagtaataaacttggacaagtgttcgtaggtaggattgggttttttcttatggagcgggtacataggcaaattttactttatctgttatttaaattgcacaactattttcttagtcaaatttgtttgattaagtttgtagataaattagcaatatttactaaatcaaattaattttactaaaattagtatttaatatattttgataatatatttattttgtgttgaaaatattattatatttttaagtttagcttaaaaaattaaaacgatttataatatgaaacaaacgggaagagtaccatttttttcataaattacataattacttgcatgatcattatgactttatgaggggctgtactgagaggccgtacttcggaaggcctttttacggccacaatttataaacctaaagacacatgattgaagcaaaataaaaataattataactatagggttggacttctgtacttctacggttgtaggtttaaaagttaaactaagattgaagttaactcatattgataggacatatataaaacattgtacttcatacacaggtattaagaaagtagctctaaataaaggaaagttgtgattagttaagaaaagaaagtagtgaaggaattaaatataaaataattatggttagttgagatgagaaggtaggtgaagagatggcttcgttttgggataagacaccgtgctagaaataactttattttagaacggaggtagtattatgtgaccggacaaagtactacattgtggtgtgttaccattttataacttattatgtgattgatgttagtaccaaaccaatctaccacggatttttttcgtcgcttggtttgcaaggctctgtacttatgttttttccaaaaaatatcaagaagacaaaataaaatgtcttttcaaaactattctaatccgtcgcttggtttgcaaggctctgtacttattttatttttttccaaaaaatatcaagaagacaaaataaaatgccttttcaaaactattcttaaatagtagtacaaaatatgaaaatccttgcataatcaaaaggtgagcaagcagcaacgatcagattcgagggctgcataacggaaactcttttatgaaatttaactattcataacaaggtttggaaattctccaaatagcttttagatttgtcattttccctcggaggagatggcttcttaattatttgtcatttttttctcagatgacaacccatgtttaaaaatagtgtgggtctactagtcactctccactccccttatctttccctctgctagttgaccaggcggtggcgccgcacggaaaggcagatcgatgactgcgcggccctcttcctggcgcgcgctcgtcagccttcatggcatcaatcaagttctgtgataacgaccgggtgctgatgtggaccaaggtgttaatcagggtgcttagtctgtctttccactccggcctcttcgccagcggcgaccctacaataggagcatgctcctcgtgatgacccacatcctggatagcagtgtgctgaccccgctgctcttccttgccacgaaccttttctgctaaacgagaatgccttgttgttcagctcgtgctcatggtcgtcgctgtctgagacctcgctaaccataccaaggcaggggcaggggtagtaaggagcagaggatgagaagtcaccgggctgcggcttagaggaggtggagaggttggggctgcaggaat

SEQ ID NO: 18221 - DNA, 8103 bp, Oryza sativa
agccagtccttttcttgcgctgaaatatcaggaagggcctggtcgtaagaaagactaggaaccagaagggagtgcaaaacattttttttctgaacaaaatgcatcaaagtggtttgggaggaaaaaacgatagggaacacaatccaacattctacaccagaattttccagtctttcaaaaaaaaagggggcatgtcttcacatgaattacaatccaacgaaaaaaggaaacaaaattcagaggggcctgggcctgaatgggaagttttatattcgtgctgcgtctaaattggaaatttaagactatgactatccattttagcacaactcaataaattataaagtaaatatttcttacaaataaacagagccgtcctagctcagtggtagagcgcgtggcttttaaccacgtggtcgtgggttcgatccccacggacggcgattcagaattttttgaaattattttgtagttctaattggaatggaatgtttgcaaacagtaaaatatggataacccagaggcaacaataattctcaaaagttccaaaacttaacagttgcagacaggctaccaaatgaaaattatctacttcaacattgactgaatttttgccccacaacagaggcgcaaataataaaaaagtcgctatccgagacaggaaaataattcttacagccttacactacaattacaggcaaacaaaagaaaacgatcaacctgaacattgaccgaaaaatttttttggcccacagcagagatcagccatgacaggggtgggacaaagcaaccacatggttggtagcttatacagcatgcaaactacaagaaccccaatctactccatatcacaagcacatggcaagtagcacaaagcaggtgggatacacacatataatagccagaacaggggcagaagcaaatcacaatcgaatggcagaatcattcccagccaatgaaatcaccaccaaacatgttgataaccattatgtcacgcgtacaaaaaaaaaatcagagcactcctcaacctcacctaaattctgtttatcctcacatagctagctctactggtacaaggattagaggattgtaggtgcttaaaatagcttgtatggagataaggcgtccagcggatggatgaggtaggtgagcacaagggccaccagcatcagcacatatgcaattccctggtcaattgatgtgcctgcgtgaatatattattagcagcaggtatttgcagggttagcctgatggctcgagaaaacaaaagaaaaactggccacgaaaggacaaaacagaaatgtaagaagtttggatcattgactgtcagtttagaaattcactaatttagacacgtggaaatgagctcaacatttgaaatcgggcgccttgaagagacatgcactctagatgttctgggtgaaaaataacttttaggactaaaataattcaggctgcttgaaaatttctgcatagcatccctaaggtttgaatgtcctgtaccaagtcatccaaataataattcaagttccaacaagacgtcactaatccgaaattgtcgtgatgagtagcatgaccgatagcaattgttttttgaggcaaaccaagagcatttttttctgtaacacgttgcaagagaactaatcctaaaagaaaacgaatcaaatgttttgcatatggtaaaacaggaaaacctatcggatttagagacatttaacttctggagaacctgaagtcacttttaggcaaacaaaattcccggcatccttcaaatacaagagtgtaaacgagcagatgctaggtatcatgcattcagtggaagctactcaatgaagagcgaatactaccaatgaaaatgaagcgcaaactaacccaacaagtacagcagaacaaaatacaagattcttgagaggtggacagcaagcacccttctagtgtgatctatcacagcatttgtgctcactgctcatcgatgaatagcactttcacatatggacacacaatgtgaggattctcctagctgttcctttcaatcagtattgcccataatatgtaccagaatacgtacaatgaacacgcacaaaacatttggcaagaacaaaacttaagtgaaaaacttgacagagacacattcagggattccatgtatatcacaaaaactgaactttctcaggaaattacagcagaggccatattcattttgtgcaaataatgaatcaattattacattagtaaaaaacagtgttttagcggcaacattatttgatcccataaaaacagttgcttgtgaaatttgacacgctaaaaatactgaggtgttcaccatcataaaaatattcgtaaacagtcgcgacccatctaggccttccgaatcaacgtgtacgagtcagagatgtcaagcatcataagatcatagaagatcttctatataccaccaaaagctgcagccttaaaggtctaatgtaattaatttatcaaataattccgaagaattcattagaattccacgttaacttttacacgaaacatggaaaatttcaatactctgtagttccatggaaatccttatcaagcttttatcggatgcgcggacaaaacatgctcccaaacaacaaactaccttgtaaattactacatccatcctaaaataaattcatttgtcactcacctcacatatatcaatacgaaccaaaaatactataatacccctgttttatcaaatcccaatgcaactatttattactttatctacttctaatataattattttttttattttcacaagctccgatgcaatgattactctagaaataagtttattttggaacgaatggaacgatctaaaaatgaacttattacaggagggagaaaatctttgatcgtgcaacattagtttttttttaagaacaagtataataatgagctataagtctactgtaagcttatgtggaggagagaggtaacaaaaaattatcattttgaaacttactccatgtcgtttcgaaaaacgaaacctactcctacatcaacaacgagaaggtcctaagaagcagaattaaactacgtttttttataaaaaaaaaagtttcatcgcactccggatgcatcctttagtaccttcgtttcgcgagtctcagatgatttttttttctttcgtggacgagaatcgaattatggcgtggggcccacgcgccagccacatacacaaatgaggaacagggggtggattgaaactgccgagggagttctcaccgtcgctggagggcgcgggggcgggcggctgcgcgggggcggcggcggaggcggaggctggcattgcgattcccaccaccaccacggccaccgccgctagccccagcgaggtccacgccgctgccattccccctcctcctcctcctcttcctcctcctcctctccgcggcacgcacgcacgctcgcgctcacgcaagggcggcgcggcgaaccggaccggacacaccgtccaccaccggaggagagcagcggcggcggcgcggcgcctttccccctctctctctctctgtctcctctccgcccagaatttcagaacttgtacgaatttgctatctgctcccctgaaatctcgggctcgggaacgccaccaacgtgcgcgccgcgcctcgcctcgcctcgtctttataggcggcggcatcagtagcagacgacccaatgacatgtgggcccaggaggcggtcggcactgtccccacccaatgacacgcgggaccaccctgccagcgaatcagtgaccgacgggtggggggcctctgccagcgaatcagcgattgacgggtgggggcggcatgacacgacgcgagtcacgcgtaggggtggcaatggggccccggtacccgacggggaattcctctattagggggagttaatggggtgaaatcctcccccacggggtaaagaacggccaaatttaggccccatcgggtggggcgggggtaggagcgctccactgctcccaggccccgtatccccatgggggcccaagccatatcagcccatgagcaaattccttaggtgtcagtccattttagaaaataatagcccaactctaggtccaatgagagaccatatatatatggagaaaccctaatcccgtccccactcccactcccactcccggccgctcgtcacagagaattttcagaatatgccatcgaattcgcactactttcagaatatgccatccaattcatgctactttcaaaatacgccatcggagcacgaatttcctttgttccgtgccactccgtctcttccgtccgtagcaccgtcgtcttctccgcccggcaccgccatcgtcagtccgccaccgcccgcgccgacgccagtccgtcgccggcatcgtccatcctcgttggtgtccatcctcgttggcgtccatcgtcgtcgtccacggcatggcgtgggcgcggagggaggcgagcgcgacgcgagtgctagcagcggggcgagcgcggccgcgagtgctagcagcggctgcggcagcgggcaaagctgactgtctgcgtctgtgtctactaccgcccgggactggacctcgtgtgcgcgccttgtgaattttgagagtagagggcggccggtaaaaactccctgtatgttgttgctgctgcacgtacttggtccagatgatgagtgtgaattggcaaggacggaagggaacggaatgggtaggtagtagttggatacttggattgttcagaggaggacgtcggacttggcggggagtcgcttgtagaagttgaaggggacggatggcgagcgcggccgcgagtgctagcaacggctgcggcggcgggcgaagcggcggctgcggctgcgggcgaagcggctgcggctgcagaatggggcggctgcggcggcggggaaggggtgggggagaagccccttgtggatggtggggcgaggcggaatgcggcggctgtgtacaatggggggcggcgtccgtggtggtggggaggaagttgaggaggacgagggcagggcaccctcgccgacatgctccagccggaggacgcgatgcgcgggcggtggaggacgacgatggcggtgacggcgaacagacaacgctgtggctgacacgggcgcgcgcggcgcgggcggtggacaacgacgatgccgacgactgacgccggcgcgggcggtggcggactccttccctccgcgcccaccgagccgtggacgacgacgacggacgtcgacgaggatggacgatgccggtgacggacggacgccggcgcggctgacacgggcaccggcgcgggcggagaagacgacggagctatggacggaagagacggagtggcacggaacgaaggaaatttgtgctccgatggcgtattctgaaagtagcacgaattgggtggcatatcctgaaagtagtgcgaattcgatgacatattctgaaaattctcctggtcacaaaacacaggcgcacagagaagaacacatcgcgtttttctttctatccactgatccccaattcccccattcctctctttctctgaacaagtccgatcggccagggcgagggaggccgccaggacgccagcgaggcagcgacgtgcctccaggctgcgcgcccgcccccacgccatcgccgcctcaaagctccgtcgtcgtcaccgaggagtgacgccttcaggctcccgcgccgcgccctgaccctctgccgttgtgcgccttgctcatcggccgagtcgccgcctgccaatgcaacgcacagcgtgagagctgcacaacagccacatgcaatcttttgatttggttctaccgcttgatcttgggaattggaatgaatcatgtaactgctctcttttgatttatggatctgatgtatgtctttattaaaacaaaaagacaatagatttgtcatctgtgtgtgcatgtgtaagcattttattctcaattcgtacgggacttctgtgtatccattatctctaattctctacttccaaattcctaaaattttctcaatttgtattcgtgtctcccttctctctattcccaaattgatgcacagtgctgccccgtgtttcctctcctcgggtgtgcgcccccgtcggagccccgcaaccccggtgggggcggggatgggggaaagattgcccccgatgacggggatggggacagggggcgggggatttccaactgcccggggacggggacgggtggtcacaatccgtcgtgccatccctagtcacgcgacacgagtcacacacgagaggcatatcaccccgcgcgccgcggccccatttgcccgggctccagctcgatattaatctcgagccaatcttatggcagtcctaacctaactccacaacactacttgtttaatacaaacaccatttttatatacttaaattcaatgctacttgctcacatgatgtcttggatgttgtgtataaaccatgtcccatgtaagatttgatttccttctctttcctcatttactcacttgatacatcattttttattttaggtgacagcttatttaatattttctccattccaaattgatctacatatagttttttttaggttattcctaaatgattaatatatttatgttcattcattaagtttattcgttatttgtgcattgaagtaaatagacattgatgcatgcatctatgcacacaagtattttattacccacatgcaatatcttgatttgctgttggctaggaaatagtggggatggtgcatgcattgagtttattgttagaataaatatagtatgagagagttattagcttttcttggtcttagtgtacctataaaatatgtagatcaatttggaatggagggagtactatgaacaccatctagttattgggttgggaatagtttaattattacactttcaggcttttaagctactccctccgttttctaatgtaagactttctagcattaatcacattcatatagatgctaacggcacccgcaatggttatctataagctctctacaagagatccatgtcaccatattttcctacttgaaagagattaaatgaagagagagagcaaagctatctactaacctggagatagtctatagagaaaaacgaggcaatggattagagagctatagatacccatgtagacatactattgaggtggtttactattaatctattctattgctgagatgtacatattttatagagagcaccttactttaccattgcgggtgctctaatgaatctagacacatatatatgtctaatgcatctagattcattagcatctatatgaatgtgggcaatgccagaatgacttgcattatgaaatggaggaagtagcttggttcgaggtcaagctcaacataagcaatataatatacttcctccgtttcacaatataagactttctagcattgtccatattcatacatatgttaataaatctagacgcatatttgtgtttaaatttattaatatatatatgaatatgggtaatgctagaaagtcttatattgtgaaacggagagagtatatattaatgataatctcttgataaatataattattttttatttgatcacactaataaaaaaatagaagaaagactaagataaatctattatgctaacacatgctaatttattgtgtaaataaatattaatagatacttagaaaaaaggcccatgcattgcaacgagaaaaacagcgccaacggctaggtcaacagttgtcagctacgagagtgtcgtacggaagacccgacgaaggtgggtccattggagcagtagagctacgggctggcagagactattcgggtgatgaagctctgggatggtgatggcaggtacgagagagggtgctataggcttagttcagggttccgtgagccaacaactacaatggctctgggcaccatgaaccccccttgcggtgttgtcgagtggctgcctccttcttggcatgactctcctagtgaaaacccagttcggatggacggatgacggtggcgctaaaggcatcatgaccttcttggagatgttgtataatgtataggaggtccttgttccctgtctttgccgccttccctcggttttgttgctagtggtt

SEQ ID NO: 18222 - DNA, 8600 bp, Oryza sativa
tccctcctcattggatcgttttgtaggttgaattcgttctttatgtacataatagcacctaaataaaataattcaacaaaacaataaatatatacaagataagatgtaaaaaatcaataaacatatttaagatatatgtaaatagtacatatttattgtcaatgcaggatatggtaatgtgtggatatgatgttgcattgtgtgatttctgtaatagtggaagaatgagatgacgtgagaataataatcacaacaatcacttacatgtaaatcaaagtaggtgtgaagtatttaatcaaaattaaaggtgagcactagatagaatgcgaacttgttaaattttgacaccaagctaaaaataaataaagttgcatatgcacttccttgatagattatatacagttagtttaataatagtgtagtgcacaattttatgggtgtgccatacaataataaattgtagcatatcatcgatcttgttaaataaagatgatattttttattgtttatgtaatactccctccttccctaaatgtttgataccgttgacttttttagacatgtttgaccgttcgttttattcaaaaacttttgtgatatgtgtaaaactgtatgtatacataaaaatatatttaacaataaatcaaatgatagaaaaagaataataattacttaaattttttgaataagacgaacggtcaaacatttttaaaaaagtcaacggcgtcaacattttgggatgggggtagatatactacatggcctagacaaaaaaaaaaagccatttcctttagatgactattaaagtggggtatgatcatgcctaatcatagggcaatatttaatcatcttataaagaaattatattattggatgtagttttttggaactccacaaacgccttacatttaaactatatctttacctgcaatggctgcattgtcccatccttgtagtagattgccaatagatgccacaatagcagcgagcactgcattagccgtcgagccatccgctacaaagtcaaacaataaaagataatattttcttgaagataatatatatttacttataaagaggctattctagacttctgtacaaagttaatctgacacctctgaataattgatggaaaagagaaaagataagataagaggaggttgcatgggcttcctttgtcttgggccaaagtaagctatcgtgcagcaacagtagtagttggccggcccatttaacaagcagcagtcaacatggcagcatttagcagtggtaggttggcagctacaagtagtactccctttgtctaaaaaaaaaaaaagacacccagtactagattgattttttttttacggagggagtagttcatcaacacagtagcaggcaatgcaagctagtaccaaggcgtcgttcggattaagctggcttttttagcacgaaaaacgagccactaacacaagactaatagagtaattactgttataaatttgaaaataaatttatttgactttttgaaaaaaaaacttaccatatagatagttttattaaaaaaacataggagtatcgtttaagcatgcttagggaaaacaagatagtagccaaactaagaagctattcaaactcacctattcagaacggatctccttgtgctctgtgagcatgcttctcaaactatgaaatgatgtatttcgtgcaaagttttctatatggaagtttcttataaaaataaataaatttattttttaagtttgtaataattaatactcaattaaccatatgctaataacttgtctcattcacgtgccgctaaaagtgctagcataaagttggttcgaaaaagcttaatctagcatcgggagttagaggttaggagtaatcgttatacaatagaagcctgattattgtaacacgggtttaaactttttgccgaagataagacgaaaatgtaaagagttactccctctgtttcaggttataagacgttttaactttggttaaagtcaaactacttcaagtttaactaagtttatagataaatatagtaatatttaggatgaatagctaaagtggtcctccaagtatcagcggagttcttgatgtttcaatctatccatattagtccttcaagtttttattttagttcaaacttatccttcaacccacttagaagccacatggccaaacataaccaacaactctcttgataaatgacatttttaccccctcattcacatatataagagaaaaaaattgaatgcaatgaattttttatatagataatgcatagtaatttatgtaaaacgaaaataattatgtacttgcaagtgcatacgatagacattgcttaagtttgatgtgcacatgttgaaataatgggaagtacttctgcaatgttatttatttatcttggttttctcttttctagtgtatagttgtatataaattatgggcgaaagggacatttttttttaacagaaatattgactagaaatagccatatggcatattaagtgggcctaaggatgattttaaaccaaaacaaatacttagaggacctacgtggacaaaatgaaacctgaaggacctaattgagccttcggtgaaacttgagggattaaattagctattcactctaatatttataataccaaataagtttcattaaatcaataattgaatatattttcataataaatttgtcttgggttgaaaatgttattattattttctacaaatttagttaaacttgaagcagtttgactttgaccaaaattaaaacgtctagtatagtataagcgtggcacaacaaattgagatgggtatagaatcgtttcagggccaaggcgctagatttaaaagctaaaatttctaacattaatagtgagaaaataataaaatctagaaatattcacgttaattacagaacagggaaacatctcacacatcaattcatatgcaacattataatggatgtgtgtttgatcaaacaggcaataaatacataatttgatttcagcttgatatgtaagtgtagatacaatatgcccaaatcaaatactagtaagttctttcatgttggacaaatctaccaaggatagtataatggattgttccattctagcaataggcgaatcttacttgccatatgattaatgcaattaaataaacacaaacatacatttttgaaaattttgtgttatgcatatatatatgattcctaacggaagcattatttttgcactaaaaataattcctcttagtattttctcaacctttcgatgataaaaataaaaatacattaattgaactaacacaaatttctaaaatgaagtgtatttgtatttcctttttttaacaaatatatgtattttctgacaacactaaccgatgtggatgcttggatctatgactagtttttagtaaagaaactctcctgtttttgaagtggtgctgataagtttgatacatctacctctcaccatacctcacgcgacctacataagaatcgtaaaatctagacttgtaagtaaagttctaacctgttgttgtcgaaagttccagacttgattcggagaagacggaagaccctaagctgatcggcgaggatggagagtattgttgccgcgtgttcttccaggcacccaagtccgctgctgcataccctcgtaaataaaaacgaatcaaacacaacatgcttaccaatttcttacagaagaacaaaaataataatggtttaaacatacttacccatcctcaggccagaaaccaaacgtaacaggaatagaagaaaaagtgtagccggtttaacctaaaccacatgtgaatttcttcttatgtattccttcccttctgccgtactgtttcaaatctcaaccatttgtagtttgtatcggcgttggtgtggtatcactgcaccacacgtcaaaacgtcgctccctccaatatccagtccgtgtttatacagtaggaggtaaatagagatggagttatgtaagggggagtcggaggctatttaatcagttcgttgagttggtttaggggtggactgatttgcctttgcccttgccggcgcagtccaaccacaccctccggatcaacctcgatcgctcgtttctgagccacgactgaaaagagagagtaccgccacgcaccgcgaataacgctaacggtaaaacagcgatgaccatgcatcttctctccggccaacggctgctcctcccgatcccatgcggcgcctgctatcgctcgccgccatccccggcgatcaagccgtccccgcttggactacgcccattcaccaagtcatcgtcgtcgttgcccctgcatctgcatgcagtctcgcccgccaccgttgcaaccgacggctcctccacctccgcgcagccaggttagtaacagaatttgttgtgatcaagtttacttggatgattgaactgaattcacgtggctggctacgtgtgtagatagttgggcagagttcgcgtcgcgggtgtccggcgagtgggacggatttggcgcggagttcacggcggccggcgacgccgtcgagctaccggagaacgtggtccccgaggcctaccgcgactggggcgtgcaggtgttcgactggcaaacgcagtgccccactctcgccgacccggccgcgccgtgcgacctccactacaggctcgtccgcctgctccccactgtcggctgcgaggccgacgccgccaccgtccacacctcgcaccagcgccacgcctcctccgcctccgcgttcgcctactccgccgccgggtcgtacgtcgccgcctggcccaggggccccgcgccggtgctcgaggtggagcactgcgtcgtgcacccggacaaccgggaggtgagggtccgcctcgtgcagacagtggcgctcgccaaggaggcgcggctccgcggcgtcaaggtgttctccgagcagtggtacggcccctaccggaacggcgaccagctcggcggctgcgccctccgcgaggccgcgttcgccgccggggagaagctcgccgcctccgacgtgaccgggcagtggcagagcgacgccgcctccgccgcgaggttctccggcgagctggaccccgagacggtaagcatttctccacgcgccattgctgcacacggacagcatcaagtgcttaatcagcaatgaacaacagggcaagttcgccgggttgacgcctgatgagcccggtgagagattgagccgagacgacggcgatggaatcgtgacgctgccgaagcagctgtggagctcgttcaaggagaatggcaaggacgagttcgtgtgcgaggtagggtgggtgctgggccatggcagcgccatcacgtcgaggtgtgttctctccagagatggagatgtcaaggcaagtatttctctctctcttatctttttctttcttcctgattctcctctggtttcaggctttcaacagagtacacagccaagaaatgaaatacactgaaagcagagtttggttttgtttgcaggagatagtcgtttcgcgcgagtcgcgtgtgtcggagggaacctgatcaggatatcaaaattgtcaggttcgatgatttttatgtagaatagaattatagccatacacaaatgtcttacacgcccgggtgtatactaatcaaattggcctcccgaaaggagtatacatgagtacatatactgacgctgttgtctgcatgatctagctaaaagtaatacagcacgccgctttctgaatttatagggacactacggtatactacctccgtattttaatgtattttaatagaggacgccgttgacttttttttacatgtttgaccattgtcttatttaaaaaatttaagtaattataatttattttgttatgagttgttttatcactcatagtactttaagtgtgatttatatcttatatatttgcataaaaattttaaataagacgaatggtcaaacatgtgagaaaaagttaactgcgtcatctattaaaaaacggagtgaatagtttttctccaggttttgcaaattgcaactttggctcaaacttgacgtcgccgcctcctaatctggtttgagcacttcaccttcaccttcaccttcaccttcgcccacggttttttttggtagccgaattgtaattcgattcatccatcggaggcagctggatcttaatgtaccggttcatctgttgcttcagctgcctgacactgcagaacaaagcagagcagagttgcaacagcagagtagcgtctagttttgttcatgggccaacagaacaacgaccacagtttgtgactgtcaacgaacacaaacgtccaacaatcagaatacaaacgtccaaccagtacaagaggtggctggtagtgcaactcaatctcatatgacatggaaatgtaatattataatctttaaagatattataggaacgcaagcattgagattagagttacgcaaacatgacgactttcattgcgtaatacaggtcgttgaaagaacaaccaacaaagcgaatgcacctcttttgggttcttttttaattgctaggcggccttgcaactacatcaaccaatataccaccactatatgctcatgctattgtctccatagagactacgctacttatcaactcacacttgcttggaataaataccaactaaatgaattgacttgatctcttctcatacaagtcacagacccgaattgggtagtgaagaatgaatggacaagagaagagaacaaaatctatacattcgtgcatcaatgtacttgaggtgcgtctcttaatgctacattcaaactgctttccattgtttgccaccctagtccaacgttgctgccttgcatcatggctacaaattcggcgtagtcaatttggccgtcctgaaaaagaatgacaagaccagttcattagattcaactcgagaaagattttcagggttgacgaatcaaaatcatcgccttcttttttcttttgaaatactatccctggaaaaaaaaacatgctaatgctaagttctaaagcatgaggacccaggacaaatggatctgtagaagagactgccctcaaccgtgtacatgttatcgttctgttgttgaacaagtttggtgttagatgtgacgctgacagatgccagtaaaatcaaataaataattttacagggaatgtcattaggattaaagactacaacgcaaactaccgatgtaccagctgaccagcagagacactagaagtctaaaaaaatcctaacatgtccaagagtgtatgctttcgtttaaagcgcagagtgttatgctgaaattattctcaatacggtggttacaagtcaatagtcactaaaaaataaatcttggatattgtatagtgaaatcaacttacattgttttgatcaacctctgaaataatctcttcaaggagtgaatcctccatgttatgttctccacaagctcgttgaagcttgtcaactgtgatataaccactcccatctttgtcaaaatatgtaaaagctgccagcaggtgctcctcacgttctatcttgttaagaggtagagttgcagcaataaattcttcataatggattgttacattattgtcgttgtgtgcctgaagaagtttcagagtttaaatcaagatctcaaagaaagagagcaccatctaaccaacaatttgtggtcttgcacctacttaccgcttccattatatcaccaatctctgtatccttaaattcagcgccaaatcttcttaaaccttctctaagctcaccgaaagtgattacacctctattttttgtgtccactgccttgaacatttctcttaacccagcaatctcctcctctgaaagacgctcagctatcacctggaagcacgtaagtgtcagaaaaaagaaatggcatatggttcacagatgtagccagcagtaggacatgcaacgaaatagtgctacaggctgaattgcggcatgttaatgtgcataccacataattgaatatcgcaacctaaaaacttgttttccatattgccacaaaatcagatgatcagcctagagcagctcccaaagttgacatttaccaaaaaaataacttattttactatcatagggatccaaagaatgacaatatggcatggcatgcgaatggatatagtgaagggctgaaggccaattggggatactcgattaagatgatatgatagcaaatatcatagcagcaatatggaagcatgcaagaatatgaagcactcactctcagagccaacttctttaacttgttcattgcagagaattgtttgagccgagagataacactgggatccagagcttgatcagtggcaactccattttcacagatccaaggatgccctgacaataagatatatatatcagtcaacatatcaaaaggtttgtagctcttagataattagtgaaaactaaaaccatgcgtcaaactatgttatgaacaaaatgcagagctattcgcgatgaaacaaaagggcaactaatttatgtgaagaaataggtcaaatatacttacttagcacttcatgggccttcaaacgctccgaagggcaatgagagagcatttttcttataagatcctttgcactgtcaga

SEQ ID NO: 18223 - DNA, 723 bp, Oryza sativa
tttaacatattgatagctactatgcccataaccaaccctgttggaacacacaggcagtttatttctgtagcggagacttgaccttttctgagtattaccattatggccttgctgcttctctttacacacatttcacctcccctattcgcagatatgcaggttagttcctatcgcccttagatgaacttatgcttaaagattttatttgaattgcgcatatagtcgttgggtgtttaaaccaatggatgtggtttgctatattaagttatttctttgtcttgcttctgagcagtgaatttatatttttctgcatgaaccttttacacaaagtgaatgttactcaatgtggctatgtgcatttaaatgtgtgaaatagcatcatgtccacaaatatggcattttctttagattgcctattactccagcacatgaagcctctgagcagtgaagttccaagatggcacgttcatgaattatgcagttccaagttgtaagaaagcattttgaaggactaacaatatccttttcttccagatgttattgttcataggttgttagctgctgccctagaaattgccaaacttccacccctctttcaggatggtccacaacttacaggcgtagctgacagtaagaaaatgaatgcactctgaagtacatctttctatgtttcacttcttggtactgaactactgataccttttgatgtcagacttgaattat

SEQ ID NO: 18224 - DNA, 7555 bp, Oryza sativa
  unsure (1)..(7555): unsure at all n locations
cctccaaaaattatgaaaacaaaacccaacaagacaatgaactctaaaaactattggcctaatttttttaaagttttaatgatgatgaatagtagtggtaaatcgtgtaagcaaataaaaatgtgacaaagaagtaaggggtagcgactgacgtggcttttaaaaactacaaaattattagaatcattggaatgataattttaaataaaattatttgtaaaaagtagataattttaaattgatgctagctgcgcaattgcgcgggctgtccagctagttgcttgaatttttaccatgcatatgatttttaccatccattttatccaatctaatcgtctttatcctctacgacaagtcgacaactaggtaaataaaagggcccatttatactattaaacaaatttctttatcacagtaggcgtctattcgatatatctaatttaatgatcgcccccaactttctcgtttaagaaccagcacgccatctgcgaaaagttcaacgccaggagaagaccaagaaaataggaaatcaacacgaaatcgatcgatgtgcagctccgtctaaaactaggcagtccacagaagaaagtgatgtgcagtagccactagtatctgacaagaaccccatacgcgaccctagtcgaatagcaacagatattgctgcacttttagaacacgtgatatgatagacgtgactatcattttcgcttttggctgtgtttttggatccaaacttcagtcctttttcatcacatcaacctgtcgtacacacacaacttttcagtcacatcatcttcaatttcaaccaaaatccaaactttgcactgaactaaacacagcctttattcgtaccattcactcgtaaattaaaagataatttatacaacatgtcatatataatacacaaatactaatatttctaatattttcatatttctttttaaagtttatgcgaaagttgtctcttaatttatggatggctcatcatcnctcttcacttttctttttcatcttgttacttaattcaatgtggtagttttggaggtggtatatgatgcattatagtactgtacctctcaagcaattactccctccgcttcgaaatgtttgacaccgctgactttttagtgcatgtgggaccgggcgggttgttaaacaaagtgaaggaaggataaatctctttgggctatcatccgattcattggtgaaagtatggcatgtctgcatatagatctcactctctgatagcagttggtgaataagacaagcggtagaatatatgctggaaagtcaaccgtgtcaaacatttaggaacggagggaggacttattagcttgattagtggtgtacctctcaagcaatcactgctactgctattatgctaactaactgattatataggctcgaccgggacgtgatcgcgtcacacaagaattccacagatgctaattacttcttctcgtcacactacgatatgcacgaaccacatgtcatagtttgagtacagtaactggagtaattcacaagaaaaatttacttatattcactttattcttttcgtcagaacgtgcggtagagtgaaacccacatcattggcatgagccacgtatcataaagtttgacagtaacttcacaaccgtaattaacccggtcaacaagatccatcattcatacagttggctctcttgattgtatcagattaattagctcggcctgatgatcagatccgtcctagatcaatgcaaaatagtccccgcttggaccaagcccaagttcataaagctttatactagctactccatccgtcccataatataaaagattttaagtttttacttgtaacgtttgaccactcgtcttattcaaattattttaaaattattatttatcttatttgtgacttactttattatctacaatactttaagcacaacttttcgttttttatatttgaaaaaaatttgaataagatgagtggtcaaacattgtaaataaaaactcaaaattccttatattgtgggatggagggattatatatctagcttccttccaggaaccaagaaatgttcagttctaaacgaagggctgacgaatcgtcacgaggtcaaccagtcaacagcaaatggtccttggtgtcctctttcgacctgtggtccataaccatgtgtacaattattcagaagtggtagtataccgttggcaacgtcctctagtttcacatttttcagggtgttttacttttctgaacttccgatcaacgtggagtttaattagcagtcagtcagcgcctgaagatagattgcaggctgcacgtgggggcgtagctacgtagccgcgtcagggtcaacgacactactttaatacatatacgtacgtatgtacgtacgtccagttctactatttgtctacccaagatgattggagccacacgtcggtcagttcgtcacccacacgctacagtcgaccaagctgttcagatacgcactctatatatcgtagtaaaacactaatgaatcgattgatctcgtctcaccagttaattaactttagtgtaatactatatactcctaccgtttttaatacatgacaccgttaactttcgaacacatgtttaatcatttatcttattaaaaaattttatttaaatgtataagatagtataaattacactttaagtactttaagtgataaaacaactcataacaaaataaattataattatataattttttttaatataacgattaattaaatgtgagaaaaatcaactctgtttatctattaaaaaaacgaaggtggcatgtgtcgcttttcatagcggccgtaaagaaggaaatggatacgccccgtgaagccgggcactgtcgtgtcgcagtctctctcccatccctcgtctatattggagtactccagtatattttgccggccgagcagtaaactagtactactagtaaaatagtgggcgcacaagactacagcagggaagccaagcaccaacggccgcacggcccgcaccgcgcgcaccagctagtagaaaacaccgttttcctacgtaattccgagccaaaaccacgtaacaatcgcccgcccacgtcccgtgtccccccatcccttcgccattggccggcacgcgctttgacgcagccgccgcagccgcgcgggtaacaataaaaacgcccccgtgcaccgcctgcctggcgaaaaaccggatcaacgcgagcaagcgctcacctcaccacctcaccctgcagcgacagaaagagtctgtagtagcgtacgatcgcggctagctatcgagctccagcgagaggcgtacgtgagtgcgtgcgtacgtgcgggagggaggaggaggggagatggcagggggaggaggggggagggcgttgccggagacgccgacgtgggcggtggccgtggtctgcgccgtcatcgtgctcgtctccgtcgccatggagcacggcctccacaagctcggccatgtacgtgccgttgcatccatcgtttgttaatttgttcgtttgtttttggctggctctccacaaaaccgaccttgataacaccattcctggtggcctggtgcttgattgattgatattgcagtggttccataagcgggagaagaaggccatgggcgaagcgctcgagaagatcaaagcaggtcagctttagtttcaccaacctgttcgatttcttgtcaaagcaaatttcactctctctctttttgaacaaaaggcaggagctagctttgcctcttaatcttccatttttcgtcaaaacggtaccatgtttgaagtttgaagtacaaatacttagcctcttatatcgtcaaacagtcaccggagtacataaatgaccacttagttttcctcttcaaacatagaacactcgtattctaatttctaaacataaacataaaggtcgcacttatataattccaaacaggaaaacaatagccgccgcaccagttcatcacaggaagtcaagactcatcatctacatgcttccattccagtgcccatatcctgatccctgattggctctgtccatttaccttttctctctctttttttccctgtttcttccacttgcagagttgatgctgctgggcttcatatcgctgctcctcactgtggcacaaacgcccatctccaagatatgcatcccggagtcagctgccaacatcatgctgccgtgcaaggcagggcaagatatcgtcaagggcctgaagggaaaaaaggaccatcgccggaggcttctctggtacaccggagaagaagagagccatcgccggtcactggccggcgccgccggcgaggattactgcgcgcaatcggtgagcaaaaacgctgcttaatctgttgcaacgtcacacgatgatttcgagggaaattcaagtgcgaatttaacgatgatgatttttcttcgtttttgcagggcaaggtggcgctgatgtcatcgggcggcatgcaccagctgcacatattcattttcgtgctcgcggtgttccacgtcacctactgcgtcatcaccatggctctagggcgtctcaaagtgagtggctaattaaccacctggcactctgttgtcaagcacggtttttttagtagaatttgtcagtctttgatttggattgcgatgagaaaatctattaatttgcccatgcatatgttgttccttggtgtagatgaagaaatggaagaaatgggaattagagaccaactcgttggagtatcagttcgcaaacggtaattaaagaatctaactaatactaaccttcttacctgaaacttgaaacatgacagcaaagaactgataactcgtatcatccttgcagatccttcacgattccggttcacgcatcagacatcgttcgtgaaacggcatctgggactgtcaagcacacctgggctcagatggattgtgagttcttgcacctaatcgatctctacctgcctaatctttgcagctacctggttattgttcgtatccaacattttttttaaagaaaaaaaactaccatgtttgttgttaggtggcgttcttcaggcagttcttcgggtctgtcaccaaggtggactacctgaccatgcggcaaggcttcatcaatgtactactactaattaacctgacccattcgccattgttgcaatggaccaagcttttgggagtgtgcactaattaactaatgtatctttaattctttgcaggcgcatttgtcgcagaatagcaagttcgacttccacaaatacatcaagaggtcattagaggacgatttcaaagttgtcgttggcatcaggtgaatccctctctccagtacttctctcttttttttttttaagaaagaaagacaagtattcagtcttgtgttcgtccttcgatcttgacacatttggcctgtttttgcagcctcccattgtggtttgtcgcgatccttgtgctcttccttgatatccaaggtaatcttttgtcctatcctgttcgttcttttgtttgctctgaataattggtcttgtaatcaccatgttttttatctgtgtgtggtgcagggttcggcacgcttatctggatctcttttgttccactcgtcgtaagtgcgaattatatatatttcttgacttcttgtgcaaatgaatagtcaacagaatcatgattttatcctacaaggtatgcaaaacatttgacaaaaaaaatgcatgccgttgtctttagatcctcatgttggttgggacaaagctggagatggttatcatggagatggcacaggagatacaggacagggcaactgtgatcaagggagcaccggtcgttgaaccaagcaacaagtacttctggtttaaccggcctgattgggtcttgttcttcatacacttgatactgttccagaacgcatttcagatggcacatttcgtgtggactctggtatgctacttgctaattggcatcaaccttcaaaagccagtgttatgcactcactaatgagccactaatgattgacatggtttggttatttttgtctgacaggcaacccctggcctgaagaaatgcttccatgaaaacatgggcttgagtatcatgaaagttgtagtggggatattcattcagttcctatgcagctacagcaccttccctctctacgcactcgtcacacaggtgaaaccatttagacaaaaatcacttgtaaatgctcttggaggtctcaattccaacgtcctcaacctttccgtgtgtttgcagatgggatcaaacatgaagaagaccatcttcgaggagcagacgatgaaggccctgatgaactggaggaagacggcgagggagaagaagaagctccgggacgccgacgagttcctagcacagatgagcggcgacacgacgccgagccgcggctcgtcgccggtgcacctgctgcacaagcaaagggtgaggtcggaagatccgccgagcgcaccggcatcgccggggttcgccggagaggccagggacatgtacccggtgcccgtggcgccggtggtgcggccgcatgggtttaaccggatggacccggataagaggagggcggcgtcctcgtcggccatccaagttgacatcgccgattctgatttctccttcagtgtacaacggtgatggccgaaaggtttctctgtacttaagttgtatagcagcaaatataggagtacaatgtatagttggtacactacatatagagattagaaaagtacagtcgatttttttaagaaacaataaaagcataactttgtataacatattctttcggaagaaagatgcggcagcattggggaacatccaaataatctccatcctctttcgtcttactataaaactacatggaaaattcttgttaattcaaaataaaaatgatagtaatagttagctgcaaagggttcgagctgaaggagtcaacaaagtagaagctggacgatcctatcgtaagccatcactgcttatattcaatatatgaaagctaaatgacataaatctggatttagctgcaaaaggttccagatgaacgagtcaacaacgtagaacttggatgatcctatcgtaagccatcactccttatattcaatatgaaagctctctggtcccaaaaaaagaatacttgtacactatcgggaaaaatcactgatggccaggaaaaagcaagggcacttgtcatccataggctagctagtcagctttggcacgacctcttctcttatgagtaactactagggccagtgatattgccattccaatcaaatgcccagcgactgagccataagtaacagagattggccattcctacgaaaaatcatgacagaacattagcaagtggcagaatggaggtgcaggcaacgatagaagcaatgtgtaaggctcagcaagggaattatcagccttgtgcactacatagtccactgaaagcaggatgcacgacgagaacacaagattatttcagataaaagagatgataataatgagtagtcccaaaagcaacagacaacagaagtacagaatatgaggcaagctacagaaactcatgtcagctccaaaaagt

SEQ ID NO: 18225 - DNA, 2813 bp, Oryza sativa
gttcttttaaatggccgatataactgtagaacttcaaacaaattactataatccatgtaaacccaactaaattagttaatgaggtagcggttagtgaacatgcatgaacatttccatttataattctgacttcccaagcctaggcagatgacagcagacagtaaagattcacagtggtatttttacctgccaaggtctttcccagtcgagaggcataggccaagcaccaagccatgctcctattacagctccatgagcaggtgcagatatcatgtagtccactgaatcagttgatccgcaataactgatgcaaaagcacacaacaaaccacaatgtcaggcagttgctggacagtaaatttagaaggaagatatccattaaatgaacccctagcattctattttcatttaagagtaagcgatgtacatggaatgagagagcacagcctgccaattcactttggatgctccaaatacgcatgctgcaggaacaaactgcaaaatcatggatttagcttgatatgacttgatatgtaacaattatataaatataaaggcacagtattggcacaagaaaaaaagtaatagttgtccggttgccaatattgttaatctcagatgtggtatttttacatacttgctgctccaaaaatggcactcacatttagtaccacctgccagtgacagcatttccaggaatgctactttttggagtggtgaaaatctaactgaatctaactggcagtgacacataagtaaatcaggggaaatggcacttactgtgaacaaggacatgagaagtgaccaataagttgttgctgcccagtacctacagatatgcaaccccgtgaaaggaccattgatatgtattatccatgaaagaaatatcctggtgcattctggtaaaatcagatgaaaaatatgtaggaagcagtatatatgacagtactagacatctatttagcattgacataaaggttaacaacaaccattgacgtccttgttgatctatactcacttgattccaatgggtgcaccaagaacaattgctccaaatgcatttaggaacgcacctatcagaaaacattgtgtacaataagggaaaaaaaaggtaagtaggtcctaaataattcaatagttcaactattattgtgtcacaagaatgaactaagccatgagtactgaacaatatatcctgtgtccagctattttggtcgtagtaacgaagctaagttaactcacgaaactagaagctaatatgaatgttaaaacacagaagagagagaactaaccaatggggaggccaagcaatcctcgcgcagctgccttaagaaactgaaattatagaacccaattatcctatcattgaacataacattggcatagaaatcagaagaagcaattgaccgaacaggtcacaagtgcacgccataccgagcagcgcttgggatttcgacggagcaaactgaacactgcgatgacaagaggcgcttcgaagacctagaaaaagtcttacttcgaatcagaagacatgagggaacaggggagcacaagatacgtcggacaatgtgacgaggtgaggggacggatgcataccacgaggaggcggagggcgtaggcgggattggagacgagcatgccgcggccagacaattgatgggctgccacgatcccagcgaagcacagagcatggaccgctactgcgcttgaggcgctgacctgcgtggcctcgtcgcccatgacaggggcaccgtgggggagtcaataggtggcagtggagccaacacctgccaagtcgggaggtcaattcccaggttgcggttcagcgacctctcgcagtggcatgatcctactttggaagttcacattacatacaaaaattttttaacaccacaaatcccatatacaacgacaaattagctaaaaagatgatacaaatatagcaaataatttaacaagcaagttcagaatgtgcaaaaaatcttacatataaatagaagattacaatggcactaccttgctctaagcttgctcttagccatgaaagtatttattactccctatgtaactaataccaatcctaagataacaacaacgatctattcacatccagtcattcacaaatcccaaattggctgcctaccggtggcggatctaacattggacatgggggttcagttgaatacccaaactacaaacaaaatgttattagtatgatatttaaggcaaatttctagaacagaagctagggttaactcaaattcgagaaatagtgcgtgggtagagagatgggaaagagcatgcgcgtaacggatgcggcggaagcaacagaacaaacgacggcgaccctacttgctcgcacgatggatggggatcgccgcaggcgcaggcggcggtggcggaggatgtgctcaccaggatggatgcggcggaagcaacaggacgagcgacggcgaccctgctcgctcgcgggatggatgggggtcggcggcggcggaggaagcagcaggacgagctacggcgactctgctcgctcgcgggatggatggggatcgatggcggcggcgaaggcggaggcggcggtgggcaaactgacgaggaggggatggatacgtaatcgtattacgaaggagtagtaatttcgcccatcactcacggtgtgttcggaaaatgggaaacgagggaatgggattggaattgggattaggaaatgaacgaagggttatgattaaatgaaagagagaataaacggttaggatttaaaaatgtctcttggtgggtaggaaatcattttcctttctgatttgccaaaca

SEQ ID NO: 18226 - DNA, 12823 bp, Oryza sativa
ttgctcattctgatactgtattttacatccggtttgccagtaactagtaattagtgacactagttctgtttgtatgtttataaaccaacgaccgtgtagtatttaacttttagtggttcgctttcttaaaaaaatggccagtaaattgcacaaagcaccatattacaactaaataaaacatcaaatcaagattttgggaaagacttcttgatctccattgctaggtcactaataccaatgccatcaaatcacaggtctaccaaacaattgtcagctgtcaaggcagcactctgtaaatgagaatagaaacaggggaaatcatagaataaagcaaataaatgcacacaactgattggagatgcatcaaatgagaggactttattctcaaataagagatgtataaacaaccaggtcacgttctttaaaaaggataccccattgatatcaacccagaggccagaggtcaatttcaaataaactttagctcatgagagaaaggacaaagtaaaattgaaaaaaaaaaggttggctaacaacaaagctttatgtataagtagacatgaatacaactaatgctggtcatacaaggtaaagtgtgccagcatagctaagaagggggaaggcaaaagcatggggaaacataatttctgtataaattttaatcaaagaagagcttttacttgtcctaaatgaaataaagaaaagtaccctgttaagggacagagagaagtcaaaacgttagagatcactgagtgactgagagcaactatcagcttaaaacagaaaaaaaacctgaaatgctccattgctacaaggctccaggctaaacagcaggaattctgactatgtgtttcccaagtctacatagttttcccgtgaacttcagcaccaccaagagggatttgcatcctctgacatgcagtagttaagtcagagacgtgcagtacccctctatatcaactgcccgttttaatccaatgatccttatttggtcttcgttctccccttttcttcctgccttcttcgcagttcgcacatactcctaagtcattacatgcctacggccacaaaatccacgatgctgtggtatggcgctgtggtcatcgagtacccatgaaacaaagcagagcttgtggaagtgttgttcaggttggggtcacctgtggctgcggagtggcgggtgagctctgtggtggccagaaacatggcattggtggtgtcctgctccggtgggctgaggcagataatttgctctggaaagcgaaaggggctatagaacatgtgaaaaataatttcaacctcgatttgagaaaattagccttgaggtggcaaattttagagttgatctttggagcggtcagaaacggttcagcccaattttgtggccgtccaacggcacgcgccgccacacggacactacgaagaaaagggaggctaacttaaggagctccgcttggtattggccaaagcaatcactaatgaaacaaattcgcttctcagcagcattctcctcattaacatcaagcattttggtcgttgacgtgctcagacgagaggtcctagtggatgggaacagcgtgtccttaacaatgcaaccttgcaagcagtggagaagaactggctaataagcaggagccatcggatggttttggacagcggatagatgggtactaccacgtcttcgacttgactactgcgtgtcagaggatccgaatcccaccaccaagagcacagctagtggaaattcaaagtgcataccagtgcaggatatcaggcaagtgttgggatcgaaacattcagcaagttggtgacaacaaaactaaattcagatctccaaataaattgggttactgatgcaggattcaggcatgtattgttctcccacgaattagtgttggacttatatctcccaatcataaccagctagtgaaaaccagtagtgttaggattcataaccaactagtgaaaaccctagctaacattgtagcaccggtataagaaattcagtaggttgaactgatggcgccgctaaaacagccgaaatggaaactcaagtttcaatacctctacagcctaaaggttcatcagtagtgctcgtcgaattccgaagggtaaaatttgcgttgaaatcgcaatcacgaagccaatcacagcaatcgagccaaatctagaggggccaaaatgacaaggcggggcgggggatcacctgaatagagcagatcgaagcggagcggggatcaggagagcttggcggtggaagggatgagggggacgccaatggtggcggcgcccttggacttggcctcctgcgcctcgcggatcttctgcatctggatcatccgctccatgacgagctcgtactggcacttctcgtaggcgtggcgctcgggctcgcacttccaggggaggtagtactcggcgacgcggcacttgttgagggggatgaggaggtgggcgcactggtcgcggtagggcagtgggaggcgcgcctccgacatctccgcctgggtcgcgatctgcggcttcgaggtgcccagctgcacgccggccgccgccgccgcctccatctcgcgctcttcctttctctctcctctccggcgaggcggtcgatggttggtggtgcggtgtgtggatgcgggtggttggatcggtcgctttgggctcgggttcgggctccagctagaccaagaagtttctcgcttccccaatgccccaagtaaacttccgtaaaaaataaaaaaaatggccccaagtaaactgggattaaaagttgaacgtagtcataagtcatagtaacacatagctgatgtttgagatagatttagaataaaatcagcgcagagaaagttatcagagtataattaattaagttttaattgttccaaacataaaaaaattattatttaatattttaaagtaatgcttatataaaaagccctattcttttctgattaagatttaaattttatatgggttttcgataacgggtttctcgaactgctaaacggtgtgtttttcttttaaaaaaacttctaagatctttagatttgttttacatagacggaacaacgaaataacatacggcaatagataacgatggtgcttgtggtgaagcgacaagggtgccatggcacccaccctagctagatctgcagcgaggagtcgagctgcgatggtccgatgagagatggtggcggcgagttagaggagaagcagatgatgcttgcaggcgagaggcaacaacagcgaggactagtggtgacgaatgaggatgaggttaacatgattgcgacgggactagagttagcatcacaatcgaggattattgacgtgggtggcgacaacgtaggtagcggtgagtcctacatgaagtagagaaggtcaaccctacccaggcctcagcgggtcccacatatcatcattgctaagatgtggttggggtgtggtttactggaagagaagtatcaaaataactctagatatctggatagactaaaatctccatggttattttgaaactcagaccataatactagaggttttgtgatatttactttaattttttttagaaaaacattggcaatcaaaaacttgtttcttaataaaattttgccggcctcaaccttaatctttatccgttttatgcccaactagagtactacaatatgttagctgtgttgtggtgggcttagccagactcattttggtaccaagccatacaaatccatgctttagccaggtatgtcataaatgataataacaagttagcttttcttatatatatatatgtgtgtgtgtgtgtgtgtgtgtgacttataagctaatggattttaaagttctaactttaaatgtagagtcatattttttttaccttatataagcttaaaaaaaagcttctgacttagcttttggcttaatagcacaagagtagcttacgactttaaaaaggcgaaacgaaaaaaccgcttgtttaatagcataagattttttgcacataaattagtttataatcctaaacaaagaggattgaaagtttggatatttagctacgttgagctacggattgaatgggctacattttatttgggtcacttttgtgttacatcatggatgccctgataagagcactaccctcagagcacttctgtcgtgtatcgataaatctgctaacaacaaaatgcagtactagtacgcacgattttttttagaaatgagggagtcaaaatatacttatttaaagctaaggacggtgggttgatcatgccttcgacacgacacggtccgagtttattgggccgtgccagggccatagtgcagcccatgagcgggcacggcctgtcacagtgagtttgttggtccgtgacggcccgactgccctcagaccaggcaggcagccccttcggccatttatagtgtagattctgattgtctcctccaaggctccaatgcgaatgctcgtgtaagttctgaatgtttctcctccaatgcaaatgcagaactgtccaggctctgaatgctaacggcgagtgatatcgggtattgcagttgcctagcagactgtcaccaagcaaccacatgtccacatttacgggtgacatggaaaatttgtcagcaatttgacaaataactaatatttgtgattcattcttctcatttttttaagtatctctaattgaaagcacatacaatttatagttggatattcgttgataatttttccactctgtatttggtgatgtgtactcgcgtatgccatttgctgtcttctttcttaaatggaaggatttgtccgttcttcacttcttcgtgctgcctcattgtttcccttctgaaaaataaaagaccgaaacaacaaagaacggaccaaaactatataaaaaaatggatcagaattctggcttggaatcctcctcgaagaggggtcacttgtgcgcactgtataatcatagtcgatcatctggggaaaggatcgtcacttccattcaaacaaacaattggacgagcaaaaactgtacagaaaaaaaaattacaaaaccacaaaaagtaaagttaaatattgcattctgtatggatcagatttctggcttgaatcctccgaaaagggattacatttgcgcacagtataatcgtagtcgatcatctggggaaaggatcttcacttccattcaaacaaacaaacaaacaaaaaagggtcgcgcaaaaaaacactgcaaaacaaaaatacaaagctgaaattgtgttgagaatagcagatggatcagatttctggcttgaatcctctgaagagggattacatttgcgcacagtataatcatagtcgatcagctggggaaaggatcctcacttccatcaagattatataatatctcaaccaaaacaacaggcgaaaatcagaacaccgcggatgaataactcagaaacagatctagtggatgaactcccagagaaacgaaaccaaatcagatgcaaatcaaatgtagcggtttgatcagaactactggcttagaagccttctccgaagagaagagcttgcaaaaatcgcacagtacaatcatagtcgataatttggggaaaggatcatcacttcaaaactgcatcagatttgcaaccgcgtaaaaccaatctgaaaaccaaacgcaacagatctatctagaaagaagagagaacagaaaagaaactcaaattaagattgaacaaacgcgagaagcgaaaaccacatattaccggtgcggcggaagggaacgatgagtgggtttcggaagaacaggatgccgcttatatagggttgacgggtcggcggcgaggaaaccctagctcgtattagcatcagattgtggtaacaggccgacgtgtaaccaaattgggccggtaaaatatgggcctaatctatagttttggcccaaactctatacaccttgtccttttctattactttcttttttgtctactgggaatcagggatgaatagcagaagaacacaaatgtcgtttttgtttattactaaataaaattcagaaaacatgagtaaaaatttaagttgtggtaacaaagagatcgttcccttcttgcagtcaagagaatggagatacataggacagaaaaaagagaaggattttatggagtgaattgtgaacagattctacatatccctaccggagctgtgtaggtacagtgttgctgtgttagtatcacacattcacaccgcacacaattaataacagattaaaagtttaaagctagatttacccaatatttttcagggaaaggccgaacgaactaaattaagactgattaatgatcatctcgtgatatgggccgtattctcccactgggctcaccacaacaaaaagttctggcccatctcattctcaatccttccccccaacgataaaaccgagaaaactatgctaactgcatctaggttgaattcagatcctctgcatttagaggtatatatatacaaaggatataaatagacatgtgctttagaaaaaacttccaaccacaccatcatattttaacgtttcatattatatcactatagtaatgtgctaaaatacatgagaggctactagggtaggcaacaaaatcagtcaccgttgttccaagacttttgccacaatgccatgtagtagttactgtaatagactcctattccctccgtaaaaaaaaaaaaaacctaagagagatatgacctcttcgagtacaacgaatctggacaacattatctagattcattatactaggcctcctaagttagttttttttttggacggagggaaaactcaacctaagagggatatccctcctatgataacgaatttagataaatggtagttgtattagaaggggtcggttgagtttatttgggatggaggagccctatcgtggatttagatcggatgcaatcgatagtgtcaccgcaacttatgcagtccaccgctatccgttagattcaaaaccgaggatcaagatgcatccagtaccgtagatcactactatgacaagatttgtgaagtacttgtatatcgataccggagctatcgacctgatccgttcaattattttttttaaaaaaagggatggttgttattgtgtacagtagcttaacttatggttgctattttaaactgcagatgatatgcatccacctgggttacatttacggggattgctaactaggacagcttcgcacatgtatacagtactagtacacaaaaaacacatgtaccgtagatatatgtactcgcagcaacgaccagaccagagcgatggtgccgaggagccattttcggctgaactttgtacgggcgtgacacggacctgtactgtacgatgtaaagtgtgtcttctgggcttgtacgacgacgcagtttgttccaaacggcagctacgtacccaaaccaaaccagactgacgaaaagtcttgctccacttgaccgttgaccgccgcaggaagcgcgcgttgcatgtgcaagtgcaacggcgcccaaagtatgaacaccacgagcgtgaccgtcgatcgtatgaacagcgtcgacgatagctcgatccattggtcaagcgtcggtcagcagattttttttcttcttcttcttctttttttttttcatatgaatgtcactagcaaatctcgcgcacaacagggggtgccacgtcactcaaacaatattacaaataataccactaccttctacctagcaggtctattatatataactctatatacaaactcttctaaatggtcaataccgtttggcaaggtagtcagggcctagaatattgcccccctcaaatcctaattaattaagtactgtactcaattagaaaaaaaaatctcatgtagaacaagaggtcggtttattgcctgagtactaattttgcatttttaaacattactatgcgatatattcctatgtagtatggtaaaatcataatgtattgaagttgtatatataattgagtgaaaacatgctttgtttatatgaattacgagattaccctgcacaactttacgcgaagctcgataattgaagcatatttagacatgatatataactctaagttctatttccacaaatacagctgtaaaatgtttatatcaaccgttctacaccattataatctggacccattctgatctaacggtttaatttttttttactttctttaattaatgtgagaatatatgacctctagagtaaatctattgccctgttttcgagctatctttatatatataatctactcactacccccgaatttcaaactccttgtaattctgcgtacaccccaattactactttccaaaggtaatatgaaattaagggaataaaagtattttctaattgtagggtcgtatttgaatttcgtcccaagacctcaatttttttagagacagccatgccgtatagtagtcaggtctcttaggagaatattcactggtaagaatttttgtatatgtagtcatatacttaaaaaaatactacgaatattaggaaatggtctcgtagagctagccgaaaaatctctggacatttctctatggagttgtatactttaaatacctaaaaatgaataagtgagtaatgaagtctatacctattaatgtcctatattccctaaaaaaatgtcatatattaattgttctctcgtacctttcgtctacactggtggagaaatgctatttactcccggtttagaaccctttgtagtctcagttttccaactgggactacgaatccgggactaaagatcgctatctttagtcccggttcaaataaccggatctttagtcccggttggtaacaccaaccgggagtaaagaggatgaatctttagtaagaggggaagcgacagtttctcgagatcttttttttattttattgttgatttgctaatggctagtgttaatccctgtattttctcccgaatcgaatgggatgcacatccccaaatcaacatcctaaatattaagttacttatagacacagatcaaatacatcataaatcctacacacagatcaaatacatcacaaatcctaaaaaactatacacaaattaaatacatcacagattatacaagattatacatctcagatccatgcgatgcaatgaatcacaaaatataaaaaattatacatccagtgaaacacaaattatataaaaaaaagaaaagcaaacgaaccagcgctcggccgcccgcctgcccaccgccgccggcctcctgcccgccgccgcctccccccacgcggctgcgccgccgccggccggctgatggaagagggagtagaggggtggaggaggaagggcggctgatgggagggaggagaagaggaaggggaggagggggaggaagagaggggatgttccaatcttatctaaatatatgtctgggacttaaccgattagaagtgtgagagaaatatttactcccggttgataactccaaccgggactaaagatcgatctttactcccagttagtattaccaacagggactaaagtggtaatctttagtcccgattggtagtatcaaccggcactaaagatcctcggtcccctgacatacatctaacaggggatgaactgggactaaaaatcatctttagtcccggttggtgttagatcaattttttttaaccgggaataaaaatcgttttttgtcccggtttttaatagaaccgggattattgtggaatttggtcgaccgaccaaatattgtttctccacctgtgctacttagactacactttaatacttcatacgcgcgacacaggaagagggaaacagaaggaaagactgcgagcggagtctttagtcgttgaataatcgtgcttaatttcttgcgcaaactgaacatatattttagccaaagagtgatgagagtttgatgcgtcgtccaccctccaatctatcacgcttaactataaactgctcgctttcgcaacctgtcgatcactggatggatctgtgtccaacttgaacgtaattaggttaactgtgcgtatccaatatgaatatagatagtactactattgtgcaaagccacataatgccggcacacgcacacatatgacagttattagacattgacgaaaattgacttacctaaactacctacgcgacacagcaatattatacagaatcagttgcccagttgtatgtattgcctaagcttaattgggaggggagagatagagtgaataatcagcacgctgacgaactctccatgaggtcttattatggtaccagtcatcaacccgaacgatggacgggtttttatggactgatactatatgtatttgaattttaatattatattaaacatgttggttatcttcaaaatcaaaattataatgcttatattaaaagcaatctatattggctacaactgattaacaattaattttaagttttaaaattaaactaataaaatactcacttcatcctaaaatatagagattttggttggataagacatatctaaataatagaattgagagttcaagctggtacgattaaatatgactttttgattttctatattgaagtcaatgatattttcagttcatgatttatttaagatcaggtaatttattctaagttaacatgaaagctcactttaaagtgttcaattactacaagtataggtacatcgatcctagagaatttcctcacactgatactgaaccacaaaagttagcacaaatagctttccaggaaataggaaaagaaaggcaaaagaaaacacaatgattcaatgaagtcgcaactcgcaagtcaagaagacaatcacacctacccagcaagcaacaggtagctgtaagtgcacgaaaaacaccagcaactgcaagtgattttacaagaaaatagccgaggatttgcgggtcgctgcactatcaacaatggtcctaactaaagcttctcaaccttttacacgaaaaggagtcacagattttgcacgaaagagtgcagatctgggccactgggaagcgaaaaccgcagataatttcggccaaattcctgtccttgtttttgaattggtttccgaaatgaccgaccgtccgggacagcgacatggcgatcgacttggaccggagactgaagattgatgcagggccctgtgcgtgtaaattgtctgagcatcagatgactgaaggctctacagctgaagttagtaataatcttgactagaatcgagttcgtctagtctttaaaattttagagcagtttggaacaacgcggacaatgtttaaatttgggtcggtgcaggcaaatcgacaaaaacatgcagggtcggtttcgttttcttttggtctgtcaacttgaatcaaaatctagagcgaagtgctcaggtcaagtgaagggcatctacacttggggcgcaacaaaagctttgtttagagaactccagaagtcctctagaggaatctctaaagctttttgtttccttttcttgcacagggcatctctgtacctttaaaaatcattcaggcattcagcacatggagcagtggaggtagtacacacctacattatatatatttatattgtaattatatatttatattgtaacttgtgcgccgtgctgttgtgacattatcgtactgtgctaagcaagcaacaacagtatatgccacgcttttgcaatttcagcatgtggaacgggccagcacacacctactcctttcgctttaaaatatacttcatttaaaatatttaaaatttatatcacaatacatgtatttatgcgacattgattttaatgcatgtaaatctatacattttcaaacaatgagatacttagaaaaacaataatggtcaaaaattgcacttaaaggacaaatgaaataaaaagaactccatatatttattacatacaaaagtagttgtagggcttgtttgatttagtggtagtgccaaaacttagtcatattttgaaactaacaatattttggtagggtagcattttaagtgagtggatttgaattgataccaattgaaagccaaatctcatgttatggtcaagaaagttatagaattatgccaaattaaccatgggcattaccattcaattggctctaaaccaaacaattacattcactatataaactaccaaaaaattggtatggtaatattttggaatcaatccaaaatgacccgtacttacaaacagttgacattgacaacttggaaaattgtaagttacgttctgcaatttcgctagctgttgcttcagaagcatggttagatatatcggttggcaacggctgcagccgccaatttgcaaactgcggcggcaggacatatgctgagctctaaagcactcaagcagcaagctattgaatggacatggctgtcaaaaacacattgtttaaggaagacgactcggtttggggcttagcattggactactacttgaactggcgattcatgcgagtatgcaactatagcttgaaaatttagttcaccttagtcaacgatacgatggttgcatgttgcatacttgcataatgcatagggagaaattgcctgcggattacagacttaattaacaaggtgctctggaactctgaatccatgggccatctccggtagtataattctcccatcggaagaagctgtgacatccgttgacaattgcaaggcaattccttatttgtcactaaaaatttacacgaatatttatttatcgctaatgtttcgttgacatgtatcaatattacaatcttcatctggttgacattttcgtaagctttgctgcattgtggtggcatgaaatgatcggaaggatcgtcgggtttgcacgctatatatgtcg

SEQ ID NO: 18227 - DNA, 7385 bp, Oryza sativa
aatttaatcgtccgtcttatttaattttttttttgaaaaaaataataaaaaaacataaatcatgtagtataaagtattatttatgttttatcatcaaataataataaaaatactaatcataacaaaaattcaaataagacggatgattaaagttggataaaaaaacttatggctgtgcttaaaataggacggagagagtagaaactagtgtaaggctttgtttgggagagtttaagctgcttgcatgcttctgagaattttgaaaatttgggtttcgcgagtttgagcttctacggttagtttattttataaattctatagctacagatactgaggatgtggactgaaaattctgggaaaattggcttttgctaaaagctcccgtaaacgtatgctaagtctctacaattccaagtctctcactaacattactaattcaatatgataattaatcattatttctctcacattatgtcttgagctacgcctagtagaaactactccgtactacaagatcggtttctttatcattcctcatttaatagttagattgtcacattatattattttaaatagaattgtctaaatacaatagaactttatttttctaaaaaaaacttgtagtgggtttatagctttacaaaattctgggtggcgcttgtggatggttgatgactctaaaagacgctatcatactggagtatctcctatgtatgcggcgctggtgttacaaattctcccctcgttgctgttgacaaggagataatgacattggattcttcctgttggcaataattacaatgccaaattgccaacatctcatctcaagtactcaaccggcgttcgtcctttgacatgggaacagcggtcgactacaatacgtgccaccctcgacgacggccgcggcggggacggtgacccgttgcaatcagagaaggacgcggcagctgcctgcggcgagggaggcaagcggcagcggagggtaggacaagacgcgtgcagcagcagcagcaagcaggcagcgagatgtgcgattgtgcatgcatgcatgcgtgcaattttgagtagtctgttgtagttgtagcgtttagccatggcccaggcaggggaatgatgatgacaaggagaaaacacgcaccacaacatattattccattccaagggcccggccatccagtcaggctagccagctacagtaactcatcccgacgtttaccctacatcctccatcctacaataacctctcatttatcctaaaataagtttattttttaaataattattttattagaacatgaaaataaagaataaatacatttggggtagattattttataaaaattaattgtattaggatttgataaaatgtaagtattctagtctctttttttgtgtgtgtttgtatatgtgagatgcgtaaaaaaataaatttattttaggatagagggatagggggagtattactctttctgtccttgataagttcattcttattagagctcctaactgatatttaaatcagtatggaagaaacatagtactaaatatctatcatcctcgtgtagaaaagaaatattgttggagagataggtaagaagtattaaaatgataaaattcttcgatgacaaagggatgatactatataaggagataaaacttactactctgggataaatattaaaaatgagtttattttgaaacggcggaaatagacattttgggaggagatagacggaaaagcaattttgaggggagacagaatcatcatgctcgtgggggcagcgcgggaaacaaaccggagtgtgcagtagtatccccccctcctcactggccccgtgcaatgatgccagccagccctctgcgctgcatctgcatgcatgcccacattgcaactactctctgcatctcatctcatctccggttgttgaatctactgttgattgggctgagatgacaaatgtacagtttgtctcacggagaccacttcgctagccttgtcattatcaagcgacacactagtatatttcaggatgtaattaacccatctctcttatgattgtttcttctcttcttgccggaatttccacagcaaaggccaagggccaatgacccaattaatgtccaaacaaatgatgcatccttggtaaaggcttttgtggactatccaaattttgctgcaatatccagccctgatactttcctagctagcaccatgcattgtcacgggtttgtcacagtgggcagcgtcttctccgtcgatgtttttcaagggtcggccaaaggggtgcgtcgtgaacgcctttgccggccgagcttgcagctgctgctggtccagactccatagagacagagagaaagagaaatcaaattatgtgctcatccaccgcatgcgccggtcaatcccagctctatttgcaaacacctccgggcatgcagatgcccccaccgctgcactcactcaactctcccctttttccccggccgtccgtacacccatccagatcctctacagcctacacgatgctacacatatataccacagacatatatatactgcacgtatacaatctactactattaacatatccatgaggatgcacgaaactgtctactcctactaggagggtatgaagttagctaacaatcggtttcgcgaaacttgactagctacatagaccgacttaagaaacacaaactgctcggtttttttctaatcaagttaaaaataatcaaactaaattttaacaaaaatttaatccgattttacgggagcaaacagttttaaaatggttttaagaaaaacgacaaaccgttgacccccagatttcaactcgggaatggtgtggtgacccgttgctctactagtagtagggagtacttgaagtgatatggcaaagctatagacagttgacaactaagatatatctcctccgtcctaaaataaatcaatctagtatcttatatgtaatacgggtgtctagatttatcgtattaaaatagcatatcatatcactagtccagtggtatataaattggcatgcattggcattgggtgaggatgcgtaaaggatcaaaagccccgggttgaagggggcatgatgagccgtatgatccgcttggtttcccctgcatgcaatgatggcggcgctgaggctgagcctgaggctgagctgagctcctcctctcacccacagtagctggctgcctcctgtatctcagtatctgtacatgttccctggccgcctcctccgtcttgcactagctgctactgtgcccgcgtgtgtatgcgcgctcctttggaacacatcactgcataaggacatgcccactttactcaaatacgcaacactctttgtcctgtttagtttgaaaagccggagtacaattcaattgttgagatcgatcggatcgagtagtattaattcgagggtggatatcatgccacgttattatagagtatgagaattgttggtactgggatatacgcgagattaagataaagagacgagagacaggttttatacaggttccgaccccttaactgacagataaccttatttctgttggccgaagccggtattgtttttatatttcagtatcacataagcataatattttagatgacctaatctactttctatcggcttgacgtcatggagctctcgcacgtagtagatggctagcgtagtcttcttcctagaatatgaactcaacaagattggagatgtctctaagctagatccctttatggcttctacattgggtttggctgggtctatattggcttgtattctgacttggcgtgttgcctctctgacttggcatgtcccctcctcataaggcgtattgtattgatacccttggatgcccccttcaagtataactagggagacaagtatatattaatatgaagtaatccttgtagtgcccgagtagaactatgttttttctttcttattcagcggtccagattattagctagattctgaaaatctgattatatattcacaaaatgaaattgaagctagaagttgataacctaattttttttcgatcagattctcacgggatggctatctatcaattgtttcccagaatctcgagttacctcaaataaccttaaaatctgaagtaagaatctaaaatgcttgagaaaaaaatagagattgttagctgaagaaccgtaagtagctgtagctaatgaaaatcatccttaaatttaggttctcgaaaattatagtatgtttatatctatgccaatacgtacgttgtaatatgtttaggatctcttcacatcaatttttttttcgattttctctctttctacaccattgatttgggctagaactagaacttttttccggctccgataagcgttccatgacaataatggctacctcaaaaagctatacttcgtaacaatgatatggacatgattttccagccaataaggatttcatatttcacttgattggtatggcaatttttttacatggccagtccgtcactacttaagtagatgggtgggtatatttggtatagttctagttttcagaacacatataaactcttgttttatatgacccatagttttacgaatgaccctgcgtgcttaggacatccacaacatggatgaaaagtggatagtaaggtcactcactatttatttttatcattgtggaggtaggtagtagaggaggtagtaactataacaaacaatagcactactacctagtaataggaataaaaaacattgaactctctcctctgtctcttttctacccaaccattgttttacatgttgtgagcggtacaaacaactataacctagtagtttattgatcccaccttattattcacttaataaatatatattgaggatgtccttaattattgtgacatatatatggtgccctattaggtagcttgatggaagatttttcaaaggctatcatgcttccattcctgatgccttatggctgatctgtttatgattgttcctttgtcgactgcatgcatgtatgattcatctgttggtaccagtcaataaattcattttgaagctttctagcgagctcgattcatcaccgatattaccgatccatccatcgatcgatctccttggattggatcagcaggcatgcatgcagcacctgccatctctgattctctgcacccgggattattaattaacctcgcctttaagtacgggagatcccggtcagaacgctgaaagagataagaatatatcgtgatcactatgctgcatgactgcatcgtacggcccatgcagtcgttagatttggttagttgcgtcttaattcgaggtaatgatcgatcgtctgatcctacctgatctccatcatgttcctgttgatataagttgcatgcaaaggaaaaaaatttcaaacaaaaacttttaagaaaaattcgcactttatttgatagtagcttgtactccgtctgtctccgaaagatcactagcctttttgttttcccgagatgaaaaagggaaagaaaaatctacgattagcttttcttgcaatagattggcaactttttgaatccaaattcaaagcccaatccttgaagccacgcactgcacagcgtcctacagacacctttattttggtagggtctgaagaattcttcagagagtacagtatatagtccatgcatgcagggagagctagctaggaatttttcacatcccattcaacacaactcatatctcgtacacgtatgggacgtccggtgacaagattgagcctttattccttttttcccaggattggacacatgctttcctatttatgcacatgctatctgatttctcctggcaaatatactgaaaaagaacagctacaagctcctttgaaatgtaaaattgaaaagatgtaggactagaaaaaaacactggatttcatcgtaaatgcaagtgcaaaacatagaaaaaaaatataataattaccgtttgattattccgcatgaaaaatcactataggattgactattacatggaaaatttagaagaaaggacataattcaattaatcaattgtttcaaacaattaaaacacaaacaactaaaaagatgacatattactccctccagcccaaattataaggcttatatttttacacgatttttaattatatactttgaccgttaatttattctattttatgttccaaatgaatacgaaattagcatcatacgaaagtactttaaaatataaatctagtgatataatatgtataatacttagcgtagatatgtttgctatgattattaatcaaaagttatcgactttaattttcctaaaaataagaacgtcttataatttgggacggagggagtactatagtgcaatacctattagacataagcataaaaattccgtacatcctaatctaaccattttatggtagtaaccgatgatatcaaatatttaaaaacggatggaagtattggttattaactattaagccactattcaaaactgaattactctcaagtggttaaattagtaattctcaagtgagaggggaactgacccatgataggaagaaaacaaggctggctggggtgagggtgagggatcagaaatattcagaatggtggtgcaatgaaatgaaatgaattcaaggtgctcgtgcctacaggtagcaaaagcaggcaggaaggcaggcagaggggggagagaagccaggtgcatacagtacatatgtcagtggcaatacaggcggaaaacttggcatgctttgctccccggtgtcttcatctcggctcgggtcaacagccctgctccaatctcattattatcccctcctacggggaggcatatgccctgaccgcatctgaacaccttctttgtctccaaccttttgtctcttcctgctcttctctcccctctccccaccattgcccctgcaacctcctctacacctcattcaatttaacactagcttctctctctctatagctctacaagttgatgagaagctgcagcgttatataagccgggctagctagctgtctgtttgcaggtcactcgtgtgtgtgtacaacaactatatacacagttatacattcgtgtgtgaagtgatatatatatgtgcgaagtgactggttagcttaattagctgcctggatgatgatgacgatgatgagcatatagctggttttgtttgtttgtttgatcgatcgctgcaagtcgatcttgacattgtgctgttgatcgaacgatcgatcgagaggttgtgagagatgaccatggtgagggcggcaatggtgggcggcggcagggagaggaacggcggcgtcaggcagtacaaccgatccaaggtgccgcggctacgctggacgcctgacctgcaccactg

SEQ ID NO: 18228 - DNA, 5022 bp, Oryza sativa
  unsure (1)..(5022): unsure at all n locations
gcaaggtactttgctttgaatgatcttggaatgtttatatatgtattataaacattacgtacatacttttatacacgtacattcttttgtttttttcttttaactttgctttgcaatgtgttggctttgactagctacttctataggtatttttgcctgccaggaatggttcaggcagagctctgcttttttcaacaaacaaaagtttgaagtaaaaaggatatattccccgagacgtgtctatcttgttggtcctgaactgcagagtctccaaatatagctactacagtactctacattcctcactgctaaaactgtgaagaatatacagaccccagttagtcacaattcttattaaccaccgatgcatacataatgcaggaagatgcattttcttgtcgatgctactagtcttgaaggttgttaatcacaggctagtcagagtagtgttaaggtcttaagcaccttatttcgccattaaagaagaactgttgggcacacttgcttgtatgcagatgcatgtgtgcatggatggcacacttctcaaaatataacaattctttgaaattttttatactaattctttgggctatacagtgttagttcctttatcctaatgctgcatgcagctgctactagtaactccagtactccatgagaggaggaaagctaaggaaagaaaaacctaaggccctgtttagatgggactaaaacttttaagtccctatcacatcggatgtttgaaaattaattataaatattaaacgtagactattaataaaactcatccataatcttggactaatttgcgagacgaatctaatgagcctaattaatccatgattagcctatgtgatgctacagtaaacattctctaattatagattaattaggtttaaaaaatttgtctcgtgaattagcttttatttatgtaattagttttgtaagtagtctatatttaatactctaaattagtgtctaaaaacatggactaaagttaagtccctgatctaaacaccacctaaaaccattcttcttttgccaatcttgtgatcagggatacaggtgcaacaggtggatcaggagcacacatatggaggtggtgtggaagtttggactgatatgcagcagtgtgatcatgatgagtgtgatgtcccttgctgcagctgccactccccaaagcctagaaaggagccactgcttcacctccaactgaaaaggtcattgccctttatttggagcaatcagtttatgctctgtcaatctatgagccatcagtcacatcatgagcaattcttatcacgaataatgtcaacagtttaaaaccatcattttgcattcactttaccctctaattcaaatattcaattagattgtgtttagttcctaaaattagggagaagtttgaggaaagttgatagtttggaaaaaaaagttaggagtttatgtgagtagaaaaattttagatgtgatgtgatgtgatgtgatggaaagttaagtttggggaaagtttggtgtgaattaaactatcacatcgaatgtttgaacacttgcatgaagtattaaatataggctaaaaatataactaattacacagattgcgactaatttacgagatgaatcttttaagcctagttgctccatgatttaacaatgtggtgctacagtaaacatttgctaatgacaagttatttaggcttaataaattcgtctcgcggtttactgacggattctataattagtttttttaccagtgcccaaataccccatgcgagaccctatataatacccgatgtgatacgccaaaactttacacccctagatgtaaacaccccctaaatatctaactatatacgttgttagaagttgattttttataggatgcaacatcttgaggcatcccatcaatatttctagataagtgaaaaacttgaaaaaaaaaaggctactagtaataagcaaagggatgtcttacttgtatccatttgtgtagccacaaattcttgtattattttagaatggacatagtaatacttacttgatgtggggcctgttcagatttatgtcattttaactcatatcattatttgataaaattgacaactgtgtgacaaaatttagtttgttataaaatatttgtcatgcctagataattgactacattatattagcctatcctactaaatcttggtaattaatgtttctaacttgttgaaattttggcaatgataaattttggaaagattgaaaatgactataaagtgaacaaagccgtgatgtttgcatggctataacaagcaattcgtattatatccacgggtatgttttgagaagaatatagtggtactagttcttttattagaatgttttgacaaactttgttctgttataggagcatttatagttgtggaccccattagtacaatttaaaataactagaaaccttaaaacacaatgattatttagatggagcttaaaattcatagatacagctgatgaaaatatgagaagggcttagttttttagcttatagattctagtgcattttgtagatcttgtagctattggttactcagaatctgagtatctatactgtttggaaagatataggtttttataagacaaattacaactgtcagaagcctctcaaacagggcctaacgtattattgttttattgaacgagcttcttatattcttcttttcctttggtgaattttacataactaaaatgcactaggtattatagaacttcttgacaccctagaatatgtccaccaatctaatttaaagcatcaagattttctttttgagaattatgtcgtcagatttgttatttgaagtacttccacatatactactatatcccaatacaaattaagttgcagaaagtaatggacaaagtggcatctcaaacaccatagaaagttaaaaacatctcgaacacacaaagtcagtcacactgaaactagatctgcatgcatagttagccccatttgtcactagtgcgacactagttttgcacgctggcacgctgcacacacgcatgcatgtttcccatttctattccctttttcctctatctctctctctctcctgcagcagtggcatgaatattgacgaaccaggcacgcgcgcacgcattgccgcgcccaatgtacgcagctgcagggacgacgccgcagcatctgcgacggagacgcgacgacgacgtggtgggaggccggaggaggtagacgacgacgcgaacgcgagcacgagccccagaattagccagctgcagctgctgcgtctcagaggccatggaatacgtgagagcgacatgtcaccgtcgacgagcctgcagtgctactatgtacgcagccagaggacgacgacgatgccgccgggcgctgctgctgcagcagccggcggcgatggcggatcacagtgctacgccgcacctcggtacagctcttcctccaagctgaaattcttggggttcgtggtgacatcggggcctcctcctcctcgtcttcctcctcctgctgcctgctgctgcggcagcgatgacaacatcccttttcaggtactccggcctcctcatatcctactcccagtaatagtactagtagtagtctttctcggctatccatggatgtgattcactagtgatcgatcagagattcagagggacaaatcgtatggatggatggattggatcatcaatccactactctgtctcagtctgtccaaacacagtagctagcccgttcccctgcaaattaaagtgtttgtgtgcgtcgacgttcgtgcagtgcatacatgcagccatgcacaaacccatggtgaattggtgatgcatggtagtgcctttttcttttctttttttttcatgtctagtctctgcagctttgcgacacataaaacattcacagtagcttgcttccctccaatcactccaaaaagtcacaaaagctcgaagtgaacagccggatagtccctacctttccctttttgtcgtaaggaaaaaaaaatcaacagtaaaagttcactttaaccgctgattaattaccacgtggcgctgttcatgcaggtcggcacgtttgccccacaccgcgtcgcgccgccaacggcgagctgcggcggcggcgcgccgcgnngnnnnncnnnnnnnnncnccncnncnnnnnnctccnncccncnnnccncccccccccccccccccccccccccccccccccccncccccccccccccccccccccccccnccccccccccccccctcccccccccccccccccccccccccccccccccccccccccccccccccccccccccccccccccccccccccccccccccccccccccccccccccccccccccccccccccccccccccccccccccccccccccccccccccccccccccccccccccccncccccccnccccccccccccccccccccccccccccccccccccccccccccccccccccccccccccccccccccccccccccccccccccccccccccgcccgccccccgccccccccccccccccccccgccccccccccccccccccccccccccccccccccccccccccgccccccgcccccccccccccccccgccggcccgggcgcgcgcccggcgcgccccggccccgccgccgccgggcgcnccgcccgcggccccgccccaagncgccccgccgcccgngngnnggcgagnnggnccnncgnngcnagcnnnnactcnnaatcccttatatttatggatggagggagtaggagtattaacctaaagattacatattgatgccgataacctactcattttacttccgatgtatcatggtatgagacatacattggtagttatggtggctaaatgataaaattatatgtcaatataaaaaggtaaaattattctaggttatatatgaaggaaatactggactgacaggccacatgcacagtagcacaattaccacacttgtcaagaagggggatccactagt

SEQ ID NO: 18229 - DNA, 15356 bp, Oryza sativa
  unsure (1)..(15356): unsure at all n locations
gcgagcaacaacggcgtggcgccggacggcgagcacgacgacggctgctcgctctcgctctcgctggcgttggacacgggatgcgccggcgccggcggcagcctggtctcgtcgacgacgtcgtcgtcgtcgggaagccggatcagcctcgacttgtcgctctccacgcttgactcgtagagcgtgcgtgcgtgcgtggcagcgtgagatgtttgggcctttgtgggctttgtgggccgttttgtcgcctgattttgatgtagttttaggcccaacaaggcagctcatatatgggcctcttattcaggcagctcatatagtttttctcttgggccgcgagctgctttcacatatgggcctcttattcagattagctattcaccaatcctggagaaagcacgaatctcgatgccccgaatttctgcacctcatgcggttatacgtacagagatcaggcagaaatttccccgcaaaaaaaaaaaaagagatcaggcagaaataacacaccttaactttcttcaatggaagcaaccaaggcaccaagcaacagcttagcctttttgaagtggcaaattcaagcttcagtaccgtaggtctgtggctagcttttatgagcccaaatttagtgggcatgttcttctccattctcttcatgtgtactgtaaatacaggggaaatttgtaccaggttcaaggttgtacgtttctcttctgttgaaatggagtagtagcatgcatgaattgtcagcttctacacggacatatgtcacagtgcttcacgcggattgaacagtaaagtgcagacaaaatcaaactaagctcattggtgcacatgggcaacaaatgcagtataaagcctaacccaagttacctttttgtagtaggagtatatctgagaaaaagtcatgcagttggtacttttacggcgtctacaactacaagccagttcaggaatacatgtagttgatctgaactttagacagaattgcaacaatcggtgtcaccaccagataaagtaatctgaattcagatcgactagcttgcttcccgaacatgttgagcaatatttgctcttcgtcagaggcactaaaagcccacagtttagtcgtacaacattggctcaacaagggaaaacgaaggttcaaaacttagaacttcacacggcgggcggctagtggcggagctcctaatttcattcttaccctgaaagtaatctagctcccagataggaaaaagcaaaaaacaagtggaagtaaatgcgacggaaatttgggggggatttggttccgtttgacggtttcggaagccccggtccatgttttggttggagcaatttgatcaccgcgccacgctgttccggatgaccgaccgaaccagtggaaggaattccaccgtgacagactcgatcgatcgggcgcgattttttttccgggaaatccaagccatccatgcctacaaatacgcgcgaaacggccattgggtcgcgcacgctggagccgccgcgagccattccccccgcgaacacgttaaaacccttttccggtggccggtgtaacgcgcgcatacgtctgatctcgcatggccacggcggatgaggtcggcggcggcggcggcggtggtggcgccggagttggagcgggcgatcaggtgaggagggcgaagacggcggcgctgttcctggcggccgtcgcgctcccgtgcctcgtgctgtaccgcgccgccgtgtcgccggcggggctgttcctccggccggccgccctgccggcgccgccgcgcggcgacgtcgacccggtggtgagttgttcgcccgccttcttcctctaggatgatcaaggtgtgtatacgtaaacgatgaacacgtctgtcagtcacgtacggctgaactgaaggctgtttttgttggcaaaaattatttttctttaatcagcttgtgattcatgttcatgatcaccagaaaatgcaggaacacctctttgcatctcattgattttttttttgggtgcaaaaatggtggacggttaaaattcctcattgttagcagtagtaaatagttaaatactccactgtagaggaagaatagtaaaactgatgagagcgatggtgaattcgggagatccaccaatttgagataagatcagtgccttcgcaaattgcaaattgttttttttcgcgaacgcttttatttccgcgaacgcgcaaattgttttcaaatggtaaggctttagtctaaactgtaaattatgttgacaatgtgagtgctgttaacctcctcatttggcttctttctagaaacactattattcaattgcaacgtgccagaaatttgctcccaggttagtatgtaattcaaccctgtgatgcatgcacccgagaattcactcccagaaatgaaattttactcgtcctgtagcaggcctacagcgtttgattggccacggcacttaaaaacttttttttgacagtcgacatccatgccaaaatgccagattactggcatggttggcattcttagaaagcaacatgaaaaactgtctgccaatcaaattaacagactagtacatctcttctattggcaaaggcatcttttgaaatagaggattttttaaagagaatttcacgggaattggactgattcatgtgaaaatccggcaaacttcattcatttcaaactagtcgtaaaaaacacaggaatggtagttacatttgaacatctatttttttttcttaaaaaaacctgccacaatagtaacagcacactattcatctgaaatttttttatttatatttctcttaaactaaggcagcgttcgagagggtgagagagtgagtttgtttgtttcgttttctgcgcgcacgtttcccaaactactaaacagttatgggtgagggcaagggcaccaaggctttgcgctcagcctcgagcgccgtcatccgagcctgcagagaggcgttagcctctgacgcccgccgctcttgggcggcagctgcgtcgaggatgccgcgcgcgtcctggatcctcctctccaggtcctcggcatgagcctcatattggaggcagatgtcgcccagcgcctcgtccaggacgctcgaggcgatcagtgccgcctgccgctcctcctccgtatcccgcatgagggagtccaggacctcctcgcgcgcctggatttcggctagttgggcttggcgcattttgcgctccaccctcaccatgtcatccacggcgcgtcgctcctcttcgacccgcgcgcggtccgcggcgagctaggcccactctgcatccaggcctaatttttctataatcaacatgttctcttttttgcgttttttgtaaaaattttctataggaaaattgctttaaaaaatcatattaatccatttttgaaatttaaaatagttaatactcaattaatcataagctaatagctcatctcgttttgcgtatcttcccaatctcctcaatccccttctcctcaaacacaccttaagttgagtttagatttaagatttgtgagagtgtatttcatatctacgcatatctctagtagttttttcataaatttacaaaatttttagatatgattttcatgagttttcacatttagcttgttttcaccaaatatgtcttctttttatacaccatatttccggcaggtaacagttaatcaatgtgacatatatgaggttgtgcttgtgcacgcagaacagtgaggacgcgaggctggaacgcgtcctgagggcggcggcgatggcgaacggcacggtgatcctgacgacgctgaactcggcgtgggcggagcccgggtcggtggtggacgtcttcctcgagagcttccggatcggcgacgaaacgaggtggctcctcgaccacctcgtcatggtctccctcgacctcacggcgcaccgccgctgcctgcagatccaccgccactgcttcgccctcaccaccgacgatggcttcgacttctccggcgagaagaacttcatgaccgacggctacctcaagatgatgtggcgacgcatcgatttcctcggccacgttcttgccaagggctacagcttcatcttcacggtaaaaagagaagaaaaacaataaaacttaattttaaaattgattttaaggttttcatgtagtttatttttatatggttatgaacatagatataaaagttttatctatatattatattttttatcacttataagttgtgttccttatgatccatagtaagcaattgtaagcgaaacaatggcttttctaatcaaatcttttgctcaaagaacatactattctttttgttcaaagtctgaactttgtgaaggtttgtttcgtcaggacacggacatcgtgtggttcaggaacccgctgccgcacctgcaccacgacggcgacttccagatcgcctgcgaccacttcaccggcgacccggacgacctcagcaacagccccaacggcgggttcgcgtacgtgcgctcgacctcggcgacggcggcgttctaccggtactggtacgcggcgagggagaggcacccgggtctccacgaccaggacgtgctcaacctcatcaagcgcgacgcctacgtcgcccgcctcggcgtcaggatcaggttcctcagcaccgacctcttcgccggcctctgcgagcacggccggaatctgagcacggtgtgcaccatgcacgccaactgctgcgtcggcctccgccggaaggtcgacgacctcgggctcatgctccaggactggaggaggttcatggcgacgcccgggagtgaccggcattctgtcactggagtgtgcctnggnnttgccggtgnttgnttttccgngnngnngctgttcgcgctttgtgatttgattagttgcatgttttgttctgattagttctcttgttcttgtgatgatntgtcttntgcagtatgaagaaactggggcggtaggagattggaaagattaattgtttaattgcaatgtgttagtttagagccaacacttgctgttgtctgtaccatagatgagatgctgactggaacaaatgaacatgcaggtaattgtcgttgacaatactactcttcttgattagtgctttctaagttgggaagtgacagtacaaatttagtcaaggtatacagcttaattaactgtagaaaaccctcttttttaatacattttttccacgctctgtagttctttcgcatctaatccccgatctgaacaattgaccaaataatgtgttactgatagctttgagataacttcaagctcatagatacattttgtagcggcatttctctgaaacatgaattttacaacggcatacgcccaaatttccaacgaaaaacagtgtccatttcgttgtcctgaatccactgcaatggcattcgagctcatggagctcgcacggccgcattgtcatgacatacctgtagacagaattagtgaaatggatatgaattcagacctggagcagaatgaccgaaatgttgagagtttggtgcaataacagaaaagtttctcctaccgctgctgatgctgatgccatggacgattaaacccataatataaactctgcaaacttccacagaacagcctagcagcaggaatggaagaggcaagcacaggagagagaggcaaaagtgaagtccagcttcaaactgaatctcctgctcctctgcatgccccttccactgctgctgctacagccaaaaaaccagacctaacataacacctacctatcccaaaccaaattttgctgtggctgctgctgatgcatccattggtgaagggtggcatatttgtaccccggccatggtgcactggtagtagtacaagttagctgcagtacatatgggggggagatcgttaggggcggcttgtacttcaggcttgcaaatatcatcagtgtactatggctttcagctgtactcttgtactgcagaagcgttggagcaaacgctctaacggcgacgggtaagccacagatccgttgaggaggtcgtgtcgtgtgcgccacaggcttcactttcagtgaccccgtcgccgttgtcttaatgcaggaagaggttccttttcttctcacttcgcttgtgtgattgagttgctactagtactacctatcagtgattaatcatccaatccataattttgacaagggtccagtctgtcatgtgacgtaggatcgatttatatcgcatcagatctccaacaagttgaacgccacgacatgtatgctgtactagtatcgtctgatgtactccatgccaatatgtgaagtactactccgcaattttgaaaaaaaaattgtcgcgaatgatagtacagattaaaatgttaaatactctcgttttttaatacataccattgttcgtcttattagaatatttttacgaaatgcataaaatataaatcatgtttaaagtactttcaataaaaaaaactcacaacaaaataaataataattaatttattttttaaaaattaagataatatatgttcaaaagtcaatgctgtcatgtatttataaaagtgggtttagtaagatacaataaatgtgagcattacagaaaactctcccatcatcccatccgtccatgtggtaaccggtggactatggaactatagaaaagcatcgggctgtgcgcagcgcgtccctctatgcgattgagccagagcaggttcgcacttacggcaccgagggtctatttgaggagcttaaaattctgagaaataactaattggttgtaaactttcgagaatctgaaaaaaaaagttgggttttttttctaccttatggcttctaatttatggcctgttcactttaataacaaaaaaaaacattaccaaattttggcattgccaaaattttggtatagttgtcaaatttttggcaggattttttacatagttatcaaattttgacagcaaattaaatgtagcctttttttttgacaactttaccaaaatttagtaatgttgaaaatgtcatcaaagtgaacaggcccttaaattacacaactataactttgtagaataaaaaattaaactgataagagaatatctgattttggctgacataagcttccccagcagagaccaagtctgatggtaaaagcggtgcctctccgtgccgcctgtggaagctgtatgcgtgatgcggacaacaaaacaaccacttcattcgtcctaaaatataatagcttatgatcggataagatacatcgtaatactataagtctagatagagatatgtctagatttatagtattgtgatatgtagtatctaataataggtttttatattttgaaacggaattagtaagatccgagacgcgcgcaaatagaccttccgtggatagacgtgacgtacagcatccttgtattgcttgatttgctacacgtgctatttttttcgccgggccggtctatgacagtttgagatgatatgggctgccgaaattcgaaacctcatgacttcagacttcagaattcggacaaaacagacgcatgtggcacaaacacacagacagaagaaagtaaaacaagactcgaaaagaaaaaaatcctgaagtctgtaccaaagttcagtattacacctcacagaaaatggcccgtgtctgcagctgtgtttcttcttcgacagtcatgcgttcctctgtcgaaggggaacaacgtacgggcagccaatccgagcacagtatatatagtatagcagttctgcccggggacagtcaatgtgtgtgcttcgttacattataggagtatatatttctgcacctacgcgagcccgtacttggacagtggtcttagttttcgtacactttgcactcgtcggtctccgggttgtccttgcagaagtcctccagtgggtcgccgctgccctgcaccgccgcgccgggccacttgctcgccaccagatgcgccagatcgaccacgcgttggctgcacaaaaccgcacacgaatacacgatcgatcagacgccgagcaatgcaattgcaacgcacgcagtaacatgtgttgtttgtttgcattgctgattgctctcacctgtagccccactcgttgtcgtaccaggcgaccaccttgaccatgtcgtcgcccatgaccatggtgagcgaggcgtcgatggtggaggagacgtcggagcagcggaagtcgacggacaccagcggcacgtcgcagacgtcgaggatgccgctgagtggccccgccgcggccttgcggaacgcggcgttcacgtcgtcggcggtgatgccggtcttcacggtgttgatcaccaggtccaccacggacacgttcggggtcggcacgcgcagcgcgatgccgttgagcttccccttcagctgcgggagcaccagcgccacggccttcgcggcgccggtgctcgtcggcacgatgttcagcgccgccgcccgggccctcctcaggtcacggtgcgacgcgtccagcaacctctgtgttagtcaatcatcaaacacagcacacgcagaatgtatcagcctctgcacgtacgaaatgctgcagcgatcatcgatcaatcaatttactcgttttgatcagaaaaccgaccgacctggtcgccggtgtaggagtgagttgtggtcatggttccctttacgattcctgcacatgcgtcacaacacagtcaggaaacacatgttgccatacgtattgtgcttcaggttaaggcgagcgattaaagttcttaccgaactcttcgtccaagatcttgacgaacggagcgaggcagttggttgtgcaggaagcattgctgcaacacaagaaacagagttcttatgcatgttgcagagtttgatatgcatatatattgaagtggtggtgtttgcttttgcttacctgataatgttggccacttcgtgggagtagtctccctcgttgacaccgaggacgtaggtagggatgtcagcacccttcgccggagcagtgatgatgaccttcttcgcgccggcctggatgtgcttcccggcgccggggccgtcgacgaacactccggtacccttcatgacacacacagcaatgcagcattgtcagttctgttccctgcagattgagttcacagtcaattgtcgatttgtgtacctcgatgacaatgtcgatgccgagctcagcccatggcagcttgagggggtccctgttggagacgaccttgatcagcttgccgtcgacgctgatggtctggtcgtcgacgatcttgacgtcggccttgaaggtgccgagcatcgagtcgtacttgagaaggtgtgatgcctgaaataattaacacacgcagagaacaaaattatatcggaatcagtcattgattagtctgtgcttgattacgttcaggacaagcttttctgaaggatgagtacttgtacttacgttcctgacgcctccgctgtcgttgacgacgacgacctcgagcggggagttctcgcgttcgtgccagcaccggaggaagttgcggccaatgcggccgaagccgttgatggcaaccttgagcttcgcctcagccggcgccctcacggcgttctctccggtagcctgccacaggttgaacaattcattcaggacttgcgcttacagtcagaatacacgtctgtacaatacatgatattgtggttggcgaggcatccaaaaacgataacttgaccaacttgtcattatagtcttgagtgcatgatactggaacatttatctacctagtactgtaatacacgcacggaatattagtaactaggataatgtcctatgcaatttttgaccgtttgaagttgtggtttgtcccaatatagctcatgtcttattttctatttcatctattccaaaatataagatattttcgattcagattcatgtactagagattgatggagtaagtataaaaactcattggttgtgtccaacataagagactagagatgtaaatcatgtgtgatctaccagcaaagataaagtttcatccatctagtgaagaagcacgcaacatgtcgctgttatttcacaaaaacggctattaataaggtgattattttgtcttatctacacacgctgtgagcgtttgcgtttatactacattttttgttttttaaaaagaacccaactattgaatttccagaagtttgtaacatataatagcagtataaatacttttgctaaaaaaaaaacaagtaacgaaaactctgtatttatttatgtacaacgattactactgttttccatagccaaaagggaccatcttacgttactcatcaggttaaactgtagtcatactaacgtgcgtggtaaattctacagtttgttatctgaaatactgaattgtgcacaggtaaaaggaaaaacagaaagctacagatcaatttgttagctaagctaagcacaggcacgtaccctggcgacgagctgcgagccaaggacatcggagaaggacgcctccctcgcggcgtggctgatggagcacgatcccggcctcagtccggagaagtcggcgaagtccaccctctgcaaccgcacatttcatcagatcacccgtagcttcacacgcaaagccggataataccacaagatcacgcacgcgcgcacctgcttggacgccgccttgctgtgcagccgggcggtggccggaatgcgggacgccgcgagcgctgcgtgtgtggccatggctcgtcgctgccgcctgtatgcttcttccttccttagctcgctcggctggatggatcgaggcggccggatgcgcgcgtatatgtacttggcgcggagggcgcggcgatcaccgctggggctttgtggcgtggagaccggggataaggcgattgcacgcgcgcgcagccacccgttgcgcggaaggcgatatccgtgtgtgtgactctggtggcctcgtaggtgaaacacaaatatctctctgcagtgcgcgcccgcgcgcgctcccgtcgttgtctccgctgctttgtttctcgtcgccgtgtgcctgcgcgcttgctgtcaccgtgtcagcctgtagtttaaactggtgagacgtgagagcctggctgcgtggggctcattttttttttcgccatttctgtttggattaggatactgacatactgttattctttttgtgtgctctgtgtggttcatggttttatggccatcggtgtagcttgtatgcatatatcttttctttgataaaagaagatcactggacaggcaaaatggggtgtaccttatatgggcatttcaacagaaaaatggaagccaccaaaactgaacatgagataaatttgtccctgccaaaattgagcagtgccatttataattccaaaattttcaaaaaatttaagaagggagaaggtttgagtcagcggtcaaaccgaactaccaaagccacatcgaatgggctcaaagcccaaacactggctagcccaccacttaacacggcccacggcactgaacctatcaaaacctctcttctctctctccaccgccgccgccggtctgcgccgtctcactcacgctcagggccgccgcgacgccgtgtccctctccgccgccgccgccgccgccgccgctagcctgcgacgcccgacctcgccgacatgttgcagagcaagaccttcgtgaagaagacgagggcaggccgcgtccagaaggtaactactcggcagcagcatcaccctgcgcgcggcgaaggtgcccccaaaccctagctaacccggagttcccccattcccgcaggtggtcagggagcactacctccgcgacgacatctcctgcggcgccgcctcctgctccacctgtggcgcggtcgagcacccgctctccgccgacgcggccgccatcctcgtcgtcgacaccaacgtcgtgctccaccaggttggcctttcccctcctgttgcctgtagggagtagagctagggattccggaggctgatgttctgagagcttgctgcagatcgatttgctggagaatccagcgattgacgatgttgtcctactatcggttgtgttggatgaggtgaagaataaaaacctcgcagtgttcaacaggatcaaggccctgtgttctaacaaggcaaggaggttcttcgtgttcaccaatgagcaccacaggtgtgcattcgataccttaggatttgctcgatggctattatgatttgttatgtgaatccagtatacagttgctcagttcttatctgaaccaaaacatgtttaaatttatggttaacagaatggggtagagaaaccacctaggttgttaaagaagtatattttagttgctagtactagggagaagatttatctaaaagctctaccctgcatctgatgttccacaacatttcctttttaacagactcagatttatgttgggctaatttgattttgggatttcctaaatccctcttcaaatgtttcttctccaaacagcatatctttggtgtgcatgacagtcggacctcaattttagcactatctgcctgattatatttgcaaaagtctctctatgcatgcactgttgcacatctacactctgcaattttttttaaaatattcttgtcagcaagcttgtatagaccaacagaatttgcaaatttctcgtgataaattatctcttgcaagtacatgtccgtccttatgtttgcgaatttctttaaacacgaagaaaatgagtgcacttccagttccttatgtggtcttcttggtttaaaattacaccattctcttccaaaaaaaacagggatacatatgtcaaagagatggttggagagagcccgaatgatcgcaacgatagaggtactgtaccaaataattctgttagcttgctttatctcatattttgcactactcgaagtacttttgtgtattcttttctcttgattggtcattcatattcagctattcgtgtggctactcgttggtaccaaagtcatcttggtgagaatgtgaaagttttgctgatcacaaatgatagagataacaaacggaaagctattgaagaaggcattaatgctgagacaggtgaaattatggatgttacaaaaatgttagctggatcttttcaaatattggacacattattttttctggtaatcacaacacaatatttctggttccagtggaatcatatgtacgatctcttgcacagcctggtttgctcgatttagtggttgtttcaactagtggagatgtcacaatggaagatgtagaagatcttagaccgtccaaaaagaaagtaatttacagtgaggtacagtaaatttaaactgttgacttgtgcttgttttattggcgttggccatctagtatcaaatacgaatatgtaatttcttgctatcattgcagcacaaacctatgtcagaaattacagctggcctgcggtgtggaatttatcatcaagggaagctccgagttaatcgttacaatccatttgaagcttacgttggaagtgagagcattggtgatgagattgttattcatggccgttcaaacatgaatagggcttttgatggagacatagttgctgttgagctcttgccacaagatcaatggcatgaatcgaagtcatttattgcagacgacgatggtacgttcttcagattccagcacatgatttttcccttacattgatggatgtttctgttctttcagaagatgatgaagaagacgtccatttggctccaaatagtgctgatgatgctccacggaaagccaatcccacacaatcaacagctgcatcatcagctgattctgtctctagtcgcccagttggacgtgttgttggtataatcaagcgaaattggaattcgtaagtcttttataagatagggatatgtttttgtaattacaatatatactcctgatttggaaataacctgaagagatgcatagtttatgaatcttgtttgtatacatattagacggatgcaaattttttgggctcaaggttttattcacccattatgaagttatgatctatacgtttcaacaaaaaaatgtccaaaattttgtatgtgtgaactgctaaaccgtccaaaatttcaacaactaaattgtccaaagctgtccaaaccataacttgcgtgcatttttatatttcaacgtgttaatagtacctaatagttttaaaaatatttcctccctgctatttcatgcatgcgttgtttatccatttttcaccggttagaatatggattgttttctgtgcttagattgtcatctaccaaaactattcagtctataattgcaatttaccttaactgttttatgtgcttcacattcatacaatgcctgcaaacggcaggtattgtgggtccttggagccaatgcccatgcctgctggtagtggaggcgttgctcatgctctatttgtgtctaaagatcgacgaatcccaaagattcgaattcaaactagacagcttggcaatcttctggacaaaaggattattgttgcagttgattcatgggatgtcttgtctcgatacccatcaggacattatgtacggactataggagatattggtgacaaagatactgaaacagaggcaagtcttacaattttacagctgcatttcacactttgtgttgcaacatttacttttactatgtaggagcatgcactgatgctaatgtgctaagtgatatttgtgcgtggaacaggttgtcttaatagagaatgatatcaacacaagacctttctctacacaagtccttgcttgtttgccaccattgccatggacattatcacctgaagatcttgctaatcctaatagacaagatttacgccatgtgagagtctttagtgtggatccgcctggtaaataaatcactgtcatgcattctatttatatttctgtagttggattgaattcttatggttcaactgctgtttaggttgtagggatattgatgatgcgctacattgcacgccactcccaaatgggaattttgaagttggagttcgtatcctttactgatttattttttatttgcagaattcaaaattggaatgctaatttaatcttaagggcacttacactttgagatggttctcaacctgtccactttcttctagtttattgctttattttggcttcatttcatcagattgtcagtatgcactgttccatccacctagattgagtatcacataagtttggatctgtagttacagatggaagtagcaaatatgcaaagcatgcaattttgttaaatgtatgtatcatatatatctacacaggcactaatcagaagaagtgtaactctatgctggttgttcgtattaattctatctggtctgtgcttagagcaattaaactcctcgaggaatttaacacatcaaggacataaagtttaagttagttacttttcattattaaaggtcattcaa

SEQ ID NO: 18230 - DNA, 1441 bp, Oryza sativa
  unsure (1)..(1441): unsure at all n locations
taaaatgcgacatatacctggtttgaaaacacggatagaccaaaatctattgcctttattgacagatcatcatctttatccaaaaggaggaaattttctggcttaagatcacggtgcatcaccccgagcgaatggcacatagccacaatgctgacaattattcttataagctctgcagccttccgctcgctgtaatgccccttctcctgaatcctgtcaaagagctccccaccagcgcagagctccatcacaatgtgcaccgcttgcccatcctcatagacatccttgattgcaacaacattcttgtggcccgacaaatggtgcattatctgaatctcacggcgcacatcttctacatcctccttggtgatgagcttgcgctttgggatggtcttgcaagcatactcacaccctgtattgatctcggtacagaggtaagttgtgccaaactggccctgaccaagcttccgaccaatgatataatgctcccttaggtccgctgtcttccgcccaaggacattgatagatgtaggatccaacccccgcctgagaatactagcagcagtaggcttgaagttgttcacctcaggccaagtatcatcgaacttcttcaagtccaagtagctatccccctgaacgtacccaacggcatgctcccttgggaacagattgtggtaatcactcccaagagtcccgttctggcactgattccccattccaagaactncttatgcaaaccaattccaaagttcctagcctcaaaacaattgtatccttcccaggatgcagatttccacttatatagccgcaccgctacgcgcaaacccgtccaattggaagagttcctcgctaaggcagcccttgcttggcttcctgggcgtgaggaaatccccaacctgacatttttcacaacaaagacttgatcagcaacccatacttgttactacacggcaagggaaaacagcggaaagttttaaacttagccaaggtgaggaagtggaaacctctgggatggcaagaaattccttccaagggcggctcctttggtcgtccaccggaaggaggaaatctccggcctgaggggcttccaccaccagacttgaccaccaaaaccacacaaactttttgctctccactacacgaaatctactagaacccgccctaaaatacgagatttcccagcttcttctcgagccaggcgagcaacaaacaccgaaaccctcagaactggaagagttcctcccaaaggcagctcctccaaaaagcttcctccggcaggaaatccccaatctgagggtttctaatgctaagatccaagctccgcagccaggaacaagcaaatccagccacaaatcgatcccagacaaaaagccgaaacacgcgagaaacgcctangcggtcacccacaagccaaatctatgccaaaaaacacgaaatctgc

SEQ ID NO: 18231 - DNA, 12202 bp, Oryza sativa
  unsure (1)..(12202): unsure at all n locations
cgcgccttttatagcacggggacgcctctggttaggtgcgactcggacagtttttttgcggctgggcccccggattcctggagtattacacaccgacagaaaaccacccctggtttcttggttggtggtgtctcgcagcagaagcggtttggggattgagagacgatggatttattcagtcaaaaacgatttgcattggcttggcttctagctggagctgctgtttatatatactccctacgttccaaaatataaacatttttagacttcggctagtctccaaaatactactttgagtaataatatctataaaagtaaaatattttaaataaaaatagttgcatattataatagtttgtttaatgataaatctaataacattaattttatatgattaatcttttttatatttttgctattaatagttaaagttaaaaatatttgatttgtcactatgctaaaaatacttatattttgggacggatgggtacatatactccgagtccgatccaaattcagttcagactaattcactgacagctacagatactagttttgtaatactactagtaaatgatttcggtttgtttatcctgtacaaatcgaagttagactgtctttcctcggcaggggattagttgggttaattttaggtgttgtctgattggtcagagttcagctggttgtgtaatgtgtatgaaattctgtggaacgttttgaaatataaatttcgtaaacatggggagagccaagagctgcaagcatattctcttctgcaaattcgaatatggtacttccagaaaaaaggataaagttcagaaaatttggtaaaagaatcattagctttgaagataatgttccccatttatactaaaaaaatattaatatgtactggaattacagatgtcgtcgaccagaatatcgagtaaggttgcgacgcaattatcatatctcttcaggattagattctaattagcactaaccctaaggtgtaacatggaaacatatcctctcagcttcccagcaatgcaaatacagtagcaaggccttacctaataagaccaagaaacaaaagggaaatggagccccattggaagccagcccagacacagacagggacgccctaccattgcagggggcacacatgtcatgctgaatttctcatgaggctaggtttctgaagaaaccgctgttgcgtcttcagaaatcaacctgcctgctgcggggtcggtgccgttctgtgcttagaaacttggagtgccttcgcctaaaacgcaataagaaaaggcagaaagcctttgacctgaagccttctcagccacatgaaaattagcaacagtttaatctgctttcttgcgatgggtttattatttggccggtgtcgtgtgcttcaaacagggttaagtggtgagtcagagccacatggtttgattgcataggacacatccccatggaaaattaggtggggctggttatctgtagaagacactgaatttcaggttagagcaaagatcagatactactagaagtctgaaggtttttcaggttcagataagaatggattttgtttctgatgaaattcagagggtctaagcggcaggccatgacccatatgagtcgcaaagagctactcctttagaagcaggagaatgtaacgtgagcttataataagattgattactccttgccacttttgaaggttctcagtggaagcttttgctcttgtggctagtgctgtatgattgcatgggcgacaatcgtatctacaatgacgcaaatgtttatcttctgctacggaatggagattaactcccagcataaatgagtagtgaattattgcaccgaaataattagagacgcttttctttggttgattacaaccatcgcaatttcaactatgccactctgacaacaacacagctcgattatgacactgtcactaccatatatccaggtggaggaaacgagcagagtaggaggaagtgttcagataatagatcatgcaggacttggtaatgatacaattagtatatgatcaatcatcgcaaggaggagttaatactgtcacattcgatcattacattattggcctcttgccgatgaccttttaaatctgaattttgaannnnnnnnnnnnnnnnnnnnnnnnnnnnnnngcatcgacccaatccaattccagacctatcgcagcatgtgtgcatcggttgatgaaagccaaaagcaaccatactaatcaagcactgacagtgcaatgcctgctcaataattttaggataatactacatactgttaccactttactaccaattgctcgagaagttgaaatgcttttactgcgtggcacgatcgagaaaacgagaggttcggtcagctcgtcgccgtttgcaaggttctgctcgatcgatctgtcggttctgacgaacagtgtcgatctccccagccatgcttactgactaaataatgcagcgagttaattactcgtctcggtcagtaactcaaattatgcagtgaattatatgtagccgtcgtggtcagagcgatcagatcagcagttgctgtgttgctagccttgccaagctagcaatcaccatctgttgaaaaggaaggagcaattgacaagtcgctcttgaagccacagtgaccgcgagctcaaaagccttgagaagccagcgtttcaaactctctccgattacgtaatttctgaaataaccacgagtatattgggtgcagaattcagatgataggtgaaagtggatatcaggagcaaacaattggtccaacaaaaaagtgcaatgcgtgatcgatgttgaaagcttggaactttgaaagacgtatacgtaggtgatgacttgttggcggcaaatacaaatagtaccttggaaatttaggatctagacggttaattatgcatgcgttgaaattggaaaggtatgcctggaacttaaagttagttttatccacagagatgcttccctcactatgtctcatatgatattacttattccattgatctagaatcttttatccgtggaagaaatatcaaccgttattcgcttgaaagctgaaacacctggaatctcctcctttgttttttgttacgaaaggaaccaagctagaagccttttcacttttcagtatatagataactacgcccggatagttattcgcgatgaataaaataaataaatgataggcaactaaactccatttccatccttataccattatgatgagttcgtttcttcatggtctcaacctccactccatcattttccacacacacatataaaactactatacgatgtgttcttttttaaaaaaaattgctttaaaaattatattattattttagctaatacttcatgtgttttatattataagtcgctttgactttttctaagtcaagcttcttaaaagtttaaacaagtttatatgaaaaatatagcaacacttataacaccaaattaatttacatataacattgaggtttctttattttgtgttggaaatattgctaaacttttttataaacttggtcaaacctaaagacgcttgacttagaaaaaataaaacgacttatataagaaacggacgtagtaattaattaataatgtactaatttatctctgcgtgaaaaattatttcccaacccacactaaaaacatagccttaatggagatctcctctgatgatgagtaggggcaagaaaaaacacggccttgacgaagatctcttctctgatgataaacatggggagacaagctagcctaaagtagctagggctcgagcccctaaattcctattatatcatctcaaaatttagtagaaattttgaatatatatgacacatgagcaactttagctctattttaaagatttttttctagtccaaagtgaaaagatcacgtacaggatggtacaaagtgaaactttggcaataaaacatggcccaaagtacaattcactaaaaaaatgatattgatggaaggggtatacactccctccatccagatcccttttttttctttacctttttatcaagattgaagttagacaattacaattgtgactgtcaatataactattaaaatatttatgttgaaatcaccaaaacacgacatatggattaattaatatttaaaagtattttagtaaaagtaaatatttacttgtttttatatatctctattactttaaaaagagagtcgacctccttcacctccgcataaaaatctatttccttccatgaaaaccgcccaccttgaaaaactgatttctaataaaatcatgagataattcaagaaatgccattgacaagcgtacaagtcccagaaatgtcattgacaagtctgagttccaagaaataccatcgttcaaacgattttgtcctaaaaataccatcgttgttagggttccgtccattttgcaccgttaaatacactattcatcctatagaacttaacggcgggaatggacggaaccttaacggcgatggcatatttggaacaaagtcgtttgtacgatggcttttcttagaatttacatttgtcggtggcatttttaggatttagacgtttgtcaatggtatttcttggattatctttaaaatcattataaaaaatcgaacaacccagtgaaccaaattcctcctgctaaactcaacaaaagaaccgttgcaacacacgaacctataactaactataatagaaaaaatacggttaaaaatatattttacagatcgtgctattattcaaaatgttaatcgggactatgtaaccgatggaagtacgcagtagaagtagtagcttgaatggtgttagcattaacaggtcatgggacaccatcacgccacagtacatggagtagcagccaacggcccatcactagtctgaaaactcgccgacaaagcgaggtcgcgaggaagcaaacaaatagtaagaggaagcggatagccctatccggttggctggcccggtttcctgtgggacgtaactaggattttgctcttgggtgtgtgggcgacgccgttccacggccaccgccgcctcacgggtcgctttccgatcccgcgcggagggggcagcacagcagccgctgtcgggtccgggcacatccggcaccgcgcggtggacggccgaaatcgggtgaagcgtccgtgttccaagatcacccttttgtactgcatcgcgatcccctccccggccatggaaaatatcgtccctccctgatccccgtctgcttctgcgtgcgatctcgcggttgtataaacaccgttggtattcgtcagcctgatgagtgtacgtacgttgttcaattcgtgtgtgccgttgatctctacgggagattcgatttgacctcgacggcaaggaagggaagaacgggaggagaaaaggagattttgacggttgacgtagccgacgttttacacgaaaattgctgagacaaaccgagggcggattcagccacagaggacattacccacgaacagtgtggcgatgtaatgttactcgagtcgtcagtcgtcaccgctcacttcaccagctgaacaagaacacgcacgggcgcacggctatggttggggcccgcgagtttttaatgagaattttcgcggcggcattatccatccacgttggcgccagcacacacagagcatataccatatgccttattatattctccccctaagcctaaaagtacacatattttgtacaattaattgcctcctgtacacaatttgacagaaggtgccatgcgtgacgccacgaatttatttatttatttatttcgttacgacataaaactagcttgttggtctgaaaaagaaactgaacaaatcatgtttagctgtttgtctcttcgctcacggctagtttggggatcctgaatctcacggtagtctatagaaaatgtattggcatgttatttggtatctttgtctgacaaggaaggctttgagtttgattcccaccggtcacgggtaatctttgtgtatatacaactatgatattaaagtctcgttctttacttcaataaaagttagatcaagattaaaattttcgtgacacgctttttaaactgctaaatgatatgtttcgtaaaaaactatctatatgaaagttgctctaaaatattatattaatctattttttaagtttgtattaattaaaactcaatcaaccatacgttaataccatctcgttttgcataaaaaacttaatcttcatcattatcttcagaagaaaagaacaccacataagataaactgcccaactatgaatattctaagggctactatgaaatgaagaattcctacaagaattttagagaaattcaatcgtgtgaaaaaaaaaatccatatgatcatttggatcaaaagaatagctaaactcatatgaaatttatatggattggcttaaaatataggaatttcggagaaattctaatatgagcttcaaacttttggagaagaaaaaaatccttcgtgtctatctctctcctgattctttttttccccgctacaaccaaatggtcattaacgtggctttcctacatttttttcaatatcttctacatccgtttcaggttataagatgactaccttaagtttgaccaagtttacagaaaaaggtattgatattttcaacataagttaaatttattatgaaaatatattctattattgatttgatgaaactaatttagtattataaatattagtctataaacttaggctttgtttagttctcaacttttttcttcaaactttcaacttttccgtcacatcaaactttactacatatataaactttcaacctttccgtcacatcgttccaatttcttcaaacttccaattttagcgtgaaactaaacacacccttaatcgaacttggaacagtttactaatattaaagttaaaatactttataacctgaaacagagggagtatgatttaaggttttatagcaactcaatctttgcttttctatttatgtgttatgagaatcatacgttctaaaaaagaccgtgaaaatacaaacatactctagtttgtgcgcgcgcgtgtgtttccgaggtccacgtgtagaatttgtgtctcatctctaatatataggattactgatatacctaactgcaaatttgtttaggtgaaagggtgacgtttactaatattaattaaaacaaagctactacaatccaaaatgacaggttcatgggtacaattgggacatgagattttttgcgtgctagaaagattttgttgttggaagaaaataaacatgtgggatattatatgatctcttcgcattacaaggtgagatattaggtgttgatttagtggttgataaaaaatgtagtcatggataaggttattaaaattataatggatgatccttttatgtattcaaaggtacacaaattgtcaaaaaattggcacataaacaattgccactagttattgttaacttgtcatggtcttcctagtgcctttaccaacacctacttaaaaaatataagagcagaaatcttcaacttcgcttatggtagaaaacaaaaatccagcatgtattgggcagctgggagagtgcacgtgcgtcatatatagatacagcacatgatattggacgatggtgatggctcgagtatctctttcatctgatcaaaggaagtacgtggttgttcgtggcacacatgaacgtttacatactttgatggatgtgattttgaccgttgtttcttaagcaatacaaaagtgaataatatctactactccaacattcataactgtgaatatattttatgtaattaactataactattgttgataaaccgataggtatttgtgagcggagaccgagtattacggtaaattaatgtctattctttgagagctgagagtactggctctgtacatgaaaaagttacttaacctaactccacgtgtacaagaaaatgacgtctccatcgaaaaggaaatggaaactgatagtgctcattggtcatggagcacgccgcgcgaagcgcgatgcatcatcacacgaagaagagacgacgcaccacgaggaaaacgcggccggccgagagcgacttcgcggccccatcgcgcgaccgcgaccacggcgtcatatatagcgggccgtccccgccgtttgtacccggaataagttcactttaggtccctaacttgacagcgagttcaattttcatcctttaacgggtccctcaactatcaaaaccagcagatcccatgacagttttgacggtggtttcagatgacgtggcacctacgtggctaatttgactcggtatttcgtctgacgtggcattgacgtgatgaatgaagcaaaaattaataattttaaaaaaataatatgtggatccgcatgtcagttaaataataaaattaaaaaataatgggacccacatgtcaattggttcaaggatgaaaatcgaactcgctggcaagttaagagacctaaagtgaatttattactctgtatccgggctaggccctgtttggaaggcctcagttccggcccattccccgcgaatgggccggagaaggcattatgggcctgaaagcccgctagatctcgaggcgtcagcaacaacagtcagcagttcagcacgctgccgccgcgagggttggcgacgccgcgggcggcgcgcgaagcaaatggagcgcgattttggcggataaatttgggcgcgcggaggcgggaggagcgggaaccaaatcgcggagccgcttccaacctcaggtctcaccccaaactcgccgccgccgccgccgccgccatggagaggaagcaggcggagtacagcaacctcgtaagcttctccttcttttgattctcgaatcacctcgatttgggttctgggctgagcaatggcgattgggggatggcaggacgagaggtacgcgatccagggggagaagtaccaggggcagcagtacagccacatctacttcacgcgactccaccacatgcgcaacctcctccacgccctcgtcccctcctggaagccgcaccttcctggtccgacccctcgctttttcctaaatcgttagggtttctctgctttgtttttggagcttgaactgtttttgggagttgattgcgatgtagcatgatgggtttagttagggtttatgtgctggcatgtggattctctggttcgctctacaaaattctgggggcgaaatttcaggcccattgagctcatattagggttttagaagcaatttggcacatcggctacgatctttgctccatccatagtgtgaatgtatgaccatcaactgagtttttttagggggtgttatgagcttgtcctgtgctagtttgtctatgcttgctgaaaatagtattcacaaaatactgatttggcatcttctatttaccaatagatttttattggttggtgaatgtaactgaactaaaaaaaacatttttcttactaaatgctttgtccagcagttaattcgcaatgaagctagtaatcaatcgtaagatcttttgctggcattatttagtcagtatgaatgtttgatcttatgaaatgtgcctccttattaccaagattgaacattggatccatttgccgcgtgtctatcttagttcatggaaatggatcgtgtaagagacacttgcttttatgcatccacagagcgtttaaacttcaaatcacgcctcttgctgttctgcagttactactgtgttgggacttgaagaaggaaaggattgcataatcgttggaactttatataagcacatgaaattaaagccttccattcttgatgaatattctaaggaggtaatttagcatgtcttgtcttcttatccttattaacttggatggcctctgaatgaactattgtgctacagaggtctgctattcctcttgttaaaccacacaatttcatgcatcctgatgatcatctcattctggaagatgaaagtgggagagttacacttgcaggagccatacctccagcagcatatgttactggtatgtctgatatttttcactgaaaagttaagtttgcaaattctagactagtttctttatgattgtagcatttgtcgaacaattttatccaatatatcatgttgcttggaatactcacccaccaattgtccacaggagttgtaatagctttacatgggaaagaaacaagtgctggcaactttcttgttgaagatattcttgaggctgggattcctcctcaaattacgttacctagcataagtaaattttttcctatcctggcttgctcattctccattttccccatttgcctacacaagttttgatggttagatctcttacattggcatttacctctgttacagacgaggacaaatatgtggtatttgtgtcgggattaagtattgggagtgaaaaattcaatcctctgcaattccaacttcttatagaccatatcacagggcatttgggtgatgagaatgtatgcgcctttttattttatttttcccaaaatgaaggttttcaagtgaagatatgcactaaatttagatgatctctttgcaatttaattaggagcaatccatagcatccaacatagtacgtgttgtggtggctgggaattcggtacatatttctccaagattcttcaatggtcaggtaatgtcactgcatattacatgtttttggtgaaactccatagctttagtttattgcactagtggtgaacactgatatttcaggcagtagcatcgaaagatcaatccaggatagctgaaccaatcaaagaattggatataatgctcactcaggtttcaaccgtttactcccccctcaaatattatcaacgcaattaattattcaggtttatgatgtcagtatgaatgtaatccatttcttctgcagcttgtggcatcattgcctgtggacatgatgcctggatctaatgacccagcaaatttttctttgcctcaacaggtgggctattgacatggaaaaataatgactaatttgcactagtaacattcaagcatgtttttatgcatgcatgactaacttatgtcttgctttttttttggcagcctttgcatagatgcctttttgctggagcagccacttataacactttttcatcgtgctcgaatccacatcaattcgagcttgatagtgtccggtgggtgttggtgtttttttaactttcctcaattaaagcagctgtggagtttgaagtatggaagttctgcatgtaggtttattggaacatctggacagaacatagatgacctctacaagtactctgatgccaaagacaagctggaattcgtggaaagaacactgcggtggcgtcatcttgctccaactgctccaaacagtctaggtaactcttcaggcatttcagccccattgtgctatgctgtgattgcttggtaaaaaacctgtattatatcatccaactgtttgtaattcaatttcattattgatttagtgaccatttttatagcaaagctagaacccttctcatgtaaatatctgtttcacccaggatgttatccatacacagacaaggatccttttctcgttgaaagctgtccccatgtttacttcgtcgggaatcaagataaatatgaaactcaattattgcaaggtactgcttcatgtaaggttcctatgttgttttagcgcccaactaaacatatttgtcatcatgcagggctagaaaaacaaaaagtgaggctgatctgcattccaagattttgtgatagtggagttgctgtcatggtaaatacctctagttgtatgctgactattggtaaagctgcgctgttttatctttgcaatctagaaagttataaggaggccaagtcatcaagtggggattagctccttttacacatcgtaaaaagttcacgaatgatgaaccagtaaaacaatttcatacacttctttgtggaagatttaaaaaaccatgacaaaccagaagtctctttgaagatggacacttttcctttggtcttctgtcttagtatagtacatagccttgatttatgtatgcgtatgcaaacatttttctttgccctttttttgtattctaacacttaacattgttttttatatgcattattgcatacacagataaattgctgacaaacacaagtatatattttaatgcagctcaatttgaggaacttggagtgcagcacgttgagtttctcaa

SEQ ID NO: 18232 - DNA, 1260 bp, Oryza sativa
agataattaggtaagcaatggatcaacaaaactaaagcacaaacaacaactgcagttcctatgctacacacagtagtgacagagcatataaaaggtttcagcctatgagcttatggaaggatatgttactgggagactgggagtaactgggttgttctactgaattaaagtagctcttcatatgcagagtccacgcattgcattcaaaactttaaggcgtcatttcagtcattgagtataaacaggtagttccttatttcatattgaaactcgaagatgctcaccaacggagtaaaggcggagagaagaagacaacagttaactttatgctaaattcaaacagatgtttggttcatagaactagcatccacgatccttgcacaatgtccttcgtgctgtcataaccagccctgtgcatccgaaaggaatccaattgtcaatatgactgataaactgataaatgtgtgctatataaaaaagaaaaatcggatggagtttctagacagagtgccatcagggaaggaacaaaacagaaccaaattgtgccagaggaaacagaataaaacagcatcgcatttactgactcaggttgaggtgaaaacaaaggatgcacagagtaaacaccacatgagccacatgccattctgatagggaaaaaaccgctgtccccaaacttaaccatctgacacatccaatgtctatgccatcaaaggttatagtgatgcattcaaatgggagaggaacctcccaagagcacttatcatcaaaggcatgaagactaaatagttgcagcatctaagatgccggtctatactatgatgactgaactgtagagagtatggatctaccaatatgccagaaactaacagcctaaaggtacagaatgatttcatcacctaatggacagttgaaaagattgcaaatgccaacacgatttatgtcagtgtgtcatgattcataactctgaagataaagtagtactccatacacaataagtgcaaggaatcattttgcagttactattagcagaagaaacgaagcagccaaagtatattatctgtacttatgtacttctgtcattattatgtcctttgtttcttgttgtcacagaggaactatcaaagagaacttgcactgcaatactcctactactagatacttcaaacaaatgatttgcagtggacagttccttaaatatcacatccaatatgttttcaacaaaacatggatgagaaaaggacttaatgtttaagaggtgca

SEQ ID NO: 18233 - DNA, 697 bp, Oryza sativa
ttcctgcagccctttgtttttggttttatgtgccgtggtattaaaaattgaataattactttcaatacaaacaaagataaaataggtgagccatggaatgcattcagcaaaagatcctacctcactcatcgcatctgctacacagcactttattagatcttcgtataaatcagctgaacgttgtatctccggggcatcagcccaatactccagtattaaaagagcgtactcgcagcacctaatacggtagatcgtaagcctcaaggcttcagcacattatatacatggaagcaggaagataaccacacacaaacatatacctagcacggagaactgcacttcggtcattctttgctgtgtcagctatgcgaggaagaattcgtgaaatcttgcagttccgtagaatctgcaatatacctcatgtcagcaacaagagactgaatgatagcaacaaaatatatattaaaaaataactcacggtttttatgcatgtatcggctgattcagctatgacaagcactgttatgacaacaagcttaaaaagcatctgaaaaattcacaaatatgttagttttattgaaacaatataaggaagaaaagaaaatttgtttgtatataccggaataaatagttcagcacatggctcaaaatcaccaaagagttctttggatagtacattgagtagatggcatgcctg

SEQ ID NO: 18234 - DNA, 1650 bp, Oryza sativa
tcctgcagccctttatgatggtttttccactgcaggttgtggtgcctctattggtcagtgatgatgaaaagacactggttgtgtgtatcaactccttgacaaaggtgtctcgtacctgcagtttttccctgtttactgtttgagcgtttcccatttaagtttgaatggcacataataacaatataacatataaacttcatggtgccatggttctttagtgaataagttcatatcatatgttctttatatatctgatcttttgtaaatagcatcaattgataatataattactctctgctgagttgtcctatcagttattttgctccaccaaacctaacgtattacacatcctttggttagatttcctgatctcttgtgcaagtgcttttttctcagttccatgtatatattatgatttttttgggggggtactctggtaagtggtcagattgcaacatatctgaattgctttagcgttcaatgttacaatttagtgggttgtagtcttgtagatgcccctttcttgaattcttcaacctgttgtttgagtatatacgccattctactactttgtgcggaagaatgcagcccaataaactaatcgtgtgttcgtaaatgtatgccctgcataggacacatgaatcatatgtatttgaataaaacaattggattggcacacctctagcatctaggcattgtgtctccgactgattaaaaaccggtaaaccaaatataattttagcaagtgttgttgactgctggttctgtttggataatcttgcagcttgttggacggctttccgaggaggaattgatgaatcagttgcccacatttttgccagcactgtttgatgcttttagtaaccaaagccctgatgttcgaaaggtaggtactaatacagtaatactgtagctcttgtcatggtagatttcttctgtttctcatagtgcttttttatttcactgaaattttggtgctatgaggattttataaggtaggatttgtggaatggttgtccatggcttaagttctggttggactaaattctaataacattcaggcagtgagtggaatatgagctggagaggataggctggtggaatggaattgtaacagtttacatagagaagcatgctatacattagggatgccgcttacaaatgcctatttcctatagttcctgaattaaagccaccctgcccatctctgatactaggtccattagcttctgatgcagtctaggtatcacttgctcttgcccactgaaatattttcacgataatctttttacctgccctggttatttggaacattcagtgttttacgagcttaggacatggaggatgaagattagtttgaagctggtactggatgagattgtcttttttccatagtttgtcatccccatgcagtactactcatttcgatgtgccggtgttgaagttagttaagtcggcagcttcctttgttacgttgctttcttttcttttctctttttgtgtgtgtctggtacaatatccacatacatctctgtgtaaccctgatttctggcatgccctagaatggttaagcctctaaatgtctcaacctgctatagttcttgcattttcaccatgaatcaattcgtgatgcatcatcccggttcatat

SEQ ID NO: 18235 - DNA, 4499 bp, Oryza sativa
ttttgtaccacttagtgcttacactgtacaaagaaaaaggatagtgtaggttcatggagagacctagtgtctgccccattttcatttgctgtatgatttccgttggaattgctaggtgtgaattctcagttgtcagcctcgttcttggttttgccttgcttatggaggtcccaatctagcccaaaacttggtttttgttctggggtttctggtatgtttcggaccagcaacgcgaacatcatgttagctctgaactcatacaaagttcacaccttcaccagcgcagtggattttgttgaaatttttacggcgtcaaattgtctctaattagttgggttcccttgccagtaattcaccactccagtctccaggagcagcaaagctccagtgtcctagccagtgatgaggtttaatggttaggataatgccggttcttcgcaaggagcgggagcaggttgtccgtctgctgctgagtctgtcgtacagtgggtttgtttagagcagtttaaagattctaagaactgattgatagtcaacttcgattatggactatggactatcaagtctggccgccagtatggggcaggcgacaaaggactatggactatgaagtcgattgctaaggttaagctcccatcggatggcctaatcaaacaaagaaaaagctaaattttaaattttcaaacttaattttgagatattttcaacgtagttcctttttagcattggatttaagtcaccaagaatatatatatatatatataatttacctacaaatttatttttattccctagggaaaaaagccaaacgatgaggccttaacattcctatgatgttcttacatttttttttcatatattcctgtagttttccatttctgcatttcaaaatagccctcgatatttttgtcgaggttacaatcatgccgtcctagtctcctagatcaggcgatccagcataatattcctacttgatcagttgattgggtgcgccacattaattgatttgattagccagattagtcagtaaaattccatcacgcgaaaatcatctttactctttagaaccgcactggctgcaggaacccaaagcttttgaaaaaaaaagggatttgggttggtgggtgtctgactgactgaccgagcaacaccgtgtgcagagaggatcagttagaattaaacgtactagtattaatttaattgaatctccggtctcggaatctggacggcatgcaagtataccagcctaacataccaggtccggctgaggaaattctaggtttctaaagtcgccacaacggcgtctcaccgtcaccgcccggtgccctcctcgagacttcgaccgattgaggaatttctaaccggcgcattatctattcggagtagaaagtttggaccgagaaagaacgtacgccgcttcaacgacgcatgcagtgaccaaactatcttcaccgcccgatccgactctcccccgcttttatatacgcgtgctggctagatgcatgcgtggtacgaggaaaacgtactacgtgagccatttcggtgtccgagcgcgtgagctcgatcgtcaagctatagctccggcgaacgtacggcgatcgatcgatggcggcgtcatcgtccctggctttcacggcgcgccgaggcgacccggagctcgtcgcgccggccgggccgacgccgcgcgggctccggcggctctccgacatcgacgaccagcgcagcttccggttctaccgctccatcatctacttctaccggtccggcggcggcgacccggccagggtcatccgcggcgcgcttgcggcggcgctcgtgcactactacccgatcgccgggaggatccgggagcttcccggcgggaagctcgtggtggactgcaccggcgagggggtctcgttcgtcgaggccgacgccgacgtctcgctggaggagttcggtgactcgctgtgcccgccgatcccttgcgccggcgagctcctgaccctgccggagagcaactccgccgtcgtcaccgaccgaccactactctatgtgcaggtacacacgtcgtcataaaacttgaataaaattttgcaacttttgctccatttgtacgtgacgtatacgtgctcatgatgccatgcatgcaggtgacgaggctgaggtgtggcggattcgtgttcggcacccagatctgccacaacctcgtcgacgcggcggggatcacgcagttctggcaggccgtcggcgagctcgcgcagggcgcggcggcgcccagcgtccggccggtgtgggcgagggagctcctcgacgcgcgccacccgccgcgcccggcgtacgaccaccccgagtacgagccggcgtccgacgaggccagcgacaagctccgtccgggcgacgagctcgtgcaccgcaggttcctcttcggccccgacgacgtcgccgcgctgcgcggccagctccccgcgcgcctcgggccccggtgctcgcgcttccttctcctctccgcgttcacctggcgctgccgcaccgccgcgctcgggtacgcgcccggcgacgaggtgcggttcatgttcgtcgtgaacggccgcggccgcggccacggcgggaggccgctgcccgaggggttctacgggaacgcgctcacgttcggcgtggcgcgtacgacggccggcgagctctgctcgggcccgctgtcccgcgccgtggagctgatcgctgccgcgagggcgcggaccatggccgacggctacgcgcagtctgcggccgacgcggtggtgctccgcgggcggcggcggttcacgacggcgcggacgtacctggtgaccgacctgacgaagtcgccgctgcacgaggtggacctcgggtgggggcggccgctgttcggcgggccggccacgacgacgctggccacgttccacatgcccgcccgcggcggcgggatcgccgtgccgatgtgcctgccgccgcgcgccatggagaggttcgcgggcgccgtgcgtgcggggctcgcggcgggcgttccccgtgcggcggaggaggccgccgctctgtcgaagatgtagacttgggcttggatttcattcaagtggcctcttattgggcttctacagcgccaattgttggcccaaaaaaatccaataaatcaattttagaaactgggttctgtatttcggaagctataataatttgatccgaattcaaataatattggatcaaatttaaacagatcttgctaattgttgaacgaaatttttcagcgggggaatcccgaagagttaggccggatgcactgaacccagaaaccagaaaatgtcaaggcccaaagtttttccaagagctgttactttattatcagtttattatcactccctgacgaactgcagttgctgtcctctctcgatctctccaattcctacggataatcaactgtccaaagattcaagtccgtaaccatgtttttcctgcaacttggttcttgcgaatgcacaaggataattagtctgctcccagaactcacatagcaccagatttgagattgtatatcattatgtaattgaacaacagttgtacaatggttctgtttccagaactcaaatcagcacatcacttggcgtggccacgagcctcctctgacgttagagggacatgtctctctaatgtgtaggcttatgaggatggccccacctgctagagacttggatactgggctctcacactctatgaagttgcttgggtaaaccgaagtaccgaaaatatggatggattttaggttttcagcaagcagaggcacaggcgcacagcctagcaaacctggttgtagggctgggcaaaaagctcgaagctcgtggctcggatcggctcgtttcaggctcggctcggatcgactcgagcttggagtcttaatgagccgagccgagccagctgttttgctcgttaagcaaacgagccgagcccgagccagctcgcgagttttcggtaggctcgttaaactcgcatagctcaaaaattagacatgcagcccaacccaataaggaagcccaagttcccagcccaacagctcaagtacccagtaaaaaggaaaaaccctagctttgaccttcctcagtcagccgagggcccgaggcgcctctcttgcgcatgctgtcgcaggctgccgccgtggccttctcttgcgccgccgcagcactgcctcgcgcccttgcccttctccttgcaccaccggcccgccacaggccgcaacgttgccgctgccctgcccaccgactcctcctcccgcagccgcagcgccatgccgacgacgccgatgacgccgctcctcccaccgcagccgccaggccacgccgaccacgccccttctcccgtagccgccgcagggccttcatggatagggagcgccgattggcaagcatggagtccaagaaccgcagcaaggggaagaaatcatcagaagcttgtctaggcggcagccacctcgcctctgttcagaagccaccaagacaaagacctaaatcaaa

SEQ ID NO: 18236 - DNA, 8646 bp, Oryza sativa
  unsure (1)..(8646): unsure at all n locations
agtctccttctcgtatgcatagatttagagaggtatgtaaacaaattgcattgcctattggaaaaggtttgtgttttgatgtgccaacaaggtggagttcaacctataagatgctttgtgcttgtgagttttacaaggatgcttttgttcaatatgcctatgtggatgctaaataccaatggcaacctttgcttgctgattggttagtcttttccaaaattcatccaatattgaaggcacttgctgaagtaactactgtattttctggatctacataccccacagcaaatgttttttatccaagcattgtgaatgtgaagagggcattgcttgctgcatctaagtctactaatagggacaaggttttgaagaatatggttgaagctattttggaaaagtttgataaatattggaaagagaagaacaaccttatgatcattgccactacccttgatcctaggtttaagataaggtatgtgagttggtgttttgttcaaatgtatggtgaggaagctggtcaagttgaggaaagaagttgatgaactctttgccacggctgaaacgacgcatcgccttgagaaggctgcaagaaacaggggaagggatgaaacatccacctcaaccattgacacaagtaactcattagcttcagttaaatcttcaagtgagttctagatatttttgcaatctagctctgcaaatgtatctaagtcagaatggctaatctatctagatgaaccaaatcatcctttaacggacaaggatttcactttgtttgattggtagaggttgaatactcacaggttccctgttgtgtcaaggttggcaaagagattcttgactgttccagcgtctagtgtatcatctgaaacaacttttagtgctggtggaagagtgcttgatgattaccgaagttccttgcgcccatcaatggttcaagcactaatatgtgcttctagttggatacgtggttctcaagataacaagacacctccaatggctgtggtatgatctctcatatcaaccacttgcatttttctttaccagtttataattgcattatatcttaagttgaacttgcaattttctttttaggcggaagatgataaggatgatgttgctagcaactagatgatttccagagagtgttgttgctagcaactaggatagtagaggtaagacattttgtaagatttctgtcttctgatgatttgttcaaatgtatggtgtggtgaggtccaagggtgtttatgtttgtaaaaatatgtatacaagtatgtagacttgaagacaagaatactcatgtaagattatctaattttgtagggactgctagatgcttggatggctgtcaagacattttttgaggctgataagatcttttaggtggctttgaagacaaaatagttgcaacttcaaagggcttttgcttttcttaacagcgatgctattatggatcaatggatattatttatcgattatgcttatgcatgattggatctaggatatgtggatcaatgaatataacagactaatactagaacttgctattatgctatttgctaagtacttgctgctactatgctatttgctgagtatgttatctgtgagagtgtgactgtgaatctgtgatgctattttaattaatattcatagagttctctgaattctaacaatctgtgaatctatgagactgtgatcttattctgtagttttgttttcttattacgtgactgtgatgcactcatgcacacgcacagatggactgatggtggaagcctggttcattgagttaacgagctaatcaagctcaacgagccagctcgccgagtcagcgtttgagctcgttagtcttaacgatccaaaccgagctagctcgttaaggtaacgaggcaaagcgagctgagccgagccgagtggctcgatatccacccctacctggttgtactactagcaagcagagtggatgcgggcggcatgcggctgctacagagccaagccagcgcctccccctgcctccctcgctgttgcatttgccgccacaaatcaagtggcagttagaaaagctaaaatggatgaaaaaaacagagaaaaagaaatcctaccctccatagcgagcagtggtggtctgcactctgcaggcaggcaggcacccaggcctgcagctcgatggcgccgccgccgccgtcgccgccgcgatctctcacctccgtctccctccggactcctctgagccctctcctcttcctacggccagcttcttgcaatccatcggcggtctccggctcctgcagcagcggagcatgccgcggcgtgcgctgctcggcggcgaacaagccttctccttccaccgctccgggcaccgaggtaaggtagccggctagccgccccccatattcttgtttctgtgttgatcggagctcgatggctggggtgctctgggctcgtcgtcgtcggtcgatcgtcatggcttgcttcgtttcttgcagctcgacctccatggcaaagataaggagtgaggtgctgtccccgttccgctccgtgcggatgttcttctacctcgcgttcatggccagcgccgggctcggggccctcatcgcgctcacgcagctcatcccggcgctgtccagcccggcgagggcggccgccgcgggggagacgctcaagggcctgggcatcgacgtcgcggcggtctccgtcttcgcgttcctctactggcgcgagagcaaggccaaggacgcgcaggtggcgaagctcacgcgggaggagaacctgtccaggctcaggatccgcgccggcgagggccgcccgcccgtcccgctcggcgagctgaggggcaccgcgcggctcgtcatcgtcgccggccccgcggcgttcgtcaccgagtcgttccgccggagcaagccgttcttgaaggacctcatggagcgcggcgtgcttgtcgtgcccttctcgacggacggcaacgcgccggacctgcagttcgacgaggccgacgaggaggaggaggaggcggcggcggcggctgggaagatgaagcggaggctctggcagctcactccggtttacacttctgaatgggccaagtacgcgcaaagccgggatcccatgaatttagctgcttaaatttcttcttcatgtcaatcgaaattcaaatgcaaattagtatctcattttcaaatcgattgctgcttcttgcagatggctagatgagcagaagaagctagccaacgtgtcacctgattcccccgtgtgagtatcaaaaactactctgaatttgtctgaaaatataactgaagtttctgcagctgctgaactgaaaccgcatcactcttgcaggtatctctcgctccggctggacggccgcgtccgtggcagcggcgtcgggtacccgccgtggcaagcgttcgtggcgcagctgccgccggtgaaggggatgtggtccggcctccttgatgggatggacgggagggtgctttgaatatttgactgatacagaccgtgaaaacattagttgattggagaaaaaaaaggacggccgggttcgatctatagcttatactagaacaagaacaggaagagtttgatgattgctttaacttctgtggggttgattttgcttcctgcatcccagcgacatcgcccaagtgaatgtgatatgccatgtgcccatgtacatgttgttttgcagcctacgtgacttgattattaacgagaatcctgtgtcaaagatcgctttttccgtggtaggcttctccattttattttatttttgaatatatatacgaaccgtgacaaatctgatggaacactggaccatgggggtaatgatactgtagtcgcctggtctttttatcaggcgctaaatgcaaacaatcagacagcttaaacaacctgaggttgttcagccagcccagaatacaaaaagcccatggaccgtgagcccgtgaaaccatggcccacccatcagtcacgtcacgtcgggacgtgtgcgcactaccccgagaagcgcgcggccgtaagccacaaccacaaccccacaccgcctcttggctgctcgcgccctgacacttcccaaaaccccaaaccgcccatatctctctcctcttctccgctcctcgcttcccccaaaaccctcgcggtggcggtgggccgccggtctcattccgccggcgtccacggaggcggccggagccaggcgctccgcgggccggggagccaccggaaggctggaaccctagcggcggcgggtctcctccccctccccgcgcgccgggcggcgccatggccattcagcggctgctcgcgagctcgctcgtggccgccacgccgcggtggcttcccgtcgccgccgactcgtttctccggcgccgccaccgccctcgctgctccccgctccgnnnntgtgagcttccttcgcaccccccgggcatttgctgccttttgctgctgctgctgtataggcggtttgttggttttggtaatggcattgtatagtaggcgttgtcacgttcgtggcccagaatacacatccgaatggtagggattttggagtccggcgcggcggtggggtatatttttggaatctcgaaactttgtgggtactacatactaatagattgatcatgcatttagataaatctatttctaatccgtgagaactgagcttgattactgtatctatgatcgttaacagcctgaactctgaatgaaatgaatataggactcatttggtttgtttgagaaatttgataatatgccatctaatccgtgtgcctttgataatataccatccaatccgcatgtcttgctaccggggctgcatttttttttgattccgtgccactttcgctggaggagggcatgaggcaatggtccttggtggcggcagtggtggcgcgggcagcagcgaggcgatgcagtggcagcgcgggtagcagcagcagccgaggatgccgttgtcggccagcaggcaactgggcaaggtgaaggagacgttgatggggacgcgtggagctgcggacgcagctggcgggcaggcggcgggaccaggtgaaggagacgccgatgggggcacgtccccagcagcagtagccgtggacgtcgtcggcgggcaggaaatgggatgaggcaaaggagacatcggtggggacgcgcaaggctgttgcattggctacgtgggcagcagccgcgaatggataccgccggcggcgggtcaaggcggaggagacgccggggatgcgcgaggctgctgccgctgaccaccgccaccatcaagggccattgcctcctgctctcctccggcgaaagtggcacgaaatcgaaaaattcacagccctggtggcattttatcaaaggcatgcggattgggtggtaaattatcaaaggcgtgcggattagatggcatattaccaaatttcttggttttttggaggtttgagatgccctaccaaatcattggtagtccgtagtccaaaacgtaccttttggtagagttggatataggacttgtattggttttggcaagtattggcatcaatccaaatatctacaaagtactattaaagttgccaattatttggtagggcaaatttttgcatcaaccaaaacaacccatactcaactactattactatgtactaggttactactatgatctagggacacactggaggatggccatgtccacgctccgatcatagcttcctaggctttcaaattgaaattttgtcatccttgtagagacagacacagaagtgcagtacaacattatctcacatcctcacatataccaatttcagtctccctcatgatatgctgtaccatgcgaagccacttcagggttaagtaaacggtattgaaaaggttagggggtagaatccctggtttgagagtttgggggggttaaatagtcaacctgcaatagtttggggggttatgtagacttattccatgtttccatattaaagtaaactaaaaaatcaagttcaaatgcactactgtaatttagaacaaccaatgggaggtcattcagtgatgcaattggtagtgctgtagtgcactgcacgcgtgcatcattatttggggatgaaaccagtgaacacgtaacgttgatgccctatacagctatactaaaagtccagttctggcaagatccattttactatactaaaccagtgaacacgtaacgttggtgccctatatgagttggatcagctcctatttcctactgcacaatgttgatagacacacaaaaatattaaagaaattatttatagattgttgtaccttgaacctgatctcaatttcactttttagaagtggcatgcttggcttgatttttgttctatattatttggcctgtttaaacttcttggtaatctgggtacatccacacttcaggctatttaacaggaggtcctggtctaaaccaaggaaagtctcacgaagcatttccattgtgtctaggaagatgaacaaacaaggagatctctgtaatgaaggcatgctgccacatattctgtggtggaaagaggtgcttgcaaaagttggcatatatgtattttttttctctccaatgtattgacagggaatcactaatgcttcagctttgttattgctgttattctgtttaatgttctcagaaaatggagaggtgcaggaaaccatcatcaatgcaattgactcagagacttgtgtattcaaatattttaggattggatccaactttaagaaatggaaggtgaatcagatgctcatgcttaatataattatgcaatgatcattctttcacattttctttaagaaatagaaggctagcatgacgttgtactatttttaagttactgtgaattacttcagtttttcatattctaaagtgaaatatgtatgtgttcattactccatttgtttgcttagttctattaatcttacaatttgtatgttcctattctttgcttaatcattggagaattttatggcaatcacggcttcatgtatgtcttgaaaaagaatttctaccagagcaatctgactagtttggagaaagtttattgtaattttgtatcatatataatcaattcctttcttccatggttatttttctttcattttattaaatatttcttgcttgagccatttttgtgttggtcaaatcaggcacatttcttggtatttactttcttttcattaacacaaatgttgatatgaatctttgcagcttgaaggatggaagcctgaacacggaaatgttgcaattcaaatcgaagtttcctcgtgaagttctactttgcagagtaatgctattctattcttttattttgttcacatgcttgatcgtcttttttgcgaaaatctggagaaatgccaagaatttcttagctgggaatttttagttatcaaaacctataatgtcatagatgtttctttctgaacatctatgacatgtgatggtgtgttttatgtgcctctgggaaatctttactatgccataacttacgtgcactgctgtccttgtttccaaaacaatttactttttgtttcactacatacccctccatacccatttccatctgtcaatctggattcgctttcagcattttgctaaatataatactcagaattaatgtatctctccagcgttcttctggttttcctcttacattcaagctggaaaaaaaatccaaatacatagacctataacggaataacctttctccattcaggtgggagatttctacgaggctgttgggtttgatgcatgtatccttgtggagcatgcaggcttaaatccttttggaggcttgcgttctgatagtattccaaaagctggatgtccagtcatggtaaactgttacataactatgctgatgctctgaaattaggattgctttaagaactatcatagtgatctgcctagttaattatcaaatttttgcatcattatgtaatttgttttttgaaaaagtggagaacgaggagcttgaacttcttctgtgaaacagatcttgttgcgttcctttgttatgcttttgaagagtcagcgtatcagtaccatactgtgcggcacttactgctgccttttatctacatataagtttcagtctaaccacaataacattttgtaagttgcctgccttttttttgcaattacacattgtggatatggaagacttatttattttgttagttacttacatcacacctgtctagcatttcgtatgctcatgatccatcaatatagttcaagctttattcaccaatatggtttgaactaggagacatgctaggaattgaagttagcatgcttcatatcttattgttctgttggcaatagtatgaaaagagcattcagaacttgtggcaaacattgatttaatatggtttatactttataactaataatgcacatctttttacattatgttgataatattctatgacatcagagcacatttccttacagaatttgcggcagacattggatgatttgactcgatgtggttactctgtggtaagatgttaactcagttgcttgtaacatatccattaggatcatttgtgcaagggataattgcatctgtacccccattttgaaagccaattgttgttttacccccactttttagggtttgcagttttgccccc

SEQ ID NO: 18237 - DNA, 2874 bp, Oryza sativa
ctgttgggggacgaggacgagcggcgcggcggcggggccagcaggtggcggcggcccatcttcttccccatcctccgacgacggccacaaccggttgtggcggcgtctgcgttggcagcatacgggggcagcaggccgcggcgcatcggcggcggcaggcgatggcggcggctgcgggcggtgttgcggtggccgcgacgggcggcacgcggcggcggcgtcggcaggcgactcgcgtgcgggggcgtcggcaggaggcagcctgggcgacggcggcggcctgtgcggcggcgcttgctcagcggcttgggaggcggcggagatgcgtgggcttcccggcggcggtggctcgtgggctgaccggctgcggcggcaacgtcaaggcgacgcctagaaggtgttcgatgaaatggcgacaaaggatgtagaaatgtggagctgagtaatctagccaaacacttttttacctacctcagctcctagaggagctagctctcactggagttggagtttggagttgggagttgggagttggagttaggagctctaccaaatggggccatagttgtgatatttttagatatcacaactttagtctcctttctgatatgctctgcaaggttgaaatgattatatccttttttgagcaactatcatctttcagcttatcctgtgtattcttagtgatgctctataccccctctgattccaaatgatagtggttttagttttctcaactctttcctaaatgtaagtcattttggaatggcgcctcgccatctcttttaccatgtttgcacttgccctcttacaaagaaatgactcatccttttccaatattgtataaatgatgggcaatagactgatagagttgtttgagctatttctttaattctcgtgcagaaatctgaaacaaatatattttggattttgttaagaaaaacttatatttggaatcagagggagatatttgatactacgctgcattaatttcattttttctgttcagatttcattttttgccttttgttctagttccccagaaaattgagtaatgttgcaccatgtgatatcataacagctgttataatttgaactcttgaactgtttcagaggcttgcaggcttatgggtagcataacttgctcgattcctgaatttacatgcataccggcagcaaaggttgctttttctttctccttagagatattgcaacaccatcagttatactagattgtgtgctttgttgcatgttcatgctggataaatgaatttaacgtttcatacccagtagttatataccacagcccagagtagtgcagtgtccttagtcatgtgtaacttgtgtgatgtgtacagatgtttgtggttactcaatatacagtaagctggttttgtaaataattctgaggaatttagccaagtaagatgcatcatatgacaatactgtttggagatacaaaaaaaaaaggtcttttcaaatgttcaatgtttattcttcttggctattttcttgagcagcctattgcgcatactagaaaataggcactgctactaactggccacacaatatgttcatgggccattttatagtgagtaaaatgataattgggatatcaaaaaaggaagtattgtagattcctttttgttgtagtactttcaattttattatatctttagggaaacctttttggtctcctgttagttttgatcaatttagttatcatatcatgattatagtgcatactgttttgtcctttttctcatcctatattatttttcaaatgttgattttgcagcttgtgaaattactcgagtcaaaagaggttaatcacatcgaattttgtagaataaagaatgtcctcgatgaggtgttgttcatgggtagcaatgctgagctttctgctatcctgaataaattgcttgatcctgccgccatagttactgggttcaaagttgaagccgatatactagtaagttgaagccaattttgatagtctttcccttcactatgttattgatccggagcatcttattttgccttttttgtaggtgaatgaatgtagctttatttcacaacgtatagctgaagtaatctctttaggtggtgaaagtgaccaggcaataacttcatctgaatatattccgaaagagttcttcaatgatatggagtcatcttggaagggacgtgtaaaaagggtgcatgctgaagaggagttctcaaatgttgatatagctgctgaggcactgtcaacagcggtatgttttgagcaattggtttctgtgtttatcgaatttattgtgaattgaccagaattatcagtatttgaacaaactaaaatgctatgttgtggtcactaatgtaaaaatgtgcgaatcttcaacaataaatcaatacctgtggctgcagtcttcaaacaaggatatgaatactgtggatatttgcaggaggctgaactgcaccttccgcatttgcatttcctttgatatgatttgtcatgagtcgactaagacattaagatttttttttcaggtcattgaagattttctgccaattatttcaagagtaaaatctgtgatgtcctcaaatggaagttcgaagggagaaatcagttatgcaaaagagcatgaatctgtttggtttaaagggaggcgattcacaccaaatgtgtgggccaacactcctggtgaactacagataaagcaattgaagcctgcaattgactcaaaaggtagaaaggtcggagaagaatggttcaccactatcaaagttgagaatgctttaaccaggtattcaatatactgatgatgataaccacttggtctggcaacctcacttaataatcaaattggcagtcttacccgatttatctgt

SEQ ID NO: 18238 - DNA, 8997 bp, Oryza sativa
ttgttcttcacaaaattgacgggggatggcatattatgaccaatggtacccaaccaattggtattggcgggaccttgaatcttgactggtatatgatgttactgattgggtgcatttctgagagggtattcactatctccatgtcagccacctattaaaaaaaagtcaaaagttcagaaattttcataggagtgttcgacttgtttgtgcccagcaactaaatcccacttcggtgaagcggttgaaccccacaatcggtgctagtgatttcctccctgtacaagtggaaaattccatcctaaaatacagttagttctttttctgttttgtttagttatatgcatataaggatgcctccgttgggctcaagagctctagtcgtacatgaaactgagatcttatcgaatttaagtgcatgttatggaagctgatttatttagagggagggacttctgactttgtcatccaggatttggaaatgtaatgctttggataaacatgagttagtggctaaacaggagtgtcacattgttctaactccacactcttaaaggcatagctctaaaggtggagagtgctccttcagctttttgtaatgggtgcctttcttttttgccccctctcttgctgatagtagattcagtcacacatcatgagtttttgaagttcgttttgttggtgagggcttaagtacaaggttggtgattaacttgctgtatctacagttctacagaattttctttcttttattagaaacacagatataggttgttcattaaatgtcaatgaactaatagtgaaaatcaaggcagatatagttagatgaagtgtgcacactgcaaaagagatgcacagattttagaagtatataggtttttcaggaaaaaaaacaatttacaagtatatattccctgggaactggaactggatctttgtacatcttcttgttatataatataggtctataattgttctgttaagtaaaatactctggatagtattgggtttgtaagtggaatgagaatttctctagagaaggaatatagttagaattgacatgatgagggaagaacaacctcagtgtgaagtccagcaaatgagcacttggcacagtttttactttcattgtcctttctccactaagcatgctgcgctgtccaatttaaaatgctaccatgcagattctgggttctttgcaattgatttctctggagaagtacctgcagacatcagcaacctcgtcaaggtataaagtagctttccccctcgtcttgtttgtactcactactaaccatggaagatgaatggcttgaacatgcacatggttcttgagagcagcaggaggaggaggatgaagagcaatggctaagctccagttcaagaagctcttcaactccatggtgcctttccggcctcctaggtggtcggctgaggtacgcaccaaaccggcaagtcacaaaacggcaatggtgaaactccagcaggagtccacccttttcttttctgcatttccatccttccagttgtatcaggtggtggcgaaataatcagaaatatctgtgtgatccttaatatcaggtggtggcaaaattattgatacctaattgctgagtcaatgcttgttttatgtgtactctggaaattgccctactactaataaatggctgctttttatctagaaagatgctatgttgtctcatttgattgtctttgtgccagttagcagttggtcatatccttgctttgagacaaagttgcttctgctggggggatggagagtacacctcatttcatttctgccttatgccattgcaagtatgttgatcctgtaaagatctgccataagaaatcgatttgcatgttatgttggtgactatccagttttttctattgatatacgtttccaccgaggcagaaatttccaggtaaaaaactatgatttgaaatatgccaataagatttttaaaactgaaaagaggaggaaaaaattcaaagaagttttcccttttgctgctgcctgctggctgagtccagcatttcttctgaacaagcccggaatgatttactgaaggaagatgaattgttgcaacgcaaaagagtactactactttgcagtggtgcctgaagcagaactaacttacagttacatgtgtttcactgactcctaagtccttgaacatgaaaccttaagactcagacgtggaaacttcttgcagtgtactctatgaaaaggcagctatggtttcgatatgaatatgtgatgatattcttcagatggtacatcagttattaagctctcatatgtacatgaactaccgggaggaaagaattaaaacctcatcatcttattaacgattaatctgcttctacctgatctactcactgcaggattttcctgtgtttatgtgcacctctaacatgaaccatgttaccactcatcttttttttttcgcctgtgccttgtgtgtcaactgtcaagagattttgagaaatcaacttctcatagtctccacgatcctctccctgcctggagcagcgaggcgtacagcagctcgttccaggaatccggcacgccgggcaggcaccagtggctgcagtcctgcttcgccaccgccgccatccgctcctcctccgtctcgtaccgcacccggtacaccgacgggtgggcgtccttgcggtagtccgtcatggcgctgatgttgaggtagatcaccggcgtcgtcatccgccccagcacctgctccaggatcctcatcttctccgggtactcggcgaggtgcgtccggttgaagatcggctccgtctccctgtggcatctccctcctgagttccactgccctcccctggaaggtgaagatggatcatcagatgagatggaggagaagaagaatacgccgtgtgatgattagagttcaaaattccggaacaaaatttggacaaaatattaccaaattcaccaaaaaaacatgaaaaactttaaatattttggctgaaataatatcatatcggggtctgatacaactgaattttctaaaatttcggtatatcgacaccctctgatacaaacactgaaaacgaaagattgaaccctggtgatgatcggatggtgcgacggagatgtgtgattcgatctcttacctgaaatgtgtgagggagtatcctctgaacaccacctgagttcttgtggagtcgatgttcttgtcgacccatctagcccaggtggtcagagctctcttgtatgcgtccatcacctcgaggctggggtgcacgtagttaccttcttggtagtaattcagcctgtggagacaagaacaacgtttgatcaatggtttggcaggagagggtgaaatgacagattttgtgtaaagtttcatgtggaagttcagtttggagaacggtgtgatataccctcttgatgttttccagtgcgtccaccagtggccggtgttgaagacgacgatgtcggcagtccggtacgccggagtcgtttcatcgagttcatccaatctcaacttagcgtccaccacggcgccgcctttggtctcgttgatcatctccttgactagaaatattgatcttatgaaatccacggagcaattgtaatcctacaagtgcagtgaaattagccatgagatacaaatgttgacaaaattcagagctagtgttgttcagtgagccagcctagctgtgtaccctgaatctgaaggagtagtatcccctggtcttgaactggttcctccctgacgcttcatacatcctcctcttgtccctgacaccatgccgcagaatgcacaccagagactcccacatgttgcggttcagtgagtcgccgacgaatatgatcctctgccctctcagcctctccagaaaatcaatcgggttcagcctgatgaagcagaagagaattaagcttcgatcacaaatgcactcgaaatgatcttgaaatttttataattccgaagcgaattcagaaaggtgtcgcgtgcatattacagtgtacgtgacggaacaagatcctctaacgttacgcaacgtaacgtcagaaagacatggtcgctgacatgtgggtcccactgacctccggttctcttggagttactgggaagttcacaggagctgaggttgttgggctcacctggggatgtcgcagccgtgcggctgccacctccacctgaggaagccggtgtcggcgcggccgttcttgtggcagttgaagtcgtcgtcgatgtgggggcacgagcccggcgggtagaacgggtaggcgccgccgccctcgtcgtcatcgcgcacccagcggccactgaacacgtcgcacttggcgaaggagaccaggccactctgcacgccggacgtccagacgacgcggttgtcgccgacggtgctggtgttgatgatcgtcgcggcgggcaatggcatggcggcgccgtcgtcgcggcgatcgggagcttcttggcgcgccgccgccgccgcgaggaggacggtgtcctttcgccgcctcgggtgctggtgatgctgctgctgcttgtgcctgatgcctctccgatggctgtggtgggtgtcagccttcctctccggcggcgtcgatggcgtggctgcggctgctgctgcggctcgcggcgtcgccgtcgagttcagtggtggggccggggcgtcggtggagttgccgggagcggcgacgatggcgtggtgggtggagttcttctcctcgtcccttctctgccatcgcggcattggtgttgcggtttcctctcgctgctgtcgtgatcgcgtgccattcccgacgcgttgatccccgtcgacgtcaccgacggtggcgttcccggcgcccgaccggagatcagaaacccgcggtttggccgtttgctccgccgccggcgccggcaaccccgagccctcggcgccgctctgcgttctacgcgcggtgttacgcagatcagcgccgccgccggcaggaggaatgggcgggtgaggcgggagagacctcctcggcagcgccgccgccgacgtcgagttcgacgacagccacgacaggagtgacgacgacgacgcccccgtcggggaagggaacgaggcggcgtccgcggtggggccgctggcgacggagacgtagaagaaggccaccacgagcgcgacggagaagcatgccagcacggccttgctactcgtcatcacatggccgccgccgcaaccaccaccgccgccgtgcttaccgccgccgcgcttgtaaccgttgagcgacgacgacgacgaggacggggagaggaggccgtggaggtgcacgtgcagcgacccgctgctcccgccgcctccgccgcccgcgcctgatccgccgcctcggtccagcatcgacagccacgccttcctccacgcgccggccattcaatagctactagtactagctagtcagcgtgatcggtgtgtccggctagccgcgcgccgccgccgcaacttgctggggagtgaagcgagcgaggagtcgaggtgtgtgcgcgactcttgcagcagttggtgataactgtagtggagtggagtggatcggatcagccagagatcgaagtgcaaccgcttttactggttcttggccagtgcccagtgcagttagggtcgtcgagctccctctccccgcgcttcgcctccggactttttccaaacaccttgcatgcaacacgatctcgtcgatctcgtcctcgacccttcagaatagactaggaggcccgtttataaatctaacccagccaccgagcatctcggcccaatcatctattgctcctacatggaggcctaacacagaactgggccgagtcatgggccgcaccctcgttatcttagggttagttacccatgaaatcctgaccgtttaatctctcgtatctgcatcctgaccgtcaaacaagattacacggagtactaattaacccaccttctataaaagctcgcccccatctccctccgcctcagcaagcgccgctccggttaataatagcaaaatcccctcccacccccgccttctctctggaagcttcctcctgctcttcgccatggccggcggcgggaacctgttcgggagggtgctcagctacgtcgtcaacgagttcatcgtcgaggggctcgccaacaagtatgatcccccaatctcatccctctcctcccccctccccctatcttcagatccgtctgtacatgtatgcgaattcgtttttgattcgattgatgtgctgcgatcggtaggctttcgagagaatcaagttcccgacggagtcgtcatctcgttatcgtgaagtgatatatgttcttaaattattttttctcacaacttttcgaatggatgtcatggaacaaacgagattatgcgttcttggaatctgtaggagacggactaggatttggagtcccaaaaccagcacttgaccgagtcttttgttgatttgtgtccaatcctcggtactctagtgttgatttgtgtccaatcctcgtactcgggttcatgtcgtgtccgatcctcgtactctaggtcaaccaacttttatctccgccgcctccacctcccccggtgtagcagaattctcttccctgtgccatggcctgtggtcctggtggcaacctgttcggaagggtgctcggctacgtcctcaacgagatcctcgtccaggtgctcgccaacaagtaataatcccccatcccatcctttatccccccaactccttatctttagatctgtttgtcacatgcgaattcgttatttgtttcatgacatgtgattgctacgcttcgtcatctggtctgtgggagaatcaagttcccgatggactcgttcccttgaagccacattgtctcgttgtatcagcccttatcttgcgcccttgtagggtttcccgtgaagttgggcgcagtatggctcttacatacatgttactgtcaccatgttttccagtaatatgcgtaatgtctgattagtgtatggaatttttgttagttgtgcctgtggcagtgatgagccctaacagacctgtaatgattcttgtgtatatgatcgcttgattcaaagaacatctaagggactgagttgtcatatatgcacaagactggtgttgtctagtctagtaaattgctactgtatagtacattgttattctgtctagtacattgttactctttctagggatgagatgtgatcgttacgcttcgtcatctggtctgtggggaatcatgttcccgacggactcgttcccttgaagctatattgtctcgttgtatcatgggcctgtcccttatcttgctccctcggaggatttcctgttaagtagggcgcagcatggctcttacatacatgttactgtcaccatgttttgccatgcgtattatgcataatgtttggtaactagtatggaatttttgttggttgttcccatggcggtcttgagccctaacagacctgaaataattattgcggatatgattgcttaattcagagcacatctaagggactgagttgccataggcatatggacaaaactggtgttgtctagtacgttgtcattctgtctagcagagtagttgtttgtgttagtgatcgttaccgcttctcgaggttcatgcttaagagctggttgtggttcttgagctttggaaagtgaagcaaaatactttgtggttcctctcgctatccggggcagaattctctttgatgttactggacgtcgaggaactacattagtttgcttgaaacatgtagtcatctcggtgttgatttgttaattgtgtcatgcaatgttttaatgtagtttttgtgttatcatctggtctttgggaaagattaatgtcctgatattcccagtagacttgttccttggaagctacttcctctgtttcacaatgtaagactttctagcattgcccacattcatttagatgttaatgaatctagacatatgtatgtgtttagattcattaacatctaaatgtatatggataatgctagaaagtcttacattgtgaaacggagggagtactatcatgttgtattatcatacataggcttcccttttcttgcgcccctggaaatattatcatacataggcttcccttttcttgcgcccctggagatttcccatgggacatggtacttcatggcttttttactttcatgccatcttaccatgttcatttgacggtgattagccctaacagacctgtaatgattcttgcggatacgatcgcttgatcaaagaacatctaagggactgagtaatagtatgctttgtatttccatctttggtcattggttttaatggatgatctttatttattcgaagcttgtgaattactgcatggcaacagtgatgagtccttacagacctgtaatgattcttgcgggaatgatcgcttgattcaaagaacatctaagggactgagttatcatgaagcttgtcaaacacattttgtattatgtgcttgtccattagataatctttgctcccatctcttctcttgatttgtctttcatcctttgcttgttaatgctgaagtaaaaaggcttaatttaacacttcttatttcaatcctgctgagcatttctgtgtactttcaattgtttcctattgtacttgtcttgtttctgttggttcttacagtgggacatctcaatttttgcagccgtaccttccagagatttgctgtgaggaccaacaagtctcttgagaatctatcgtccaaaggtagtttgcttagcctctgcagtgattatagtatatactggtcatgatagggttaatctatgtgttatgacctcgtgatattctggtgaattgttgcggaacattacaataatgttaccgatttgtgcttttcagctaaagaagtgagggaggagctatcggagcaatggaggaattctcgtggcaatgatgatgtaagtggttcgcatagagctttatactgtttcatattccatcaagtgctgtatctgatcaaattctgttttgcaggggctgcaggaat

SEQ ID NO: 18239 - DNA, 14882 bp, Oryza sativa
ggcaaaattcaaattatcaaacaagcttacataatacagtaatttacagacagaagtgtgatcggtcaaaattcaaaaagctaaggaagatccacactaaggcaattttgtgatgtaaagattgttgttaaagcgtcaatataatctacaaaatggagtacttcaaatataatcaacaggaaacatctttgaggaccatacaaatatatagttttgcgacgggaaagctggcatcacacaaatatatgtgaatgacaagctatggaacagacatgattctaccaaaagctcatgtctttaaataaatcagcacaactttgaggagctacctggaaacaagtccacatagtgatacttgaactgagtgcaatggcactttcactcttaaagattgcctaggttctccggttgccacacacggaggagtcgatcataaaatgaacaggtagcaacaactgaaaaattcttgttctgttctgcaccttcatttatctgccaatccgcaccatatgctaaggactcatgcttgcaatatgtttccactactgcagcatccccagtacctactttaacaatggcaaacccattgtgcatgcatgcagccaagacaacatctgcaataagaggatgatatttaatcctccatacaccaccccctaaatttagggacttcacattaacgggtttcaccattgatcttatgtcccaaactctgagaaattcatcatagcttccagtaagtagcatgttcccctctagtggattctgagcaatgcaacagacacccatattatgcgactttttgttctgaaacacagcatttgatgggttctgtcgcaagtcccagcagctgaaggagcagtcgtctgatccgctgtataacaagtgtggatttgcacgatcaaaatagcaagtccacacttcatactgatgagcagtccactgttctgatacctccaagcggtcctccctcatggaaaccacagacagggaaccatccgataatccaacggaaagtgccttggcagtttggttccagtccacaaacaagcacatcgaagaagaaatgtctccagaacagacatccctgagaacagcacctgcataattcggtcacataaagcacttgaattcagcctcaacatataagaaatacatggtggactacaaatatgacaaatactgaggtgtttacaaatagctacacaagctcccctgcttccagtacagaatcaactagactatcgtggcaatttaactaaaaaatcaagaccaaatttgatccagaaatgcaagaatacgaattgacttagaacatcattcagcagcatattgccttattctcaaaagaagatgacagacacggatcacctccagaagggcagaatattgcatagttgaagcaacttcttgttaatccagattaaccactgggaacacatccactcaatccatgagagtaagaaacccatttcaccaaccccccccccaaaaaaaaaaaaaagcataacccctgaacccctaaatacttctgcaagcatcaggcaacattcacatggatgatagaacgctttcagaatcctaagaacttgaatttgcctttggcatcagtagcagtgcatcactatgttcagtaaataattcatggaagcttagtaagtggatagtgatccaattttgacacagcagacaacttatttgattctatggtaatgcaaatgcaggaacaaacagcacctttgtccgatccgtcctcctgctccaggcgccagagcgcgaggcggccgtgggcgtcggcctgcgcgagcagaggcgccacggggctccacttcatgtcgaacaccccggcggtctccaccgtgtggagcagccggagcctccggggcgcgtcctcctcgccggcgtcgacggcgaagagcgacacgctgcccgcgcggtcctgccgctccccgccctgctcctgcagcgtgtaggtggcggcggcaacgacctggcggaaggggccgtgcaggcataactccaccgattcagttttgccgccgaagtagcacgaccccaaatccatcgccctggaaaaaccctcgcgttccgcacgacgcggttcgcggcggcggcggcggcggcgagagtcgagagcgctttcacttccgcggcgaggcggcggcggcgggggcaaaatagtcaaacacttagtccataccggtcactatatacctatcctgactggggacgtggcggacacccatggccaccctagccgccgcgatttcggcgggccccgcggcgcccgcccccgccgctcgccgccgccgccgccgcgggttcgccgccgtgagctgcggctcgtcctccgcggccgacgagcggcaggccctcttcagccgcatcgcccccgtctacgaccatgtccgttacctcccactcctcctccccttctcgcaaaattttgaattccactggagatatgtatactaccagcagcatcgtactgacgacgggcgcagtgccgtgttccttgtagctgaacgacgtgctcagcctcggacagcaccggacatggaagcgcatctgcgtgtcttggtccaggtacgccactagtggcagcatgcatatactcttgttctgcaattggttgatggaaaaggttgaattattgtggtcagggcaaggagaggggatcgtgttcttgatctctgctgcgggagtggggatttggcattccttctgtctcagaaggttggcttggatggacaggttggtgttggatttgcttggctgctttagatttcagaaagaaaaaaaaatcgacttgaatgttctagcccaagctctcatattttacaggtgatggctgttgatttctcaagtcagcagctgcaaacggctgctagccgtcaggatcaacgctggaagccttgctacaagaacatcaagtgagcatcctcaatgtgagagtttgtagattaagaacaacctgtgatatgtagttttgtgattgctgttaatgaagtggacaggtcgtgcgcgtggctgacagatgcgtgctttggacctctatggttgcaggtggatcgaaggcgatgcacttgatttgcctttcacagactgctacttcgatgctgttacggttggttatgggttacgcaatgtggttgacaaacccaaagcaatgcgggagatatttagggtcctaaaaccaggtctagtgcagattccaaagtttttttctggttgatcatgcttatacagttcagcagaaattttcatgattgggtttcgctggactgcaggatcaagagcatctattctagattttaacaagagctcatcacttttcacaacgtcattgcaggtaaaatatcagaccatctatagtacacgcaagtttggcttgtgtttgagatcaaagagaaagataacttcctgattattgcactatgacaatgtaacaacatcacggtctcacggatggatcatgcgttgacttccagtgtcaatgactttgggttggtcctataattccctaaccaaattgatgttttcccttggacagagttggatgatcgataacgttgtggttcctttagctagtggctatggactcactgaagaatacaagtacctgaaaagttcaatattacactatctaacaggtttgcatttatatttcctttgtgagaaaattcccttgaagaacaagatggtcacatgttttaccactttttaagcaatactcgagtaaaacaaaaaaaaattataactttagaaaaacaaaaaagtaatgacacaacttacatttgtcattctgatagtagcagtacttcaacacacttctcaattaatcctgatggagtacagtaggaatcccttttttttcgctcacaaggccacgcatctaaagattcaattcatttttatatgagaagctgcattcttatattccaaacagtccattggtcaatgccctttcatcagcgaccaaagttatctctcatgtatttaccttaatttatttgtgctggtttacgtccattgtagaaaaggagctggaggagttagctaaagaagctggcttttctgcagccaagcattatgaacttggtggaggtctcatgggagacttagttgcaactcgctgagtagaatggttgtgaagaacctgatctgtacaacttacctgaattttgtagctgcttcattccttttccctctacatcatctgatagttatgttccgctgatccaacagggatcatgcatcaaaaactcaaaactttcgtgatgtatatttcctttcttctttaataaaaaaggacaattgtaaccacctgaaaaaatcaataacctgcaattcatgatagtgcaggagcggttcgatcaaaatcagacgattgagatgaaatccggtaccgtgcataccagcgacctggcaacatttgagctatctgactggaaatcagccagttcaatcaacgatccggttatcggaggcatgaaagcaggtgagaatctcaagccctcaacccaaaggatctccatagtgtgcattgccctgatttcagaatcctctgtctgatgattaatcggtccctattggcgacagaccagatgtgcactcgtatttatgggcagagtttttaatcactcgtcagactctttacccacttcgctgcacaacgggacaagtattctgtagggtcgttataactgagctcaacgaaccagccaccaaaatgttcgcaatataaattctagcaacgaagttttactgagctattacaaacaaattctccacctgataaccgaggagaaaacacatgccttaaacccccactatccaataagtacccttgcaacattaacaaaacacaacccactgtaggctcttaattcacccattacttacttactttcacccctaaaccagattcaccatcactttcacctaaaccagaaaaatcaaagaaggtagagagaaaacttcaaaacttgaaccagcactattaagcacatacagccagccacacattgtaatgtagtagtaaatatgatgtactctctgggcaaagtagtagtgtcctgtgaatgcctgatgagatcgatcaattcctcctctcgtccatggcgaggatggtgctgaggttcatggggctgatgtggtcggtggagccgtgcatgatctgcgcgacgatgagccggttcgcccgctccgtcgggtggaacgcgtcccagtacgcgtacacgtcccggttcgcgcacacgttggacgccggcgtgcacagcccgataccgttgtacggcccctgcccgcagcacgccaccttcgccgtcacaaaccctgcaaacccccacaaacacatcaaaatcatctacatggatcttccgtctgtctcagaaaaaaaccaacttctaaaaacgacttctgttcagattcatctctgaatttttgttcttggttggtaattggttaccgtagtcctgggggttgaacatgaagtcgaagctgatcttgttggtgttggcggcgatgaagacgtggccgccgagctcggagttgagctcggcgagcatgcgctccagctgcgggttgaagaggtcggcggcgcgcgtcaggtcggtggcgcactcgccgtcgatgctgtgcatggccagctccgccggcacgcacccgatcatcccggtgcccgtcacgatcacccgacgcggacccagatcgtgcagcctctgcatgcaccaccatatacacggacgcagtcatgtcatttttcctttcaagacgaaggacacaaatacaatttacatgtacacgaagctgcgagcactgcacgtctgcacgagtggcaactggcactgtcgttgcatgtggcatgagtaaattttggcacgatggcctcgcgggtacacgagtgagtaaatgcgatgacacaacaagccccctctacgatgactgcatcctgcttgtttttttttacagcgttaattgtcctacttggcatattcattgcctctgcagagtgaaggtgtggtaggtgacacagcatgcatacatccacccgaacggcgacgaggaggaacagtcggtcagacagagtactgtcaccgactcaccgtacggtaaaacttgggtgctagatgtactgctacctcctacctcttgaaattatttggtgggaagccgatctagtagtagtaaatgtttaggcctattggcattgaaccccatagatcatagtaataagctattcataaatcatacagtaactcaagagtgtgaaggaatgtgtagatctgaagcagagagatctgatacagtgacttgcccattttcatttactggcttactgctccttgtaatgaaaatcttgtacttctgataatgcaaggcgtgaagcctttttcgcattacactgtacttatattgcttgtcagacatgttaattgtttgttgcagttcgagctcttaatttaatgatgctaaagttagcataatgtcctaactggaagtatttttacaggtattttaaatagtcgctacaatcaatctataccgttcatattttctaatctaacgatcatatatatttacgatgtgccttaactactagtagaacagtaaatcataaattaacggttgatgatgatacaggtattggtatacggagtacattactactaccagaccacccatacttctattttcttcctttgcagtggacaggaggatgaagatgggggcttactgacactgactgcaaatagtgtgagatgaactgcataatgtattcggcttattgttttcaacaggaactttctcaggttgatacagaaaaaattacaggtcatgtcattgacaacatattacccaaaagagactccacaccaggatatgttcactctgcaggctgcagcctgcactttctatctattgtttgcagtgccaacagttaacatgcagcattgttttctactactgcttttatgcaagtgagttatgctcatctgcttcgatcggctgagtctctactgaaatgctaatcgtaaatttgccaaattctacctttggtgataacacggaagttaattgaggctacttattattctctagagcaagaagaaacttggaatcgatgagatgagactaaccgtgaggatcttcctgtactcggagatgaggtaggggacgtaatcctggatggcgaactgtcgggacctgacggagaatggcaccaggtagtagttgttgacgaagtcgttgccgccgagcgtgatgagcacgagcgactgctgcaccacctgcctcgccgcgtcctcgccgacgaacgccgccagattccgctggtagttctcgaagttgtccagctgctgaccgatcctaattatgttcacctgcacccacagcaaaacacaacgttaatgcgcatttgttcgtgacgaaaatggtggcggatgcgcgcgcgggggggcttacgaactggatgccggtgtcgttgaggatgccgacgccggcggaggcgaagttggcgccgacgagaaggttctcgcctcggaggtccgggctcaggtacggcagagcaggctgggacccgaggtactcgcctgagcccaaaaaaaaaatgcagcgtgtcaagaacagttgtaactaactttgtgcattgcattgtgtttctttttacaagtgacagtgatggataaggtgctaactgatgatgtccgggatgttgagcccgtttgagaatctccccgtgggcatgtgcgtcgggaagtcgatcccgtacggcggcgcgtccgcgcgcgccgtcgtcatgaggtagttgttgttgccgttgtccacgagcgagtccccgaacacgaagaacgccctcggcgccgccgccgccggcgtcgcggcggccacgagcagcgccgccaccgccgccatgaggaatccaaccaaagaagaagcgcccatcgcgcgcgtacgtcggcgagactcgcgacagcagctgagagtatacacttggggctagctgactggcagttggacagtgggcgacacgacggtggatgtatggacggcgcgagggtggcggcgttcacgttctcgcttgcgatctctcttatagagggaggccgcattcgcgttcgcaattcgcatcgatgtctcgcgccacgccaccttaagacgcgcagttaaggcgtgagcagtgagttagcggggcgcgggacacggaaagcaattgcgcgcgaggaccaccacaccacacacccctcttctctctcgcgcgcgcgcgcctgaccaagcacgcaagctagttgtttttgctgctgcacgccgcagatgcagggtggttggatgctaaatgcggcgcttcgcgttgcgtccccgcgtacgcatctcgccctcggaggccacttggctggcccggccctgccctgccctgccttgctgtgcctcggatcatgtgcatgcacgagaaagagatggagatcgatcgaaggggaaagaacgctgcgagctcgctgttgctacctaccaccagaattgcattgctccccagacttgaaagctagtgaacccggcagtacaggaactgaatcctcttccggccgggatgcattgtgcgtgtatagtcatcgtcaattattcagttcgttccagatggagcaggggggcatgcgcagctgtgcgtcttaatttgtttctcattgaattcgcctttttggtggtgtctccataggaggagaagatgtgtttttgcaatcacgagtgagagcgacgcgtgttaggatggagattagtgtcatctggattaattggtatatatcgatcgatgatcgatcatttatggttggtctcacgattaatgcggtcgatcctctgctgttcctgaaagtagaacagtgtgggacatggagcgcggacatcttaatgaagaatccaataagagaaaatccgtagctgaaactaagttaactaactcccgctcaattcaaatcgggtacgagaagcagcacagtgacaagatttaaacctcaaaatcggtcgtcttcctttaatttgggatgcgtgataaacaacagtaatctgattctgctactcaaggcaagctaatttgattttccaacaaacgtactaattcagagtttcagactcagcgcgctagctcctctttccgctttctagacagagttttgaagcgagctctctcacggacaaaagtcgcaaccatgcatggattctacaccgaagatttcaatacgccatattgtttttcatcctcttgggctatctcagtcctcctaactagtaactactcgtacctgcaactcgtgagaggttggcgagttaataatgtaattaaatcccctgaacatatactgcacttaccttccatcagaaaaacattgacatgtcataattcagctgacagctgggatagatagatgtacatatatcatatatgtatggtccataccgaagggagtttaccacttacctagctagccatttcatttgccttgcggccatgcccttaccacacttaattaccagttaccagtaacgaaacaaattgactctgacaggtacatgtatacgcattccatgtaaattcagagtgacaattgtgatgtatagatgtatacgtattccatgtaaattcagagcgacagttgcgatgtatagtgcacatggccgtatatacagtatacacacggagcatcatatgtatcgcggccgtatactgcgtcgtaccgtacgtatagacggccagctttcatttattgtacttgatccagtacgtattgcgcatgcatgcatgcatgcatgcgcgtagcagaggggacgccacgccatgtgagattcattaagcggtggggtagaaatcatcgatcaatcaatgtgtgccaccacccatagctaataccgcctactagtcgcacgctcgtacggcgagtgagataaaatctcgaggcgtaattgcgcagcgctgtaaaaagatattcgccggccggcgattcgtcctatgtactccatcttctgcaaatcgtacaggctttgcagcgaagtactcctacttactgatctgccagatcgggctgtaagaacgcattttggggtagagcctcctctattcttaactttccatcacatcatattacataaaaaaaacttttctacacacataaacttttttttttttttacaaactcccaactttcttcaaacttccaacttttttagaaactaaacacacccagagtattactccatgatctaccaattgtgatgtaatcgagttgtatttctcgacttcaaacttcaaacttctttgttttctgttaacacgcttattaaactgttatatgatattttttataaaaattatatataagttatttaaaaaattcaaataaactcatttttaagtttataattattaatacttaattaattaattatgtgtaaatgagatttcttgttttgcatgcacaaaaaatctatctcaaaacatagagatcgaacgctcaccagcagctatcaaactcgcgtcgtatgtatatataggagcgtattcagtggcatgcatgttccagttccggttctctctgtgtacgtaggtgtgttctgaaatttcatattcagcgttgtatatatgtactactcgatcgagcttcatcgagctgtgcgagttcaggaaagaagcagttcaggaatttaggcacagctcgtcgatcgagctgtgcgagttccaccaggaaagccatacacaccgatacatgcatgcacctatcaagcagcttcacatctagaccatgcagttaattgtacagtactcaccatgagtactacagtaaaattgtggagaggagggggacaaggtaaaacccgatcggtcgttggctgattggctctctgctgttctagctaccatctgtaactgtaaaggctaaagcgagcatttactcgtaacagctggctcccgtggactgatacacatgtacttggtctgcagatcggctggcgaatggcgatccatctgcaagctactgacgtacaattactctcccatctcgcgaacgccgaacggccggccatcaagggtgtgtttagatcacgctaaaattaaaagtttggttaaaattgacacgatacgatggaaaagttaaaagtttatgtgagtagatcgagcagccgcagaagttcctgctgacactcctcgcgatcgaccggctggtctctctcgagtctcgacaattcacacgacagggcaatgcaggtcgacgaggccggcttagcggccgtgaaaactgaaattactcacagatcgatcgatctcgccgcggccggccgtacggagcggcgcccgaagattccaatctcttccggccgtcccggtggtctcgctgtgccagagtacctgctgtaacaacagtgagttcataaatcataacgcgctgtaacacaaacagtgagatcagttcgtattaactgctcgatcatatcgtgttctctcgatccagatcggtccagctccgctcctcattggatcgatcgagcgactggctgctaggctcttcatggtacgcatatacatatatgcatgtgccgtttgatccgaagcactgcaggcacgcacttgtgttttaactatctcttcttctcgatcgggaccagctttaaaacgacgctgcagtgctttaactgtgtgcagttaactgtgtagatgtgttctacatgatgatgtcgcgttccgttttctgaactgaacctcctgagtcctgagcaaacactcgacgggaagatccagacttgcagagctcgacgaacgatcgacgacgacgcatgcgtgcgtctggttaggtgaccgttcggctgtgggccgtgacgggacacgcacgcgctatctgggctgagccttcggcgtgtacggacatgccgggtagcttatgggccgtcccggtatggtccatttctgtccattaataggcttgccagatgatttcatggcgggccgaacggaggccgcctgtctcgccaaaaacggcccagatgagcgccggtcagcatcgcagccatatgacatcgagacatacttcgtggaacaaaccttttgtggaataaaccaacctattacgagatgtgataggagatataaaaggacgtgacattagatatcacattccgtattagatttatttgttttgagacaagagaatatgagatatagatataggagggatgggcccacataatttttaaatttattcgataactagctgccacgtgaacaaccatgtcgactaaaatcactctcaaagcagtttcttgtgagtggtgatatacccaattttacagctgagtggtatgaatcatattcaaccaatataggagggagtcaaaatgctttctccagtccattagtatgcgagaaagtctattttgacttgctcgtctcgtgcttctgattaaatcgcgttcatcaaccacaaaaatggataaagcgcatccctatttttcaaaatccggttcaaattgaatcctccaatgatctgagaacctgttttcgctgacgtgataggttgatcatgattgactcgctgagtcagcaagtagaacctatctgtcgacgacttctcctcgtctcatcttcttcatcgcctctctctctctctctctcgctactacctcaagggtggcatcttgaggagggcagtcgtgctaagcctcgtcgtcccgtacattctcgggatcaagtcatacatcatgctttcacgccccgcggtggtcgagcctggctaagcccgacgaccagcagcagcagacccttctttgtccccgtcaagtgatggccacggaaatgacggaagaaccccacttactccctctgtcccacaataaacgcagccgtgggtttcagtgtccaactttgaccatccatcttatttaaaataattttatgattattatttttgtgttttattggatgataaaatatgaatagtactttataagggactgaacttttaaaattttttaaataagacgacggtcaaacgttgagcatgaaaacttatgggtgcacttaatgggacgaagggagtacctctgttgtgagtgtcgtctccttgcgtggggaatcctcggcggcagcgagcctgggatgtggccgccgcttcttccccatgacgcgcggtgcgacacgtacaaccgcgttgtcgccaacacatggttttggttctgccccttctgcagctccctgtccggctatcgacgctccgcacgtcgcttgatgggacccgagatgcgcgaggaggtcttacagcaggcaatccgacagatcactgagttggtcctcctccacggcggccccgtcactgtctctaccgccttcgtcgatgcgggtgcgtgggtcccataatacatatatgatatgcctttctgtggccacaagaggagggtagggctccagctcttcaccaccgtcgctctccctgcatgcctctgctgctgctattggaacgttggatggaggaagaagattagatgagaaggaaccgcttcccaaaccaccaaaagagtcaatttacaccggtttgcaagatgagaaagacgttataactggttttacggttgagccaagggattcgaacaagacgtgaaggaggaaaaacagacttattccttaatatgcgtgctacatgactacgtgacggggcaattggaggccgaaaacgaacacgaggcagccagctcaggctcggcatgtctcgccaaaacgacccacgttaacctttaggccgaatttcgtggtgattgaaattgagacacaacttcgtgcctccgtgaaattggactattaaatagcctttaagcccaacaatggccattaaaatcagaggtccatttattcgtgggccacaacaaggcccaaatcgctgctaaatagctgctgatgggccgttccaatttggtcaattgatcgatttgagttgagtccaccgagagctaacaatgtttacgtcacattagctttcttcggtaatcttaatccaacatcttcagtactagtaccaatcgacttcttatgattgggttcatgctgttcagtgttcactacttgtcgatcgactcagcccgggctttcatttgtagccaactagccatgaaaatgtgctggtctcaaacctttttactactactccataagtatgagatgaggtaaatgattggagttgaagaccaggcctagaaagagcgtgcgagaacggacgatcgccttcagaattctgatgctgcccgtcctctgagatctgccacccgctgcactcccgcatctgtctgtctctccacacgacacccccgtttgagctctggagctcttaccctgacagtttcctatgattttttttattataaagaaagccattactgtctactactccgagttgaacctttgcaaaaacagatcacgcctcgtctctttcctactcagcagtactcaaccttttccttgtgaatcatcagagaaaacgctgcggccatagctgcagtgctgcacctgcgtgcactggtccatccatgcatggcggctgaacactgaagtccagccagcgacgccgatgctgagagagtgagagcatgtgtgcctctccaggctagtccagactggtgtgacctcgtggggtaaaagcaagcagatggtcagtaataaaaggagagatcaagattggatggatcatgggtctcgcggatggcgtgcgacagcacgagtgccccactgttttttttgcaaaagcgagccgataaaaaatgatggcttcagtacgtaatcattgtcagttaaaccatcgagagccaacctgtacctgcgatcccttgaagcatcggtaagctaccttaat

SEQ ID NO: 18240 - DNA, 2422 bp, Oryza sativa
ctgcagcccccttgaagcatcggtaagctaccttaattcagattaggacaatgcagtgtaaatgtgtaattaactgaattttcaatactgtttttagtagcttactgaactgagaccgctgactttgcatcagtgcaacacaaaatttatttagtactggatgtttcagactttcaggtttggatacgtggaattaatttcagggtctcccatttgtttcggcctttctgggaagcgaagtgatcgaaatgaatgcagcgtgcgtgtcctactgcttagcttagagatcaggataagattagctgggatgtaacatctcgccgtagctgttgcttgccagtactgtaggcgggctcgtctgctgaaatagctgcatttttcgacctgatttggtgatacgtagtacgtgcttccagctcctgttgaattcaaccaagaattcgcgttaggtgattggtagtaatagtagtactttggtgacggattaaaccaaaccagggattggcgacgaggcaacatcatcacggcaatacgaaacgattttggcactgtttgattgcgacactctgtcatgtcttgtactcttgtatgcttaagaacggccagttcggacagtagtaccagtactcctgtatcgacgctttagccataacaaaactacactttcaaataggggacacaaattttgtccgctgctcaaattatggccaaaattcgtatctgccgcggatatttgaggcaagctcgtagcggggcccactgctcatggagtccagttcacacctcaaaaggctttgcaaccaagaggggcctaaaagcgagaggttacgaaaaaccaggggtgtaaatgcacaaaagccacctaaagcccccccaaccaccctggcattcgtgtctcgctgcgcttacactccccttctccttcctccagatccggccactcccctcccctccccctcctcgactcgcctcgccgctcgcctccgggctcgaaaccctaggtttggtcgctcggggtgtagtgggtgggggcgggggggaaatggaggcggcgctggaggcggcgcgcgccaaggacacgaaggagcggctggccggggtggagcggctgcacgaggcgctggacgcggcggcgcggcagcgcgggctgacggcgggggaggtgacggcgctggtggacacctgcatggatctgatacgggacgccaacttccgggtcgcgcagggcggcctgcaggcgctctccgccgccgccgtcgtcgccggggaccactttaagatccacctgaacgcgctcgtcccggccgccgtcgagcgcctcggggacggcaagcagcccgtccgcgaggccgcccggcagctcctcatcaccctcatggaggtccgctcctgttgcttgcaatctcattggttgtttttttttcgttctgtttgggagctggatggagctgcaaatacgagttagtgttagataaggagcaggcttggcatcttgtgggcttgtttttgagtagttcgattcgtttattggggatgttgagctgcacagccgaacttaaatgagaaaactaaaattgtccggcacattacaataaattgataggccctaataccaaaattgatcaaaacactaaatatgattttcagggagcacttgtttaccgggtttgatgttaaaatgtgggatacaagtgaactttgaaacttcttccatgcatgtagtggcttgacctttattcggagcagatgatttaactttcaaatactcatattcaaagatatttcttttgcccttttgtgctgatatatatatattttttggtgttatagtgtaaatatatgatagcttttctcttttacttgtcaatgttgatttatatatactaaacgtgctatcatttttagacctttttttttttttacttttctacattcatcctatgatttgaaaggaccaatccaaacatgtttgtcttattatcagggttttggattattggcagctaaccttttaatctatctgtatctcaggtttcttcgccgacaatcatagttgaaagagctggaagttatgcatggactcacaagagttggagggtccgggaagagtttgtacgtacagtggcaaccgcggttgggctttttgcttcaaccgagctcccattgcaacgagttcttctttcacctgtaagtctaggcttcatttagtaatttctcctgtggagagctcctactttatttctttaatagatgggcttgctaagattttctggctttccaggtcttgcaattgatgaatgattcaaatcaaagtgttcgagatgctgctatctattgcattgaggtcagctgacgtcaaactaaatgattcagctaatgcttttcatatttttctacttatctagctctcaggggctgcagg

SEQ ID NO: 18241 - DNA, 5286 bp, Oryza sativa
aaattacacatatagatatagtcttaaaaataactaattacacatattgcgactaatttgcgagacaaatcttttaagtctaattgcttcatgatttgacaatataatgctacattaaacatttactaatgatagattaattaagcttaataaattcgtcacgcgatttactgacggattctgcaattagtttttttattagtgtccaaacaccaaatgtgacactatatataatatctgatgtgacacatcaaaactttacaccgctatatggctgtatctaaacaccccctcaattgatcatgatatctttgaaaacctagcctcatatgagtagtaccattatgacattatttttgcatgagcaggcagcctggcacgcctggaaatggctcatgagtcatgactaacctgtgtgtcatgctgctacacacgaaagctgccggttcagggttacatagattgccggtttgcggacgctctctcggctcgtcagaaatgtcaggcatctcacctgtggagtctgcctcgcaagttcagctttacgtaaatctacaaacagtgagccacgtcacatgtgcctcagtccctcagtgacccggcctagtgtaattagtgaaacctatattacctaaaagactttagacagcttgatcatcctaaacttttcttttgacattttaaatactactccctgcttaggagaagctcgtccaactatccaagcactcgctagtgcttaggttcaaattttactcggagaaatatggacaattgtaggcaaacgcaagtactaggaaaggaatatctctttcacgggaggacgagacgttaaatcgtcggtattcgtggtgcagaggtaccagaatctgtcatcgtcgtacatccgccggaacgatggacgtttcttggcaagttaacccggggcggtgagaaattccttctgatcgtatctccccaaacaccaacacgccccctccccgtgccgcgcaccgacagcgtccacgcgtggaaaagaacaagagaagacgagcagcgcagcggcgaggcgacggagaggcacgtgacgagacaccgcgaggagtatagtaccccctgcaccagcagcccacaggcaggcaggcatgcggccgcagcgcatgcaggcagcgtggtcgatctgcccaacctgtcgcggtgtcgctcggctcgccgggccggcgtccgcttccgcgtccgcgtcatcagcctcagcgcgcgtaaaaaaacaccagaattcgccgtgcgcccgtgtgctcgtgcagctgtggtggtgtgccgcgcgggttggctaccggcgagggagctgggacctgggaggcggggggtggatggggatctcgatgagcggggagtacgtacggctccggcctaactcgcccgtttgctcgcagccacacttgggcgtacgacgtccgcgggaccgcgcgaccgctgcctgcatggctggctgttctcatgctgtgcagtgcacgctgtacagtgctaaccgcgggcgggcacagaccccagacaggcgcgcagtggcgtcccgatcgaatatcgatcgcccgagcccccacacctcccgtgaacgcaccacaccaaagctgaggccagaggccagagccgagggtaggacgaaaaccaaacaaacgcccgttgaggcccgtctgatcaacggtgtaatcgcttgcaatgtgtcaaaactcgaaagggagggtgcaacgagcgaagagttactgtaactgccggtccagagaaagcagtccgatggatcaatctgttcgcggtcaacgtgctttacgtcacgcctgtacgaacagttggtgcgttacgacttgactacggattaccgagatgcttgttttccaaagctccaataaataacggccgtgttattacgtgggacttttgaaattgaatctcggtttgccttccctgtcacaaaacagagaaacttcggttctcctccgtaaagaaaaccacgcgtacaagcgtacaacaaatgaataaatctctgcacatttacacggtactcctactccgtactactactacgactggaaggtagcagtgccacggattagccgaagaaagaaggaacacacatggcgtgttgtgcagccgccgctgcttcccgttcttttcagttcagttaattactcccccacttctcatcatcccatgtccactttctttcttttttttctctcttgcacgcacgcacgcacgcaacccacgcgcggagtggcggtggatggatggaacgcgtgactgcgtgagaaggtcaagagcaaacaagaacacgcacagtttcacgaaggcgggtcggggttaaatcatcccaccaacaccaaccaaaccaaccaaccaacctccccacaccgccgccgtcgcgtagcgcccgcccacccccgcgctcgccgccggcgggcgaacgctcgccatccgcccgcatcgccataggtgcgcgcctcccgattcccatccttttttctctctcccaccattcccggaattaatgcacggatgatggatgagttgcgtgcctcctatccgatgtttttcgtttttcttgccttctccgttagatcttcctcttttcatttcttctcgtttcagctccgctccgcaaaaccctgatgatggttgtcctcgaccacccattgcgtgcggcatttgatccgggcgattttttctttccttttttttttctttaggcgaggtggtgtgtgttcgtggaaatcccggtggccgtgcgggaggggcgcgcgtgaagatctgagctcgggtttatgtgatatccctcggaccgaaattcccatcgatgatggcgtaaaggcggcgccttttctctgcagttcctcccctcccgtccctttccgctcccgcgcccgagaatttattgctcgcaatgctgccctctctgatgatgagcagagcaaaggatgcagagcctttacactttaaatgcttggtcggtttggctgcaagatgccatattgccatctcatgcgtaccaccgccatccgtccgtcactgagctcctgcttgcgtagtgacgagcgttctggtttcgctcagctcgtctcgatttcacacggattggaattcggccgcattccgcgtggaaagcttcgagttcttggtgcttcttgttctccgctgcgaaaaccgcagctttagtaagagctcatcagatttcctcttttattttttttattttttctgtcttttgctttcggtttcagggatcgtttggggttcagggcgtacgttacgtctcgttcttctcattcctttctacgttgtcgttatacttctcctcctctccccctgctaatctgccatcaggaatacctggcgtcctcttcttttcattctaccgatgttctgatgaaaactgcaagattccctttgaggtccagcccgtacgatctcgttgctctggatagttttctattatatgtttcttattttgttcttttgaattctgaattcttgaaactagatgagcttgaagttaacagctcgaattttgatttccatggagtagaaagccgtgcttctttggccttctctctcctgccagctgtggagctgtgcacttgttttgttcatgatagctgaactatctgactgaggaaagtgcagcctttaaaagcctttgttactgcaaagattccttttgatggtaatcatggatttgtaatcctctccatccaattggaatagtgcatctgcttttatgtttacctcctgttggctgctactataccacattctactttttcatcttgcctggtgttgctcagtccccatcgtatcttttcgtcggacgtgccattctccttttcttttggttttaaatagaacagggccatgaactgtactctccttgcatcaaattgggcctactaatgcctgcaaaaatccagcctttgcatgtgtgtgttgatgttttcctggaaggacagcatcttgctacagtgtacagtaaattagtaagctcgtctgaccttatatggcccatacccacagtttcaaatttaagggttcaatactgagggctttgcaagagagcattatatgctttgctgcactaggttgttcgctcgccagtttcttaccagctacctgtaattctattgtgatttaattggctacatcagcttttggatcacgggtacaaggttggttttgtaatgttccatactcgctgttccatttgaatgaatttcttgtcataactgtcttttcaggattcatcaatgttgttatcctctgaggcttcctttgtaataagaaggcagtgatcaatttgtttgacctgagtaccgggatgaccagcaaaaatgtgctaactgatagaactcacagagatggtacaaaaatttcttccactttttctttgaagtgctgcttaagcaagtgatctgcaactcctgattttgctttttttcgccgggtcggcaactcctgattttgctttcataatgcatatgaatttatactttagagttacttgtgatagacgggctagatggcattggcattgtttgaataatgattcatttgcataatgttagatggtggtctccctttagacaatgtcatgtttgattgtttgtagatgatgacacatttgtcttttctttctggatgttttcctcttcttggattcgaaaataattcaaaagagctcttgctatttttgttgcaagacactgaccttaaaaatcaaactgactgtgttctttatttgttagtttgtattgatagacataagtgttttctgcctaatgttaattgttcagcttgcatctttcaggctctcgagttcataaaagccggcaagatgtcaatagaactgttgatcccaaaataggttgtgtagaggacaaattagtgagtatcatgtcatttgccctattctagcatatgtaatttcaatttatcgtaggtgtcagattgtccttctaaatatatatctggacagcacttacacaattttgtaaatttcagaaagtatgtcttcatttttttttctaatatagtattcattgcagcaggtagtagctagtactaggaattcttcaagcaacaaatcaaccatatctccaatgaacagattagtagcaatggagatgtccaaaggagtggaatcaaagaggaagccacctagtgtcgttgccagactaatggggcttgatgatgatctacctgctaaagaaccagcattacaatcttctagaagaaatttgcggagaagtcattcacttgata

SEQ ID NO: 18242 - DNA, 613 bp, Oryza sativa
gtgtcttattttcctcttctctttatgcctatatgcagatgaaacaagagttaaagagttcaaactcaagtcaatgtggaggagcccaaatggcaccatcaggaatattctaaatggttaatttttcaactcttgagatgtctttgatcttttatttacttggtgaaatgattctcgaactgaattgacatgcactctgtgaattttgttagtgggataaatttaaatttctagttaatgcttataataaaattttatggggtcaaaattgagattctggttgccttaatgttggaaattttacacacacatattttcatatgtactatacttcatcctaatgtggagtgtttaaatatacctgtagattctgacaagtagcaataacatgaaatttacttgaaatatacttattttagcacagatactgataatcctgagtagcaataatatgtcaggaactgcaacaatataaaaaatattctgtaccatgatcactaatgttcaccatgacatacaggaactgttttccgggagcccatcttgtgtaaaaatgtaccacggatactttctggtaaggaattattgaaatattgtcatgggaacaagtgac

SEQ ID NO: 18243 - DNA, 571 bp, Oryza sativa
atatatatatatatatatatatatatatatatatttcctttatatgataattgtcggtgatatgggcccgggggtatcaggtttagagggaggaggctgccccccgatgccacgtggccctccccggagaggagtcagacccgaggtggcgtggcggccactccttcccaaagactagtcggaggaggctgccccccgatgcacgtggccctcccccgagggggggagtcaggctcgaggtagggcggcggctactccttcccagagactggatggaggaggctgtcccccgatgccacgtggccctcccccgagggggagagtcaggcccgaggtagggtggcggccactccttcccagagactgtatggaggaggctgccccccgatgccacgtggccctcccccgaggggagtcaggcccgaggtggggcggcggccactccctggccgagactagagggagaaggctgctccaggcgtcacgtggccctccccctgagaggggatcgggcccgaggtcgggcggcggccgccccctctcgtgactaggggtcgggctcccccgaccc

SEQ ID NO: 18244 - DNA, 14981 bp, Oryza sativa
ttacactcacggaggcacaatgacaataggcccaccggccactcattctgtcatccaccgccactcatgttttcaaccagctagatgttacttacacctcaatttggccactatgttctgcaaactttgatggttcgtttaatttacctcttggcccttaatcttaacataaatcgtctaagttgaaaacaaagatcgtctagccatttctctgtgactaccagcggaagacatgacaagagagcaaaaatgtaggttagacaaggacctgcagagatattggggacagaacgtgctgagagctttctcctgtcagttcatcacttgtgatgcatgcactgaactctttaattagaagctaataatgtcagcaaggttgggtcttaattctaaaaataaaagaaaatcagaggaaaaaaaataacgtcagtacaaggtacaagttcaaagaactgcatgtgctccagtattaattattcctttgtatgattcattaagattgtacgacagagggaggacaccatcgttgtattgcacaggaggaagtggagactggaaagtaggagagccatgcatatatggcaatttggaaaccctggagctcagctcgcagcctcaccgtgtgacctcatgatgcttatcatactggtcatgtatacttaattaagctccaattattacgaaactgatctaatgcatgcaacccttatcccccaccctaataaacatattaaagcctgagattagcagccttaagaaatactgctgcaacagccacatgagtccaaagaggtgacaaaaaaaaaactaactccaattccataaagtgagataccatttcggcatttcccaatatggcaagctgcaaatctttgtagagaagaggcgtataaaatactcaccagcgagcgaatcgagctgcgtctccaccctgctgaagaactccgcggcttccaggatcggccgctccagctcctccctgtacctcgtcagcatgctgcagtacgcgtcctgtgatgacaagatcagatcccatgtcgatcgatcagaagaacagtggatatatatgtgtgtgtgtctgtctatatatatgcacgcatgcgagcaaaggagttgatgatctatatatgttgataccatgaactgatcgagctgatccgggtcgtcatcacgctgtggctcgtgccggcgacgagggtggccgtcggcttcgtccagctgctgcgccgccggcacagccgtgagcttggtcagtacatccggcggcgccccgacctgataaaaaaaccaacaaaatcaacttggtcagtacatccggcacggccgtgagcttggtcagcacatggcgtgttgtcgtctgtatctgcatgggtttaaatatatgcatctgctagcttagctactacacctttttgcagcctaagtaggcggctaggagagccgagtactgtggatgcgacatgatctcggccttgaccgccgcctccgcgcctgccggcgagacctgtccctgcacagctgctgctgctgcttcgccgccaccgccgccgtggtgatgcccatcatgcccatgctgccgcgccgacgactccgggccggcgagcagctggtacagcaacgggggcggcgagatgtggtccgggttctccggcgagatcagctccggcaaccgagctgtggtgctgctgctgccacctcctgcgagactggcgaagctctccatggccgacaggacaggtgaggtgaagaagaggcgatagatagtagttatggcaaacaaaccctagcaaagaaaaggaggagatgatctcctgaaatgaggtggtggtggttgagatggatggatgcagggaatgtgaagaggagaggaagctagaaagaagatgaatatgatggtactcctcctagtatacgtatggcccatcttagctttgttctaacgtcaaaatcagagcgagaaattaatgaagaggttaggctattcagtgtttgcaagcagcagcagcagcagcaacagtgaaactactgcaaaacacatgagaaaggagggaataattatactcctgggctaaagcgtagacagagcaatgacggcgaataaaaacagacggggggaaaaaggatctggacaacgtaacagcggcaggcgcagctgatacacatggcacatgcacctctcgtgtgggatgtttcctctcttctcttctcattcgaatactgttcgttttcagacagaaaacagagatattcatatgctggccagtattacgccgcagctcctttcgtctccaggtcgatcggcatgaagcagcagcagtactaagtactactacctccgtcccaaaataagtgcagttgtggatatccgtgcccaacgtttgaccgttcgtcttatttgaaaattttgtgaaaaatttaaaaatatttagtcacacataaagtactatttatgttttatcatctaatagtaataaaaatactaataaaaaaatttcaaataagacgaacggttaatacaaaactgcacttattttgggatggagggagggagttcgtatagcagcgtttgcagtacaaggcgtctcatgaacagcaacaggacagtggacgggacgtacgagagagctacagtctacagcagttgtgtgttagttccatgcgttgagcggtcgaggtccttaacttcttttcactaagatggaaagattctgggaaaagtaatgtgatggaactgtgcatcgatgtggccactctatattctatatagctagagatatctcctaacctcagatatcatatcagaaattcatctgtttagtactacctagtacatcgtcgttgtgctaatagcatcagatatatcagaagtacagtatacttacagtcatcgagacctcgagtagttagctccgatccttcctacgagctccggactgtgtgtgcgaagatcccgtgttttaagctcgtcctgtcaaatccacgtcgaaggatgcacaagtatacggatagttagtttccgctaattaggcagccacagacactccgccaggcatagcgcgcggcacagcacgtgggcgtgtttagagctataataactgcccatcttccagactctagagtaaacggaaacagtagcacaaacaggaaaatcttattaaaaaatagtgtaaatatgaacaatataagtcatgttttaaagttttttttaagttatagaacaaatcgcaataaaataaatgatatttattttgtgaataatacaaataaccagaaattataccaaaaatcaatgacatcgtttattaaaaaaagggagtattttgaaggttacaaaatgtaattttaccatacctctaagggggctgcaatacaacggaatcccgttgggacgggatgataccagttaggtatcaggtcctgatacctctgaggtatcatgtcctgatacctaacctttatcagacgatacttccgaggtatcaggtgatacctataagatatcaggcgattcctatcatgtatcatgtgatacttgcgaagtatcaggtgaaacctgtcaggtatcaggcgattcctaccatgtattaggtgatacttgcaaggtatcaggagccaggcactaaaagcgtcgtcgtcggtgatcccactgtccacgtattgtgccggagcttgtcgccggcggcggcatcctccacgatccacgccggagatcgtcgccggtgatcccaccgtccacgtctcgtgccagagcttgtcgccggcagcggcatcctccacggtccacgccggagatcgtcgccggcgcagccacatcctccgccatccacgttccacgtcggagctcgtcgccggtggccgcgtcctcctccgccacgccccacgccgggctcatcgttagcggccgcgtcctccaccatccatgcctcatgccggagctcgtcgccgaggccgcgtcctccaccgtccacatccccacatcatcatcaagcgttcgcatcggcgcggtcacaggcggtagcgacgagcaggcaatgaccgcgaccatgaagctatcatcagcagcagtgacgcacgcggaaaagacatggctcaaggagatagtgcaggaggaggcgataccgtcccacgcgctcgggacggtatatcccgtggtatagcatttcaacacctctaaacaccttaataaaggataaaaatgagtattgcatcaatgaatataaaggaatgtgtttatttaatttcagacttttgaaattgcattatacacgctattaattactacattcataaatatgacttttaaaataagatttttttggttaaactttcaaaacgttcaccatcaataacattttcaaataatccatttatataaagatagcaaaaaaaaggctacaccatgttttctctataggtagaaactttcacattaatcgaagaaaaagggtaaggcattacagtctatctaaattataatagcgtagattaattgatatagttgtatagaaaatatgattgtatttattaatacacttttattctatgtcaaaattattttcataaaaagaatgatggttaaagtttgacctaatcttagactaaatcaaatgagcggataggtagtgaatatactaattaaatagaaatacaatggacgcagacgcacgtctatttctaataaacctttatcctgggaacccatttctgatggaaattaaacgccacaggccacatgcatcatcgaacgtcgctattttgcatagccgccacagtcatcggataggtgatttaatcaccgagttgttttttgttgaaaagctgctcacataacgtctgtgcaggtggccttgtaaaatcaaatcagcgtacaagtattacctgagatatcttttggatattattggtagtagaatgtaattaatcaaagaatcttatctttaaaagtaaagatgggacaggaagacttgtcaccaatcatatcattttgagtacccatagactcagggtggatggatgcatggatgctcagttggctcactattttgctagtacacatctgtacatgcacggtgcaagttatatactcctatgctttacagtaagcttctaatttttaaatccaagagacattgctgagtacttgaacttacctcactgtttgcatacataaatattgcacctatctgttttgttctgcatgtagctagtttcttctgtattaaccaataaatactattttaccatgaagaaaacggtagaagaatcacaagaagaaaggaagcaacaactggaagagattgaaattttaaagaagtcaccaaaggagacaaatggccttcgtcgtttaattggcctcaatactccctcttttggtcagcctcagtaaggtttgtctatcctctaaatgtccccatgctgattcatgttaagatgactagttttgtggttggtgtgatctggacatgtgactttgttttggttagtgaatgtaaacgactatttggacatgtgacgtcattttggtcactagcgatggctggatttggtcgatgatgatatgcgcaatgtactgatgttgtatcgatgtaattgaacctgttttggtcaatgaacttgtgatgtttgtgttggctaatgaatctgtgcttatattagaacatgtgactgaatttggtcgttaattgggctataagatttgagatttcctggatgttagttgggttgtgtattggatgataattgggctaaaaattggctgataaggtggctgaatacgtgattgtataatgcttgggcctatgtgggcctttcgaattttctgggcccactcattagttgattccaatgcaaatgcatataaatacaagtgggatgaaaatattgtgtaatttgatgcgttttagatgggccaggcctaaatctaatcgggcttgtaactaggcatgacccataaacatgtggaaaaagtatacttcgactccctcaactatgacccgagtatgattcatgacctccaaccacaaaaccgggcatatcgactcctccaaccatcaaaaccagtgcaaactatgcccctgggtggttttggaggcggtttaggctgacgtggcgaccacgtggtggtgttgaccggtcttcgtccagcgtgtcgtcgacgtgtcgcttatctggcacaagagtaaacaaaaaaaacaaaaaattatgggaccgacatgtcattcacacaaaaaaaaaatagtgggccccacatgtcatcttttccacatgtgagctcccggccgtccgcatgctaggggaagagcttgccgtccgcgcgacggtggtggagctcccggccgtccgcacgccgggggaggagctcgtcagcgtccgcgcgcgggggaggagcaaccagccatccgcgcgccgggggaggagctcgccggcgtacgcgcgcgggaaggtgcaatcggccgtccgcacgccgggggaggagctcgccggtgtccacgcgcgggggaggagctctcggccctccgcgcgccaagggaggagctcgccggcgtccgcgtgcggggaggagctcccagcctttcgggtgccacgggaggagctcgctggcatccgcgcacgggggaggagctccggcctttcgcacgacgagggaggagctcgccggcgtccgcgcaacgggggaggagctcgccggcgtccgtgcttgagcaaggagctcccggccgtccgcgcacatggggaagagctcgccgccgtcttgccggtgcccgtcggcatctcgagcaacatgtggcagcgcgcgtcgagggcacgcttcagctcacccatgtaccgccgccgccgccgctgccgctccctaccgccacccccaccgccgcccgctgccactgccgcggccgctccccaccgaagagaaaggccaggggagagagagagaaggagagagagagaggaggggatgaaggaggaagaagggaaggagaaggaggatgacatgtaggtcccacaatactttatttgtgtgaatgacatatgggtcccacatatttctttttatttttttattctaatgccatgtaagagccacgtaggataaagactcggtcaagagcgccacgtaggcgccacgtcatccaaaaccacccaaggtattgtttgtaccggttttgatagttggaggagtcgatatacccgattttgtggttggaggacatgaatcatactcgggcgatagttgagggagtcaaagtatactttttcctaaacatgttgatcattgtatgggccttggcaggccacaagaaattgtgacgaaataaattgacaaaaaaactctgccatatcagctccacgtcatcgtgtgctaaaattttatgacgttttctatccgacatggcatctgtacactcatcaaagtttagtgagttataacgatttctgagctcaataatgacaaaaatgggcgtcatagactcaatgacgatagaaggatcgtcactagattagtgaaaaaaaaaacaagttttcatcataaaacttcattagagacgcatgataggtgacgaatgaattttcgtcacgcaagcatcacaaatttcaaatcatgacgtaaatttcagtttgtgacgtaagtgaaacgtcacctatcataagatttcttgtaaggtcatacacagtgcagatataagaagtggtcgagtgcctccagcttgtcatatcggtgcgatgatgctaggttggctaagtttgtgcaagcccttcggattcctcatgccctctgaagggtgcgggtgcccctacagaccgagcaaaggccaataccacgagccacgttgaccttggatgtaggagagagtagagaggggagagcgtgggatgttgccactaacaagctaaagcgcatctagcaagctagagcgcacctaccacgccatcccccaattcatgtcggctcgaagctcacgtcatggccgaatttgatagccactagctatagccaccctagagccgtggtcatcgatttgagaaggagagaaaatggatggccacgggaactagcgaggaaggactccccatggcataggaatccgcaagggcattcggcttcctcctcatcactgagcttgttcacacccttgttcactcggccaatgcaaggccagatagggagcatgcgactagaggtgaagaagagagcaatgttgacaagaaggggaggggagataggagccgatggagggtagggagtgacgaaggcaatgggaggagccgtcggtaaatggggatttcatggagtggctggggatgggtctagacaatatctacgagattaggtcaagggagctattttataatagtttctagttttaagggtgtttagtgtaaattttagtcgtaatcacacaaaatttgactaaaatagaaaatatgagaggttgacatgcaaaattgaaaacatgacttaattcagcaactttttcactataggagagaatgtgtagcctcaactttgagatccttattggagtggcttgtattatgaatggcctaataaagctagagtgagggatcagctacttatacgtattttgtctcatatgtgctattttatgtggcttcgtatattattagttcactcaaccatttaacatatatacataggagtaaaatatagatattatggtgagtagttatattaactggactggcccaataaggttacttagtagtacatccgttctaaaatgtagctttctagcacaggaccttgtcccaaaataaagtcatttctcaacctaccttctcctctcaaccaatcataaccattttctttcatctactactctgtcctaacaaaaaaagacaaactctagctccaacctggacacgcatgtgtgctaggattagacttttttggggacggagggggcactttctattcttaaccaatcacacactttctcaaatcattctcacatattttcttaatacccgtgccaacctaaaaaaatacttaaattttggcatgaaggaagtagtagatttatttaagatattaatgccagaactacttcctccatctttaaatgtaagcactttttagattgacacgagtattaagaaagtaggtgaaaataattgaaagaaatgtgtgattgattgagaggagaaagtagataaaatagaatgattgtgattggttgaaaggagaaggtatgtgaagaaatagttttatcttgggacaaagtattgtgctagaaatagttacattttaggatggaggtagtagcaaaatttcaataaagcagggatcagtgcaggagtagaaacgtatagtggtaactaaccagtgaggccccatgtatgcaagccagaagcttggagcggccacgggccacgtgcaagaacgtggccagtacattgtgcagcctccatcgacctggtgcttgtgtagttgtgtgcagcggcagcagcagcagcttccgcatgcatccggccatcctacttcctgctgacaagagaacatggaagcaataagtcagtgttccaactctggtaaatacaaatgcttcggccgtacactggcggtcagattaaacatgtaaggagcagaaactgggccttgcattgctgccattcatccacagccagaatatcagcccaacacaaactggtagtgcttccaaacatattgcgttgtatggagtagtcaggattcagcccagttaaaccatctggagcccatttatgcctttcaggagtgctgtccaggagtggacaccatctggagcccatttatgcctttcaggaatgctgtccaggagtggacttatctttctcatgttacagttttattccatataggatgagcccgttttcctatactagatgatatagcttttcaagatcctctcaaaaaaagatagcctctcaagaaaagattgacagctaaatgacaaacaaagcctaatcacacccaccattccaagttactttcagagaggtccttcagaatgtgaaatggttaatatataattacgtgtcaaagctcctgacccgtctgatcaatcttttgctcggatgtcactttctcgtgtccagacctccagatgacttcacttacaaacctgcagtcatatatagaaacaactttttacttccttagtcctcacacatgaatgatactaataccataagtaaatacagcaagaattcaaaccaacgaacaaaaggcgttgcagtttcaatgttaaactcaacagctggaagctcacagatttgtcaaaatacagtatatatcattcaaacggtcacttcaccggattattgcaataaatcagtaaacaagctattgaataggaaaggcataaatcagaggtagggattagtacaggatggcatggtacattaacctcgaatgctttccaaattcctaacaatataatgtacaacagttcaaaaacagaagaagcgtttgaccagatgacaaaggaaaaaacataaaaacaggatcaaacacctcccatcttataactcgagcaaggtggccacctggtgatctattgatatgtcaaattctttatcaattgaaatcatttatccatagagcaataccaagttattttccaaacatccaaatatggcttacaatgtaatatggcacaatgatgtaaattagctttggacctttatttatgatatataatcaatcagtaggaccaatttggtcttccacgtttcattaacatgaattatttttctaaaactaaagtataaataaatcatacaagagccacggtccaaactggaccaactaaaagatcagcatgaacaatgtaaagattgagtagaacagaacaagaataccaatacaacacaaattaacagaaaatctaccctgatgcaagccagcctacatcatccattacaccatagcattgacagtgactgaaggagtaaagggagcaaggaaggccaaatgccagatgccaatgactcgtttattcggtgagtatatttcaaagcacttggaaatcaagcaacttatttaattgacttactatccacaagtagctcaatcgagacacaaaaattatgttgaatatgatagtatgctcgctgggttggtatgcataaatggatggcaatcacacatcaaatggctactccaaaagatagcagaaaaatcccactccccttgaaaaaatagcacaaaggttttgcgacacaacagagcaaattatgaacagaacttctgcagcaggattaggatccagctagagaagaggtaatgtgaagaccaatcatgccacctgattgttgtacctgatattggaaacagggatatttttagaaaatgcaagcactgtacttgttgctagctagtctgtgctatgtaagttactatgcttctaccaaatattctaccaaactgatcaaagaaggatgggcagttgggcactacctttctttaagaaatgatgcttttatacgatgaaatgcatgcattttatttacaatgcatagttagatgggtgttctgagaatgttatttcactatttcagcatgtaatcttgcaaaacttatttcttctctcccataatggaaattaaaaatacattacattttgcaaaacaaaagattatatagtgtacatgggttgcacttccaagttatgatttttacactttattgaactggccactgtctggttgtctgcaatacagtatatatgtgtgcaagagtagtacacagcatgaaccaaaggaattggatcagacatgaaaacttgaagcatacggtgcacaaagaccaggtccaaggaagaggccagcaataagctgctgccttgctgatggccgcatgatggagattctaatccaagggaaacaacaattagaaagaaagcaacccagatcacaccaccacaaattaaaccgtattttattaccatcacacgcagcccccttttcccgtggcaataatacaatcctctattcctctctcatgtctgccttttgagcacataaacacaccaccctcgccatcatcatgcctaaccaagtttaggccctaatcaacgctttgctctgcacacctcgcaagagatcagagcccctgaaagctagaagaggagatagaggataacccacacgccatggggagagcgccgtgctgcgacaaggcgagcgtgaagaaggggccatggtcaccggaggaggacgcgaagctcaaatcctacatcgagcagaacggcaccggcggcaactggatcgccctgccccagaagatcggtatgtgttggcaattctcatgagtcatgagtcgatgtggtggttgtggcagcagcagcagcgatagtggtagaagaaagctaatcaagtgcatgtgtgtctttgttggtttgggtttgtacatgtaggtttgaaaaggtgcggcaagagctgccgcctccggtggctgaactacctccggccgaacatcaagcacggcgggttctcggaggaggaagacaggatcatcctcagcctctacatcagcataggaagcaggtatacttgctaattcagctgggcacacacaagtctagtcactcctatgatcaactcaactgtagaattagctgcgaaaccggtaggcaggcaggcaggttgcacatggggcatgagagtgtagtacaatctatgatctgacatgaccatatatgcatggcacaggtggtcgataatagcagcgcagctgccggggcggacggacaatgacatcaagaactattggaacacgaggctcaagaagaagctctttggcaagcagtcgcgcaaggatcagaggcagcagcagcacctggcgcgccaggcggcagcagctgccagcgacttgcagatcaaacaagaagcgagcaggggtgcaaacgaagccgatggcttggctgccggtgccaattacacttggcatcaccaccacgccatggccgtgcctgtgcacccgatgtcggcaccaatggtggtggaaggaggccgtgtgggagacgatgtcgatgagtcgatccggaagcttctgttcaagctcggagggaacccattcgcggcctcgccggcaccgccatgcatacctccaccaccaatgtacgaggaagccccaagcttcgtgccaccattggcgcacggcgtgccgctcaacgaaggcggcatgcagtgctccagcgtgctgccggcgctggagctggacgagaacttccacttcaaccatgtcaagctggacgggctcgagtgcctcttcgggatgggagatcaccaaaacatgagatggaatgaggtgagcccgttggtttgccctaataacgctgtggcgtccagctcccaagggatgcagcagtactgcctagttgaagaaccagctgacctcgggatgcagtagcaatttggttgtgtttccgtgtacatgcatgattgtgtggtgtaaatctgtagcattcatggggaaattaatggggaaagatgagatcaaacttctttgaactaagagcaataaggtcgagctctcaccactcctagatgagagataggtgcatgcctgattttccaggtgtcttcatgtgagtctagtctttaaatggtattttcctctactctcttactgccctacagaaacattttacattagactgtacgtgttgcatttatctgtcgcttaatttggtgtgttttggcgtatttaatttgtatcaagtgacaagtactgacctaaacttaagacttagggctatagctagaaatttgttttatgttcctaataccgtaccatagggcattatatcccctttttttaaagatcatgctatacgtacacacacttatctttaaaaaaaattctctaatgtttgcttaaatttggcccaaaaaaacagtatacatcatgcgatattaagaaatatactaagacaagcatatctacagaatccgcaatattaacatatcatgcccttttgtatgcaaaggtaagagagaagaatcagtttactcaagtattactcaagtgtctacagccataatttattattcgatattccaaggcactgggcatttatgtgccagaagatatgtcattactggcacatgagattaagatttagtttgtgcaaaaacttcctcatgtgcagtgtcaaatatatttatggtgactaatccgttcaagtttgaaattttggagtctgaaatgatacgggaccttcatttctcttgatgtcatatgcaattatcaaaacgtttatttgacttagcttgtttgatttctcattccgtacattagccaagtaagtgaagcgttggtataatcattagttgacatttgtcttcaacaactagttgtcgtactggggaaagaacagacctctacccaggtaataatcaaactatatttatatctattactaagctagcatgccccttcctacgaccaaggaaaatgtcagcccagctaactgttctagaaaaatgaaaactcaactgacctctcccatcattgacaccacacattgttccagcaagatgtcgtcattgccttttccattcggatgcttgcataaaatgaagtaaagagcatgctttttaggagttcctcataaatatgtaaaagaaatacataacagaatgtaaaaaaaaaaggatagaatactcttatgttgtgggtgataacagccatagcgtttaaacaacaaacacgttacatggatatggttcatttacatgagttgccaatttcgaatatcaccatttctagctgttttgttataggagggtctgaatctacgagaaattagatagatcaatacaatttgatgtctttgatagatatgttttgctaatttaagaaatcacgtggatcaattaaatcaacataacttattttcatcggcaccaataatcagccgaatcagaaaggtcaagtttacatatgttgctttgtttggtaaaagaagttcacagtt

SEQ ID NO: 18245 - DNA, 14748 bp, Oryza sativa
acgtttgttgttgaaccatcaaatcatataaaggataaatgaatggagaaagtgtggttgtgatgcaacactgtcaagcatatgaaacagctaggaaggatacggtaaagttcaagaaatatgatattgttcacgtataagagatcttaccacctttaaagccctcacaatttccacgaggatgatccattctttgaaaaaagggtattatccttggatcactctgttcttaattaaataattatggaacacatatcattaaaaatattcttctctataaattaaatgatggaataagggaatattattgaatcaacatgctaacttatgattcctacagagtaacatttcatccagcagcagatcagacagcatgtcatcaaagtgaacaaaagatgcaagcagagacatataagatatctaagcttctccataaaaacatgttcatgttcaacatgcatgtaatgttctatggcatgtaaacataattattctgaaaataggttttgtgtgttactagctgtgtgtctcctctcatggatattaattcaaccggttaagtaaattccagacgatgtgatgagaagtgaatttgatccaataaacaggaatccaaagttagtatattgcatccttagtcaatgtaactggtttcaccttaggaacacacggtacacattgatgaaatgctataataggcctagagatctaccatttgctctttcggcacaagattggaaccccttttcatggtctctgataaactgatggcccctacttgtgaaaagtaaaaagggggaaaggacagccccttaaccagtaaaggtgtttctccaacatgtaggtctatagctgattataaatagagcttgcggatttcacttcagtaaacaaaggcacttgtgatacgatttcaacaatacatgcctgcaaatacaaaaccacgtcctagtgcaccattcatacatatgagccagatatgaaaggagaagctttcatattaatgttattaagaagagaggtgaacacgcgcgtagaccgctgatagggatcgaatgtgggtgggcatgcacgcaacccagcgctctggccatttgcactaggcgcagcttcccgtacatccatatgtatggatgagaagattaaatatggttatttattgactggattgaatagatcaagattacagttcaataaggtattttctatttaataaaacttgtatatggtcaatttggccaagagttgaaaaacctgcaagagcatgaacgaacaaaaattcaagctatctcactatctcgatgtagcaacactgtattgattgacacaaggaataaatggataagacgtaaactctagttgcaaacatatcaaactgaatgaatgcttgacttcagtacatcattggtctaatcatacagtttaagtccctatacaactagcagaagccaaacggaagacgttctattgcacatttcatgggcccgattatctcaccgtggcacctaacagggacagtttcaacctaatttacaccaccagtcagcttctatcactgcaaacataactagcgatcttctagttgattgacgttaattaataaacgggcatgtttatctaaaaaaaggacatgtctatgtaaaataatatagcactatcaagtcaagagacactagtgtctactcataggctcatagctaccttcaaatgttcttttcatacagagatgaaaactaaaaaccgaaattccacacacaaaatttctccacctctcgttctatctgacctaatcccagatcacagccgtgttagccacctcaatagcatcccgctccctaaactctatatatgattcctcacccaatcgtgcactaccggtaaccgccattgtcgtcacgcgatgtgatccgcagatctgcagagcaaacagagcaacaacgccaccgattcccaacccccaacactccaacaaccaccaaacatgcccctctccccgcatgaacccgtctcgattagttcaacgaactagggatttcgaaggaatcgcgcgaaccatacgatccatccaggagggggaaaaattaagggcaaacctccggatcgatacctctgacgcgcgcgcaggagaggaattcggctcgagcaaatgcgtcggatcgaggaaaccctaggatccgggtctcgagtctccaccgcctcctccgcctccgcctccgccccttcgcaagcctccgatccccacacttgggtgggaaaattttggcggcacagcggagcggggtgaggccgcccgcgctggaccaggaggctggaagccgaggagactggaagcctggaatcctgggcttttataggcccatcaggccttatttccgtcaggcctagcggctgtttcagttgggaatttaagtctattatgactccctaattttttccccttatttaaacaccgacctcaactgcaaaaagtataatgcctcttccttctttaaaaacagatacaaatcagctcctgttgaaagcggtttcaactgacgtgatggttttaccacataaaacccacatgtcaacaactttctcttcatctcatcttcttcctcacctctcacctctcccctctctgtgcgtcaacccgaggcacaacgcgaaaacccgcgggttatcacttatttgacatataagtgggttcgcgggttggttcgcttgcatccctagatagtagaacaggtcgtccaccggatccacgtactattgttgctgccctagacaatgtcacatccacgccacagccacagcacaccgcttggcgtgctcgccgcctccgcgccttgcagaacctccataccacctggtctgcaatggcggtctggttcaggaacccaacgtaggacctgtggttggtcaccgctaggagggagaagtagttgtacccgttggctgccggatgctgcggctccgtcctaatggccgcgacggccttttgaggcatgcgcagcggcgctggtccaacatgttgcatagccggatcaaggtgtagcctccccttccttctcggtgaactaatggagccactaaaagggagggaggctgaaagagaaaggggagaggtgaggaagaagacgagatgaagaggaactcactgacacgtcgatcccacatgctgactcatcgagtcgaccatgattaaattgccaccgttttcaacaccatcacgtgagttgatttgccctgattttcgaagatgggggaggctttatatctggttttgtggctgagtaaggcgattaaatcaggagcaagagtgagggaaaataatagacttattccttccaagttgctgtcaggccgaggccgcaggcccgcgaggcttcaactgctccattctaattgggccggagtgtgacagctagtttcggcccgatatttacgggcctccgttaaaacctaattgggtcgctcaggagacagtataccttcaacttttatttaccgtcttctctttctactcccaattaaggcattataagtaatgaccttgcacccaaaaaaaattatggttaacctgtcagtgataagctttcaagcaatcttctcaatctcgttctcactgaatttacttcgactcctttgctgcaaaaataaccgcagatcagatcatcagaacccggtgtttttttacatcgggtattttctgattcagtttcacacttgttactgcgtgccaacggctaatgggctctcgtggagaccgtgccatgtgccggtagcattcgtttttttttttcttttgttctttcaaaaatgagccgctccaacggctagttcgcgagcagtcgatcgcactaaaaattccattggcccaactgaagcaaaacacatcgcccccaaatccaatcctccccccaccatcggacagcgagatggtcatggagatcccgagctcgaagcgcgacatggcgcggggagcggaggacgacggcgaggaggaggaggaggaggagtacgaccgcgtgttctacgaggacatcgaggcgcccaagttcgtcgacctcaccgcccccgacgccgcccgcccctccgacgacccctcctggttctgcctccgcatcggtacggcaacacacacacacacacacacacacatcgctgcaagattttcttgagatgaaattgctgaattcttgagatgaattgcaggttgtgaccagaaccacgagcatgtcgacccggaggcgctgcacaggagcttcttcatgcgggtgcgcgctgcttcttcctggtatgcgcgcgatttcgtggtaggggaggttgtaatccttgtggtttttaatggtggcaggtcatggcagcgaggagccccaacgtgcggctgcagaaggcgatcaggaggaggaaccagaggtagaatttccgattcatccctcactgcctgcgtcgaaattgttgtgtggttggttggttcatccgattgacgtagcccatcctctcgtgatctggtgcagctcgatgctgaaatgcccgcactccgcgccgccgaagcctccaaggtcacggatcgcgaggctaagcacggcgacggaggccgcggcgaagcccaggctgaagacccaccggatttgcaccctgcgggcgtctccgacccggaccaaggcggcgaaggtggaggcctccggcgcgaggaagaaagccctgacgacgccgaggagcaagcccgtccggccgaggcaggatccgttcctcagcgtgaagcaccagaagcaggagcccgtcgcggcggcggcgaggaaggggaccgtcgcgaaagctctgttcatggccacgccgaagaaggacgccagcaagacgccggcgaaggcccaggcggcgccgccgctgtccgaggtctgctccaagatgaggaagctgaatttggcgtgccgggaggtgcctagcagatacctctgtcagtcatcgaatccgaagagttccaagaaatgcgaccagactgcagtgaagagtgtcaaggcagctcaaaattccaggccggatgagaggaagaagaagaagattctaggctgctcgttgcaacatgccagttctgaagctggtagagagaacagaaatggccgtgagaacacagctgcagatgagaatgcttgtccagaagctgcgagctccagcgaggaaccgaaggaggtgatgcaggaatccagaattgaggtggagacatcacaagctgacaattgtgatgacgataaggagaatttgtcatatgttgatcagccaaccgaacaaatggtgatcatctcgcattctgatggtgaaaacctgcagcagctggagaacaatgagaatgtccctcggaaggtactgaaattgccttcttctttgttactgtagctaagacatgttgaaactgaaatgctgtaatggacaatatgcaggtagccaaaatgcagagcaaactgaacgcagagcaaggaggaaagctcaagaaaactaccaatccgaagccatttcggctaaggactgatgtgagttactggttacattgtgaaagctcgttgttgtggagtgtttcactcgttcactaaccttcctcactccatcttctgcattttaggaaagaggagtgttgaaagaagcaaatccagaaagacaccagacgctcaccgagaacaactccacggccgcagttcaggtaagttgctcacgcgcaccaactataagattcctaatgtagtggtcacccactgatctgtatgcatgtacgctgatgcagcaaataggaaggtgtcgtgacggaaagggacgagacaaaccgacgtgcggcgagaaacaggtgagcattgatatctcccccaaacataatttgcaggtccaaatcaatttagaaagcactcatgctgaattgctgatctgcgcaaactgtatatccagaagaagcaaatcagaaatgttgcaacgggtcaggttgatgaagccaaaagggtcttgaacagcattcgttgcaacaaggtgaagcctgcgatgacgaatggaaaaacagttgggaaatcacagggagcttccagagtagcatcatcaacaagaagtaccaagataacaaggtttgcccccacaaaaaaagagtaaatttgcagccccggttattgttttacagaattgccatcatgtaatatttttcttgcgttttcacagtggctccatggcaccttctaaggttggaaaagagaagagtacatcggtgaaactatccaggctacaagcagctgctgcttaactgaagtgacaaatgttttattgtcagctccaagcatgaaaatatgtatttaccgcgtcgaattcgttccattgtattcttgaactactctctagtctgcacactcactcacaccaacaaggatgtatcatgttcccttgttttgtccgtgccattggtatgttgagtgaaatttttttctctgtactaccatcatcatctagattattttgtaacctgaaagaaaaatcagggaagaagaagaggcccaacccaggagaaaattcagatcggcatctgatttcacatggttcttggtgttgtaaattcaagcccattggccttggctgaacaaaatacagaatggcagggacataaatttgaatccagaatgtcacgagatgcccagccgcccaaccaatccaagccaggcagctgaccctctctgcatccatccaaacgcagagaccgaagtcgaacagcgtcgccatctcgccacacggccagaggccgagatagatgccatatgatatgccatccatagaccacacgcagagacgcactgcatatgcctgcgtgtacagagctgttagctgtactatgcaaggggcgcatcccctacggatacggctgccatcaactctgccattgaatccatccacaccatgatcaactggctgtgcgacagcgtgcgatccggtgaacagtttccacggatctgcaacagatcgatcgacgtttatgtgtgcatcgctctgccatctggtaatgttttcatttcagaggtaaataatgttagcactaggaagcttcagcagggtccatggcccaaatggaccaaaccaaaatcttctcttgcaccatactctctccatccaaaaaaaagataaaccttggatttccgtgtccaactttgactgtccgtcttatatgaaatttttttataattcgtattttcattgttgttagatgataaaacacgattaatattttatgcgtgacttatctttttaattcttttcataattttttcaaataagatggacggtcaaatgttaggcacggaaaccagggtttgtcttttttttttggacagagcgattatttgatcacttgatgcttgtagcatcgcacgagcagcaccccccctcccccggcaaaaaaaaaagaagaaaagcactagtatttgcacgactccacttgcccctaagaacgaacgaacgaatgtaaatcctacatttataagcatttttggaaactggatcggcaaatccttgaaattaacgaggtcaccacagatagcgagacggtacgtcgtctaccaccgaaagcacaatgctgttaaatccaaaaaaatcttccatggaaaatcgaaccaagaacttaaggtgctgctgagattcttgtaaccactaggttacatgacctttcgccactccacacagatttgagacaaacggcaagaagcttcctttttctcgagctgcccggcgagacattcttccaaaaacggcggggcctcgagatcggagaacccagtaaacaaagtgcgtaaaaagcgctttccgtctcagttaaaccgacgaacagtcgatgtggaagcaattaagattcgtgatttatgcgtggtagggtagtggactagtggtggtagccgtgctaaagcgccgagattaatttaggaggggcgtacgtactctcgctgcaacttgcaggacgtggtggggtcaggggtgccggccgccggaaatggcgcagagatcacggcggccgccggcgatgcgcggcgcgtcctttacctgatctggcacgcacgtggacacgtggtacgtgacaggcaagaggtgcacgcacgcacgcacgcacccgtaccattcgtttgtgcacatgtcggtgtgtgtttgtccagtgtgcgcagacctgcgagcagtacacttttgtataggcaagcctctttgaatcaggcaaagttaatctactattctctctctgtttcaggtataaaacattttaatttgatcaatatcagttttaagttctactaagtttataacaaatacaataatatttataatgctaaattagtttcatcaaatcaataattagatatatttttataatacatttgttttgaattgaaaatatttttttttacaaacttggtctaatttaaagcaatttgattttaactagagttaaaacgtaacctgaaacggagggagtagtatcgtataaacattaacaatcacactctttttttattcacgctatcgtaatgatcatcgtggctcgggggaagtcgggatggtccaggcgaagcagaaaaagggaaaaagaagagaaaagcgattaaatccaggtcacatgcgactcccccgcgagttgaggcatgagatcgcgcggactggggggctcaaccgagatcgatcggaattgcgattcatcccccatcaccatcgccggtttttccatcgatgtttgcaacgcgatttgcctgattggcgccgggagtttggtagtcctgacaaatggcgtcaagaacacacaaatccttgtgagattgcgagaaacagacagacatgccgcgtctttgtggccatggatggatgtcacgttgacagttttgacgccgccttgccggcccgacatggctgtgtgttcgccattactgttagcacgcgattaattaagtattaaatttttttaaaaatggattaattttattttttttaaacaacttccgtatagaaacttttacttaaaaaaaacataccgtttaacagtttaaaaaatatgtacgcggaaaacaagcaaaaggggtgaaaaaaatgggcattccaacacagccttagcctagccagcagtggccagctaaccaagcatacgggcatttccgttagccgcggccgccggaatacgtacgcctagtattcgatttcggcgaacatcaaaatcggccggcgcgcgggcgggcgccaaaggctttcgcggcgggcggcgtccgaaaccgggtggcttcaggctaaacagctactactagtagctcgccggccgctcgttcttaattgaacgatgacaagtcgacgtcgcagaaaagggtcatcgatcgactgctgctagtagtgctgccagtgtacacgtacgtgccgctagctgttaatgtctgtgtacgttcacgaggagaaatacgcgtattaatttggtttcatcgcttttctgaaaaaaggaattgtactaaccttatagcaaggtcaatggtgcagctagcagtaagctctaaatttttgtcatgtcaaatagctaactactacaagttaactataagctgccttggttaaagcatacatacattaaatacttgtatggatacatcagttgttggacccacataacatattttttattgtctctcatagctgcacgcgagctatatggtttggggtattgtgcaagcgccggggctaaaacaagcgcctggttgtttcattcttgctgaatttctttccttaatcttagattaggctgattaacaggttttggagccgacttaatagagctattgtacccactcttatgggaaaaaaatcatcctcatatcttacagatttgggggcaccagatgtacttcacggttcacgaatgcttcatgcccttctcctccaactctgacaacattcttttattatccgacaccaacaacacaacgaaaccacattaaagaatttacggattaaagtcatgcgccgtgatggaggtagtaggggggtgaggaggagaaagatcaagggaaatcgtcgtgcttagaggatgaccgtagaatgaggtgcaacaagtgggcataaacaacgttgttgaagtcgcgcaatcggcagctagcggtgggccggtgttagtggcagggtaaaaagagcaacatgttacaatgtggcagttggtggtggtggatccggcagtagggatccgcctcaacaggtcacccacttgaggtgtagagggggagggcgcggggaaggaggaggggaggaagctgaccagataaacctcactggcaccatcgacatcttccggccacccaatgaggttgggcgacattggtgaggagtcaagcaggggcatcaaagtgttcagaaaatgcggtgctcaagaaaaatgaaaatgctcaagaaaaatgaaaaaaagagagggaaattaggtttgagtgtttgcacgaatcttacaatcattgaacgaaccaaaattataagattttaaaaggtattctctatccaatgtgtaatagactgtaaaaaaaaagagatttgctctgatccaacaaaaagtaccggtatcagatcgtttccgatcattggatttaatattgcccatcatgcccagttagatctaacggtccgaaacgatttggtaccgtaagataccggtacctcgaggcactttttgttggaccggagcaaatatatatttttttaaaaagttttcctctcccaaagcgtttgctcgttttacaccaacctgacaattgccatcactggtataagagcaagtttaatagtacagttaatcgtgagcgctgaaaatttaacacgtcatctaacagctaattaaaccacgctaaatacagtaaccggctatagtgttgctttacccaacgtaaagttctatttttctattggctgttcacagctatctcatcccttgcacagggctgcgttagagaaagtttataggcgctcgcgcctgagccgacgataatatagtcgttcgcttttctctctccgctctttctctctctgtcatttatattaaaaatctgatgtaagcatactatcactattgtactggtctaacacgggttgcgtacacatgcaagtgtccatgtgttatccgtagtagcctaccttgctgctgctaccactgcaccacacagctagcctgtattgctgacgcttgcatagttgcacgggtgttaatgaacaccgtgcatgcgtactcgtaccgatcgatcgatggcgccaacgccggccacgcaacgccaaggcgatctacaaacctgcacgcgtactaacaaacacgaggacgacgtagtacgttactactctctccatcccaaataaaacacaacctaaacaccgataagatattacatagcacaacgaatctgaatatgttcgtgtccagattcgttatactatttaatgtcccatagataaatctaaacatgttcatgtccagatttattgtactatttaatgtcccatggatgtctaggttatttttttaagttattttttttaaggatggagggagtacgtgggagttttcactctcgtgccgtacttgttcagcttgcagcctgcagctggctgcctttgctgaattgctgatactactactactagctactctagtgatagccaagcatgcatccagcccggccactcattcatggcgatattgattgaccacacgcatcgcatgctcggtggtgtagggtcaatcctttcgtccttcggtgtagcacagtaggggtagtagctcgtttagcgaagggattttccaggggacgacgtttcatgatccgatcgaactagtgtatcatctactatgaatgcatgatcacgctcttgtcacaatcgagaacagtgcaccacaaaaccacaaaaaaggaggagctgaatgaatatgggtgtgaattaccacgatcgaccaccaagctagcttaagcacaggccatcggccggcaccatccgcttggcacgtatggtttgtcgtcgcccatggtgctcgacagaagggtacaaagccatggccaaactgcttggcagctagagtatgatcagttaatatgaagtcaatcagcatgagtttgaggcacccgatttaattccaacgacaaacttacaaaccttagcgaaatcaaggacaatgattttattttgtttttgtgttgtttgattgtgtaaaaataaataaataaaattataccttttaccattaaaaaaacacacacccatcatatattactcactctgtttaaaaaaaaagccaacctaagaggggatgtgacccctcctaatacaatgaatctgaatagcccaacctcttctagtactacgaatctagacaaagggttatccagattcattgtattatgatgttttttttgggacggagggattacgtacatactcatgagcatgttacttttaaattaaagttccatggtaaaaaagaaatacatatgtgctagttgccatagtagcacatctttaaacgtgtattcgggacatatcgattcactaataatacatgggtgatctatgtgagaattgagggggatttgaacataattaattggaaaaattacaaaaatcaccccataaatcatttgaagtttgacattccaccctataaattattttgttgcaaatatccacccacctactcatttttgttgcaaaaaccaccccagtaaacatatgcttaaccgaatcaacatgtttttataaaatgtgagccatcaatatggtctttaccaaaactaaatacttctagagtattcttgatacattttttgtgagattccacatacaaaattgttgacgagagcctaaacattgttgcactgagtttcgctatatgaaaaaaaaatcaatcaaatatggaaaataagtctaatgcaagcacttagacaagattgacttggctaacttagcatgtggtaatcctacatcggcaataacgaattgattcggttaaacacgtgcgcattggggtggtttttgaaacaaaacttagtagcaggtgggtatttgaaacaaaatgacttatggggtggaatgtcaaaattcaagtgacttccggggtggtttttgcaatttttcctaattaattccacacctataataatttgaaactaaccttctcaattctcttcaactctatttttataggattaaacgattaaggcttactactacacaggaaaaaacaatagcctcgtgtagtggaaaaaaaagtgtaataaaaggtcgttgccggtggaagtagaaactagaaaagggataagcgcgtgtgacaaaggcggccgctggccagcacgcacgcagcaaacgaacacggataaataaaccggagtcgcgcgcagaaaaaaccgaccacggaccaaacccggtcgagccgcgcctttttctagaacagcggcgatgtatgagatgactcggcgccgcgcccgcctcctcctcctcctccccgtgtgggaccaccgaccgccccctccgccggtagggcccacatgcccgtctccgctccccagcgcgggacccaccctcttgtggggcccacatgcccgcctctgcgtcggacccacccctgcgcgctttccctcgggcgcccgtcgctttccttttttatttttatttttttgactcctgcgagatgcggaggagatcggacggcgcggtttgaaaagggccgcgtcggtgcggatcctgggccgtccgatcgggccacgatcccgagccgcggctactgttcacgggggtggacgacagcgcagtcacagccacgtcacaggagttacggcttcgttcgtttcggcctcttttgcagtaacaccctccaagaagaagttaatttccctgttgtaccaatccatacctggttctgtctacgaaggaccgatttgtacagtgcaggagtagagaggtgctttgtgcaaaaaaattcgtcgatctgaaaagcaggctactgtttctcccgtggtaaagaaagggaaaacaaaacagagcatcgccatctctctcccctcccctgaaagagctaaaaatacaaaaacatttggcgtactcaacacaacgatcaaaccaaacaaacgcaaattacgtgaaaaaaaaggaacgaaatttgcgaggagaaaaaaaattcaacgcgaggaccacagtccaaagccgctccaaacattccacacacacagcaagattagaaaaaaaaagaaaataaaaaaagccataaagaatagcagtacgatttgttccccttttgcccttccaccccgggggtttaaaccgcgggaaccgcgtaatttgccccccctaattaactccgacataaaaaccttaccaaaccaaggggggtttagggggaaaaaacacgcacggaaagacaagaaaaatattaaaaaattcgcttcctcttcttcctcctcctcctgccgatctctctcctcctcttgacgtgttgagctgagctgttcccacttcccactccgtcctcttcttcttcttcttcttcttcttcttcctctcgctctcgcttcttcttgagcttaaatggcagtgggatcagctgcgtaggtgtgagggggagggattggcattgaggggtggggggaggtggaggtccaggaatagggtgtgggtgaagtgtgggaggctaatttgggggtgagagaggagaaggagaggtgaggggtggggggaggaggagggggaggctggttcttggaccgg

SEQ ID NO: 18246 - DNA, 5733 bp, Oryza sativa
  unsure (1)..(5733): unsure at all n locations
agttcctcaccgacgcatgcgtcgtgctcttcctcatccagagcgccgaccgcctcatccagtgcctcggctgcttctacatccatctcaagcgcatcaagcctaaccccaagtcaccggcattgcccgacgccgaagaccccgacgccgcgtactaccccatggtactcgtgcagataccaatgtgcaacgagaaggaggttggtttgtgctgttgctatcgctctaaaacatgccattttttgtctccgaagtagcaaccttttgatgtttgtttgttggtctgtccaggtttatcagcaatcaattgcggccgtgtgcaatcttgattggccgaggtccaacttcttggttcaggtattggatgattcggacgatccgacgacgcagacactgatcagagaagaggtgctcaagtggcagcagaacggcgctcggattgtgtaccggcatcgtgtccttagggatggttataaggctggaaatctcaagtcggcgatgagctgcagctatgtcaaggactatgagtttgttgccatctttgatgcggacttccaaccgaatccggacttcttgaagcgaaccgtgccacatttcaaggtaaattgagatgaattttgtgcctatagtttgtggtgataatgtatatggtttagggttctaattatgattcatttgtttgctgttgcaggacaatgatgaattggggctagtgcaagcaagatggtcatttgtgaataaggatgagaacctattgactcgtctgcaaaacattaatctttgcttccactttgaggtagaacagcaagtgaatgggatattcctaaacttcttcgggttcaatggcactgctggtgtgtggagaatcaaggcattggatgactcgggagggtggatggagcgtacaacagtggaggacatggacattgcagtccgggcacaccttaggggctggaaatttatcttcctgaatgacgtcgaggtactatatatgacaaactttctgaataacttgttgggttatgtttcttcaccttttcagttgaaataacccatttccctcattatggacagtgccaatgtgaattgccagagtcatacgaagcttataggaagcagcagcatcggtggcattctggtccaatgcagctattcagactctgcttaccagacattatcaaatgcaaggtactgatttgctcttatttgttgtagtactttatttttgtaaacatctaaacaatgaacttatataaccaaatgttgttatgagatatccgattggtctggataaatatatctgttaatgcaaacacgaaataaaattaaggctttacagcattttttcccgtatccattctgtgcaactttgtcttcaaatagcatgtcagatatatcatttaatccgtttattacttaaagtgaaaatttgaacatcaacaggtaaataatgtgatcttgacaaaaaaaagtgtgttcggtgcttttgttggatacacaacannnnnnnnnnnnnnnnnnnnnnnnnnccaaggatgttaacatgatgaaattctaaaatgttagaggtttttttatactctttaactgattctcgaaatattaattcacatattgatatgtcctgtaccattagccttttctctcaagtacttaggtttatacacttcaataaagacgcatgctcatcgagcagcatccatctcactagaatataaaatgttgatatctaattgtatatcatttgtgcgcatgttacaactggacctttttttgcattaccatgatagaatatgaatttgcttatcaccttttgttgtcattgtcatcaaaataatgtactacctgataggatgtctggatgaaacaactgacttgttgatagctctgttttaccaatctgattgctagatgaaacaactggcttgttgatagctctgttttaccaatctgattgcttattaattttgttttattctgctgcagattgtgttttggaagaaagccaacttgatcttccttttcttccttctccggaagctcatactaccattctactctttcacgctcttctgcatcatcctcccaatgacgatgtttgtgcctgaagccgagcttcctgactgggtcgtatgctacattcctgccctgatgtccttgctcaacatcctgccttctccgaagtctttccctttcatcatcccatacctacttttcgagaacaccatgtccgtgacaaaattcaatgccatgatctctggtctgttccagcttggaaatgcatacgagtgggtggtgaccaagaagtcaggccgatcatcggagggcgacctcatttctttggcacccaaagagttgaaacaccaaaaaactgaatcggcgcctaacctcgacgctattgcaaaggagcagtccgctcctagaaaggacgtaaagaagaagcacaaccggatatacaagaaagagcttgcactctcattgctcctcctaaccgctgcagctcgcagtttgctctcgaaacagggtatacatttctacttcctcctgttccagggcatatctttcttgttagtaggccttgatctcataggcgagcagattgagtaaactgtgaaaagcatgatagatgttaaaaaaacagtgacaatggagggtgctccagggatgttgtgtcgaagctctttggcgatattgaaatgttgcatgacgcaattgtgtcgtccaattgatttatgtcacgacttcacacaacatgatccacaatgtacacgcccaaataggcccctcccccctcggttgtgtagatatagttgttcttggactgtaaatttgcctagttattccaagactatccgattcttttgtaaaccaattttggtgttcatgtggggattttatgttaggaggcaattactgcctgtacgagtgattcggaatccacaatgcccttaattagaagccattccttccttatgtgtctacttctgaattctgatgaccatctttgcccaacctgctatgttggtcaatctacctttgctgatgccattctgcatgactccagcaaaactgatactgtccattacaatgtcacatgactggaagctttattttttcctcttaaatgtacgcgtccagattccagcaggtagtcaataaagaagctgcccttctgataatcgccgagagtataaatgttgacaaacttttcaaaaaagtgtcaaaaccggaagagaacttgtgaaacggcatgctttttccaagtgatacaactacactacatggtgtaacgtacaagaccagaaaacatcatcctacatacagctggacaccaccaccacacacctgctgctgatgtagtatcccaattccatcccagttgcccaagaaaattccaatccggctcaattcaggcggcagcagcacacacgtctccagctgaatgtcaattacctgaatctataaaaaataggagtcccatctccatttcaaggggccagaaatgaattccagatagtgaagtgagatggaaacaaaaactaataaacccggatgttgtctcaattggagatgagctgtgagtagccgagaacggtggcggcagcatcagctgcagatagtgagagaccagtgccgagtccatcgccttatctgcacgggcatgtggccgggagacagctgtgtcgcgccaaggcgtccgtccgtccggcccttctgctggtccagcggctgccgtaagcgagcgtttcacatgacgacgctttctgtcgtgctgaactggagatacaaatcattactgtacaatatacaatacaccaaatgtcctccttttttttctttttttttctttcggtagaacaacaattgtactaggagtgagtattaggtgcgagtgctcgagtgcaagtatatatgcagctttgtcagccgtttgccttcttgcagtataagccaagggaaatgccattggtaggagtagcaaacaatggcggacacggcgacacggcttagttgcgttcttgcatctggtgaatctggatcgctctatgtagagtatcactcgatcgatctcttctgatcatggcgaatgattgccgcagctcagcaaagcttgggggaagtgagttacccatagcttaatcatgatgtcacgcattaaaaccgggcagtacctgacttctagcttagctttgctgtaacgatctgcctttgtgtgatttttgaccgtgtgacgtaaaaaggcgattatataatggtccaattatttgcacaaattgccccaccgacgacatgcatgcccaaccggtgaacaacaatgagagctagcacacgtgtaaagtacacccggcgctccattgagtgagtggcggtcgtcacagtaacttagtctcgaagcctaattagattaagaaaaaaacgcgtgcagtgcaccaaaatacgtatataatactaaacacttttaggtggtgttattttctcctgaagatgaagatgaaaattaagtttttttttacgcaaaatgaggtggtattaatacatgattgattgtgttttaattattataaacttgaaaaatagattaatatgatattttagagcaactttcatatataaagtttttacataaaacgcaccgtttagcagtttaaaaagcgagccacaaaaattttaatcttcattcaactcttgttggagaaaagaaatggaccttactccatgatgtattgcttgtgcatgaactatggtagaacatccgtttcacaatgtaagtcattctagcatatgaatatgggaaatactagatatatgtctagattcatcaacaccaatataaatatgggaaatgctagaatgacttacattgtgaaaggagtacattatgtgtactgaagtacttaatattacacagcacagcagagtcatcggttcacaaaagcccgatcaaccgaaacacgaagcccaaccctcctatctaaacaggccgaggccttaaaccaatccagatttcagggcccaacctcctcggccctagccacgcgacaccagcccagggcgaacaacgcacgtacgtttccgttgatttcgagtatggctcgaggggtcggagaataattctccgaaccctcttgggttcacgtgaaccgtccgatcgtgaacgtgcgggcaggaagtggcccggggaactgcgagggtgggtttgatcgcgaggtcatgcccaactgtggccctgtttagttcacaccaaactttcccccaactctcaacttttcatcacatctaaaactttccaacacacataaactcgaaaaatgcctcagttcggacgtccgatctcagagaaaaaatcgaatacctataactttgctatgtacagcctcctatccccttttgcataccctttacatatgcttcatcactaagcattagcatgcatgaaggagaggggacacgaggctatttacatgtacacccttttagcaaacttgaaaatgactattctcccaaattacttatccaatctacgatccgattatactattatattcattacaattaaatatttacaacaagatgttacatgattatattataatgaaaaaacacacatatgtttcaaccatttaaatttaatgtttcgcatgtgagattcggatgtttcagctgagattatattatgttgcacattttataattattgtgttgcgatgtatgtttctttaatgtatcacatgg

SEQ ID NO: 18247 - DNA, 7367 bp, Oryza sativa
aacaagtatttactagttaattaaaaatgttgcacatagtattattcatatgtttcagtaaatattatacgatgtttcaatagttaacatcatgtgattaaattataaaaaaatcatgtgagatctttttataaaaatttaattataatgaataaaaagatataatcggatcgcggatcagataaacagtttaaaacataaaatagttaaacgtatgcaaataaagttaacaacctagaacctaggcatgatgcacggtcaatatgtaagctaagcacagtaggagggctatccgatctttagaatattatcggacatccgatggttagttggctcctaactttttttccaaactaccaactttctctaaacttctccccaatttcaggaactaaacacagcctgtataacacatgtaatgcccatatatgcatctcaccgttgagacgataaacacaattaagatgtttgagaagaaaattggttctgttagctaagctgatgaatcaaaacattctaccacaatttgcatgcaaggaggcaacaaaatgtgccaatctcgtaatcaccttaggtagaaggaagcttttttaagtttcactccaccaattcataatatgaacatacatgataatgtgcacggtcacagctgttcttgctaagtaaatgagaaaagaaccacataaagacatggtttactgaagtccataagtcagtaacattcaatccacatgaatccggcaagcattttacactttacatattctaatccgtcaatttgcactcagaagatggctggacgtatctcacaaaggatggctgtgcggagggaatgagttcccaagtcagagagtagtgtaggaaaacacatgagagggcgacgtcctctgtgacgcgcggcgaggcggcgaccgatgacacacctaactgatcaataagaccacacgtctgagtacttaatataagtttcgagggagcgtatcctatgcacataggccctcgcgtgtacacaccgtgtacaccaactaaaaattatcacaaaaaattttagaaaaattcatacatgcactttcaatagtattacatctacatgcaaagtcgcatcttcaaattcattctacatagagaataacaaaaaagataaaattctgacaaaattgtaaccttaaaactgtcagttttttttgttacggctaaaatataatgaatttgacgttaagattttaaccctaggtgtaatacaactgaaagtatgtgtatgattttttctagattttttggtgacattttttagttggtatgcacgtgtgtacacgtgagggcctgtgtgcataggatatgttgccaagtttcgaaccctaagtagactatataaatagagaacaaaatcaaaataggggtacttacaactgagtagtaatgtactccccgtcaaaaaaaactaacctatgatagaatttgatataatctaatataacgaatttgtatatctaatcatatattagttttttataagataggggaggatgcacaagcagttagcacagactgactgcacagggcacgacgtggcatgcttcgtgtagtttcaaaacgcacaaaaaaaccatacacgcccgcgacgaaacgaaggcagaaggttcaaggagccccgtcgctagacctgttgaacaagcccatgacaccaagaggcctagcccgttaaccaatcctgatttcacggccccgtccactccgaccactcggcctaaccagccggcggccgcgacgcccgccgaccagaccagcggaaacaacgcgcgccgctgctgcggacggatcgttcacggcacgcgtgaatgcgtgatccgcctcggcaaaaccggggcatcctcgttcgtagccgcagcgggacattctccgaacccccttggtttcatacgtaccgtccgatcgagagaagctgagaaggtcatgcaggggttcggaggatttttctccgaacctctggagggtttacggccgccgttcgatcgagaatgtgctttcaatttactttgagatgataaacaccaccacagtgagttcggctttgcaaaaccaacacgttgttcctgttgaagttaagtgagaacactaaaaccaaccaactccaataagtgtggctgtgagcctgtgatagaggatctgctgatctactagtatgctgctgctgttgcattgccccaatattacaaaaacccttctactactggagaaggtgatgaacgaggcaaacgcacgcatatgcatatcgcgaatttcaccctaattcttgctcatctaccactaactaaccagcttcctaagctaaagtggctatggacctcgcctaacgacaaggatgctttgctgctcatgcgtcggtccacgcggcgaacattggcaggtgcgcgatggacacgccggccctcgccggcaccgagctcaccgccggcgagggcgaggcccaggtgttcagcggcaccgggctgtacagcttcgacgccgccgcgggcttggcgaacagcgtggcgaggacgccgccgccgccgccgccgccgacgcccctgtcagggctctgctcccgggagttgcccaggctcgtcgccgccatcgacatgtgcggcgcgcgcggcggcgcgcccgccgcgtccacggtcgacacgatgtcctgcagcaccgagaaggcgtcgctcggcaggaggtcatggtgttggtggccgccgtgcccatgctgctgctgctgctccgttctcgccgccgctggcagcgcggcggcggtggccatcttccactccgccacgttcccggcctgcaccaaggcggccgcggcgtcggcgaccgccgccgcgccgccgccgtcgccgaccttacccttgcgccgcgccagctcccccgggaggagcgtgctgctctccaggatcttgtccacgtcgtacctcgtgatgtcgaagttggtgacggcgttgagcccccggaacttgatcgccgccacgtcgtacgcctccgccgcctcctcctgcgtgcctgcatccacaaatacaaccaatcacacacgacgacgaactcactcaccatcaatcaaaagtaaaatccgagttttcgccgccgccgccgcgcgcggtcaggtcacaggtcaaaccggcatggcgcgcgcgccgcgccgcggcaaaagccgacgcgactgcggcgaggggcacagcctttggaaaggaagcgaacaaaaggcaaaccaaaccaaccgcgcatgcatgcgcatgcatgcatgcgcaaaagcaccgctgctgcagcaatcaaaagcatgcaagaaacggcagggcgaaacattctttcgagctgggccatggtggtggccatggccgtgcagaagcagcagaattggcatcattgaatctagccatagctgactgaaggtcttatgatcattgtgacaggacacaccctgcgtccttaaaccgtgacagcctctgcaaagccaacctcatacacactttgctgctcatcgctgatcgatcacatgatgagaagaatccggacaagaataactactagtagatcatagtgcagttgcagagattggggaggaagaacactcactgaatgtccccaagtaaaggtccttgttgcccgagacgcggccgattcgcgcctgccatctcccgtgctgatgatgcctgcaaacattgacagaaaacacaccaagttaatcactcagttaacatgcttccaagatccatttgccgtatttttgctgcaaccatgtgattaacaacgacctggtgactccacggtagatcgaagcgccacgcgagaagccactgcttttcctgcagcaaacagacatggaggtttacagatgtcagtgtcacaatcttgttcgttcagtgacttggcgatttcataggtagctacgcagtgtaccttctgaggtgagccacatactcctgcctgctcatgttcttcatctcctccagctcctcctggtagtcctccaactgcccagaaaatggtgaaaacaaacgtcaatgatagccgtaacatcataactacagtcattcacagtgcccttgagctagcactctaaaatctaaactaaaatgtgtactgtttgcttgcaagaaaagcaacaaatgaactaatcagagttggtaatttaatcaccgggaagttgatgtgcgtggaagggccccagtacttgagcgcagcaagatcatacgccctggcagccttctcctccatgtcatacccacctagcaaaggttacattgcaatctcacaatcaaatctttgtttccaaaaactaatcaattcatcccaagtacttgtgtactggtactcaccaagatacactgcagcccatgccaaaagattcagcaggatgatcatgcaagaacatacatatacatttcatcagcatttaaaacataagaaagtgtgattaatcacaatgtcaagtttctctaaccttggcgtccttttctggtctggccttccttcttgcagctgttgtcccagaggtgtgcctcatatctcccagtccacctatgcctgctttttacaaggtttttttacttgaggttaagtgaagctgtgaaggtggaagccatggcggcatggtggcgagaggtgtctgtcactatggcgctgctagctactacctggtgacgcctctgtactgcgacgtcctctggccgaacgtgtcaatggacttgcggtgcaccggctgcttctgcccggcgcggtccgcgccgccgcgcttcttgctcacggcgtccatggccatgtacggctcgccggcggcggcggcctgcacggtgacgcagctggactgggacccggccgagctcatggacagggtgagagggtgcaggtggccgccggtggggatgatggggccggcggcgcagacgtcgtcggcggcggcgttggcgatgtcgtagccgccgccgtgcatcgccgcccagccggccgccactgccgcggcggactggtcgtgcaccagcgccgcgtcgtggccggcgccggcgccggggatgacagcgcactgcaggaagccgccgccgccgtggtgcgggtcgccaccgacggcgccgccgtcctgggcgtgtccctggtggtgaccgtggccgccgtagtagaaggcggagttgtccaggctcagcgccatggcggggcccgcgcctaggaaatcctccagcttgggcgacgccgacaccaccacccctggtcacgagtcaaagccaaccaagcgacataaagagacgcatttgctacaagccaaagcgaccatgaacgcaactgtagccacagcccaagtaagaagaacccgcgctgtctagacgaacaccagcacgagctagccatctctctatccagctactacttaagctagctagctcaccttgctgttcttggtcgcctccccggagtgcctccatgatgcagagcgagccgtcggacttgagcggcatggaggagaacccggcgccatagtacgatccgccgccggccgcggaggtgacgacggcgtcatgcccgccgccgtagtagaaggaggaggcgacggcggcagggttgtagaacagcccacctccatgctgctgctgatgctggtgcacgtggtggtggtggtggtggccgacatcgtcgacgccgccggcgcagtacgtcgccatgtgcggcgacagcgagaatcccagccagccgccgacacctccggcggtggcagccatgctgccgctgctgctgctgctgttgccactggccattgcttcggttatcgatgaggagggattcaggaggaggaggaggaggaggagggaatgaggcgatcaatcattggcgagtacatggcgcaatgatgccgccacatcctccatttctatcgacgcgcgttcggtttctgtgtgtgtgtgtttctgtgcgcgtgtggcgaagcaaaccgtggtggcggatgaggcgaggaggaggaatggccggtgttgttattaaggggaagaaggagaggagagtggagtgggggctttgaaagtgtgcaaaaggaataagttgctgatattggtcttgagcttgacccgttctcttttttttttcaaaaaagaaaggggaaagagtagtactactacaacattctgtcttctttacctctatgttttgcatggggatctgtgttcgtagaggtagaaaatattttccatattgcccatattgcggtggtaatctcgtgggtaatatatcttgatttttcttagtagtcttattatgattttcttcgagtaacccgcgtggttatcgtgataaccgtgataagaatcggtaactaactcttatactaaattggcaggagaaaaccttcgtgatatcaactatagtagctaacctctattaagggtcttttgatttggaggaaaaaatataggaattttggagaattttaatcttgtaagaaaagttcttatggatggctttgaatcaaaggattaaatcctatccaatcctttaaaattactatagaatggacaatcatatagagattttgaaaggaaaattagcaagagctcaaagctcttggaaaatttctttgagttatctctctcattcgattcaggtgtttttcctaagaaatcaaacagtcatttctatgtttttttttctatgttttgcaattttttgttacggcttcaaaatcatgtgttttttcttgtttctttatttttttaatccctataatttaaagggacccttaaaaccggtaagtgaaaacccagggtttgatattggcgatattgtccaatgatatgtactcttacaacaccaaatctcagcttctgtttttgaaatgatccgagtttgattttttataataaaatgggataaagccggtctcaactctctttaaccaacccaaaattatatttttagacgatgagtggagtagtacgacgagagtaaagagattcatttgcaagtctataaagttaaccaacctttaaatggcatcctcaatttatgttgtgtatagctagaaatacacactagcgctttgtttagttccacgctaaaattaaaagtttaagtaaattggaacgatgtgacggaaaagttggaagtttgtgtatgcaggaaagttcgatgtgacagaaaagttggaaatttgaagaaaaaaagtttaaatctaaacatggccctgtttggatccggagggctattaaatagccctccagaatcttgctatttaggagtattaaacgtagattactgacaaaacgcattccttaacccctaggctattttgcgagacgaatctaacgaggtatattaatccatgatttgctacagtgatgctacagtaatcagtcgctaattat

SEQ ID NO: 18248 - DNA, 3216 bp, Oryza sativa
ctgaaggagaatagcagctgtaccagtacatctgtggatatctatgctgagactctctacagctcttgccagaattgcctggaatccttgttgaccttgtttcgacaagcgactgccgacgattttgctgagcaatccttagaccttaaagagccagtttttcgacaaattgctctagaagcagataatctcctttggttaactgagattttggccgacaggaatgctgctggtgagtttgcagtcatgtggtctaaccagggtgagttggctgagcttcactccaagttaccaaccaagtcgcgccatcttgtcagctgcgtcacagcaaggctctttgtggcaattgggaaaggagacatgctcccttcaaaggacacaaggaagcttctcttggatgtctggctgcagcctctcatggatgactacaactggttacagcatggctgcaggtcatttgaccgcaaagttgtcgaggaagggatcgggcgtactatcttgacactcccgctcgaggatcagcagacgatattgctttcatggctcgggagcttcttgaaggttggggatagctgccccaatctgcagaaggcctttgaggtgtggtggaagaggactttcgtgcggccttatgttgaacaagggaatcaatctcagccgggtcggagttgaggtctcaagtggttatagactgcaagaaaaaattgtcatcttttttcatgtagaatatcactgagaaagtagtggtaatgtcttactttttagataatgggtaatgtcttactcggtttgctgttagggagaaccccaggaaatgaaaacaaaatggggatgtaaattagtacttatcttgcaaggcttgagaatatgtgcgcgttgtgcttctgatgcttcattttatcaaatataagtgaagctctctgaattctggttgcagaatttcttatctgcttgttactatcatgacatcagtttgttgcactgcaatgaatattgcagcattgtgcaatagtagctttttttttactgtaatatggattcatgtacaaactcaatgtttacaatgcaactgtaaagatttccctgagatgtgccctctaaaatttgaaagaaaaacaaccttcatatttgaattttacttaatttacagttacccaatcgaattatactatgtgaaaataaagttggtacatttccttgttatgtcggcatattgttatctgtcatttccagatgatgaaaccatggtctcattgtatttcaaatggtattgcataaccaatcaaaactcaaaagggtgagcggagtgagtgattgaaaaaaaaattgttatttgtctgtcctatctatttgttgtttgtctgttcttttgttttctttttagctcactggctatcctctaggagttaataccaatatttttgtaacaaatctaataaatttaactgtggtggttggcatattgaatttttttggtgttttttttttttgggggggggggggggaggagtgtgtgcaaattgtctattttaagaatatattggatctatccggctatattttagaatatttcagtgtttttggataataagaaaagggtgcacgatctcgacgatttattcctgaacaaatacaggtgaagccaagaaatcaactgtaactgtttcttttcttttgaaagaaggaaatcaactgtaactttactgatacactggattaagtgtgtggcacaccaaacaactcaagatgacaacaacaaatttgctccaggcaagcaaaagagctctgaagaactcttctgccctgtaaacaatctgcaatgtgtcatctggatgcagcagacttatcaacaacctatagtagcagtataattttctcaggactctgaaactgaaaaacacctcgctgagtcactcactcgctgtagcagcttcaagctgaggcattccatggacttagctcatcatcctctggaactcatggaagtcgaggccgccgtcgccgtcgacgtcgtaggccctgatcatggcctcgcagtcggcgaccgaccgctcgtcaccgagctgcgcgagcaccctctgcaggcccctcgccgtgatccggccggcggactcgacggcgttgaacacctcgaaggcgctcctcaggtcctcttcttggctgtcacctctctccatcagggcaacgaatccggcgaagtcgagcatgtagccggcggcggcgccgccgccgcccggcgacggcgccggcatctcgtcgcccatggacgcgaagaacgcgctcagctcggcgccggagatcttgccgtcgttgtccctgtcgaagtgctggaagatcctgtgcagctcgccctgccttctccccgacgacgacgaacgggcggcggcggcggcgccgccgccgccgcgtgggctcgccacgtcggactgcccgcagagcagcggcaggccgagcctgaagctcctcttgcgcgacaggcgcttcgccggcttaggaacactcgcgttcgccattcaagaaacccaagaaaatgtagtagaaaagctgtgtggtcttgtacacttgtcagcaaatgccaaattgccaatgcagctatggaagaagtgaagaacaggtgaggtgtgctcctccatttataggtgttgagcaatcatctttgtgtgtgtgttttgacttgactgaatgccatgatcacaaggtagttagggctgcatctgcatggcaactaaccttgcacagtgcctcagatactgtcagcttggcattatctaactcccaacagacagtgccatcacatgctcatgatcctcgcgccgccgcccaacgaacaacgatatctcggaatccgtgatttagttatgagttcaagattccgttggtttgaattagtgctaatttgagagagacccttgacctgacgagtgagatttcagtctttcactcaaaaaattcagtctttgctggcttgcaggtcttcagaagctgacagggaagagtaaactgaatgcagtgaagcagtgagtgacttgtgaagaattcagattcagtagacatttcagttggtcagtgacttctccttgtatttcagagaaggggggaagtatctaaaaatagggaagatcattcagtcctaaatgattttcggtgatcatgttttcatcaaatgcccagatttgcatatttcttttcagtggatattgagatctgaagagagat

SEQ ID NO: 18249 - DNA, 4454 bp, Oryza sativa
atggaaagcttacattaggaactgagagtggcacatgtctgtgtagcatcaccacatggcagtagatgtgaccggttaattagttatagataaatgacctacctgaaactcatgattgggttcaagcatcgaaaatgaccggttagaagaatctttgcttgttagtttatgttcatccttgatttgaccggtatggaaaatggtatgtaccaacgtgatctagatggacctaacaaaacaaggtactccattgatgctccaatgtcaccacaccgaccacagcaataatgattctcgttgacaatacaccttccattcctatctcaatgcaatactgccatggaggtatttacacacatatctcaaaaaccaaccaaccaatcaagcatctattgtaatatataagtttgtatgattttctacaaataggctcccaaaaacagttacaaaaccagctcaaggagggtacatctagtaatttggcacattgttctgttgtaaatttgttatgtagttacattgtcagttcagtttcttctcggtatattgtatcatgaccgtctgataaacaaaatattgctgtgtgccgttttgggttgtatacagagtgggatcagttgaatcatagcctatcttccaccgaaaagacggtataattttatgtcctcgaagatgatttgtgaaatccagcctcaaccacaagtgaacatttgcaaattttttcgaacagcccaatctcaaaataaaaattccttaagtagcactttgtttactatcgatttttttctcattgacgctaatcaattctggcaccttatcaagtaatctgttcatctcttctgaaaattcaagcttggctcgatttgtctttcctccgatgactactgtacttccgtcttgcaatgcccatatctagacagaaatcaaatcgtaaatctgtagcagttttacaatacttatatttcaaaaataatcataggaagtgccatatgcacacacctgagaatgtgaaagataactaatgcaggtcgttaacatgagtgcaccaaatccagcatacacaataggaattcctggatcagtctgatggcaagggaaataaatacaaggcacgtttaatgatatatcaaacatgtacaaaatttctgcaaattcaaaacaatttatcaggagcactgaccttaagatcgagaccggtgctaccgatggcatcttcaataactatttcgttaccatctatttcaatcggtagttttgagcttggccgacgaacccccacaaacttaccctcttgatcatacaacacaatagactgcagatctcgagcaagcatcgatctacaagccatcaagagaagaagttaatagcttatagggaatgtgtccagtttatcatttagctccaaacaggggaagtgttaaaacttacattcctttgacattggaagaaccggagttttcaagtggcaacaatgttccaaataacttcttatcaccattcaatttcaagggggccatggccaaattgaaaggaccttcaccatttttctttacttgcaatgctgaaaatccccaatcggtttggtagattgtgaccccaccatacctcaaggggtcgttcactttgatagtcttcctcatgacctctttgccatcaaggtcgaaaagtgaaagatcgctatagaattgtgaaacctggaaagccaaaaatatttgccacatgtaaatctgacatcacacaagcatatgaaatgctgggcaaaattgactacctctccactatcatagtactccatgtagaaccgattgacatggacttcagtattaaaaacatcaggcacaaaagagagaactcctttaggtttcatcacatctccgattacaaagttcaacccttggggtacatccaccgatcctttaaagctccctgttgcgctaagcgtggcacctgccatgatgaaaatcatagctatgtgcacaccgataggcgcaaaccgaccagccagtcctttgaaagcatacagagatggacccttagtgaatacctgaaacacacatcaaacacacatgatttaaatgcatatcggagcaaatgaaatgcacagaatgtgactaaaatcacctcatatccataacccatcaatataactcctaaatcctggatggatgcgcggggaagtgactccgcaaattcttgcttccggatgcttcctgctgaatgcatgaacgaccatctgcaagaaacaattgatcagcgcttgcaattatctacaagtataactcatgttctgaattctgatcagacaaactatcattatcaagaagagaaaacctgcacatcagaaaatggccatttctaccttctggcaaccttgacaatggggatttgagtggtgtaagtgcaggccatgagcgacgccgcgagcagcgcgaggaggccgaggaacaccggcgaggagaacatgtgatcgaacccgggagtgaggatccacctccacgtgatgaacccgaacaccgggttgtcctcggggaacttctcgaagtagtagctcggcgcctccccttgatcaatcaccgtgcctgcaattgcaaatcgcaaattgcaaattgcaatcacaatcatgaataaaaaaaaacagcaatcacatactggcaaatgggcaatccattccggagaagctaagctagcgaattcgaagtagtatcaaataagcagcgaatcacctaaggccatgagcgcggcaatggcgaacatctcggagatggcgagcgggaggttggagagcagcgacagcgtcctcttcgtcaacctcctaaccaaccccaacgcggcgttctccttcctcctcgccaccttcccctccccctccccctccccctccccctccccgccgccgccgccgccccgctgcgagaccggtggcgcggcgtcgaagaacacgacctgcttcttggccttgccggttccagcaggtatggcctcgcgcttcaccccaccgccaccgccaccgccgcccgtcctccgcgcgtcgcaggagacatggacccgcctgcgcggcggcgcggcggcggggagggggaggcggggacggtggtgggacctggaggcggtggggttgaggagcaagtagcaggtcggggaaggcatggcggggtggaggagggagtgacgacgacgacgaggaggcgcatccgcatcgcgtccgttggctcccccgcgcccgcgcgaaaaatagggcggttgatgtggataaggcgcgcgtcgggtcgtacgtggagcggcgaagacgaaggcgtatgggaggaaattatcttgcaactgggccggatatttcgagggattaactaagggcccatgatgtgaacaacgacggccctggatagatgggccggttgcaagggtccagtcttcatttcatggtctgactagtatttcttgccagtggcagaggacggaaaaaatagtaggtgtggcccatggactagcgcgagaattcgagcagaacaagaagtaaggggaaaaaaacaatctcaatgcccgatattatatgacgcaacattatcccatcatgacacaatctcaagcatggcaacaagcactagtccaaagttcacaatttatcatccatttgccaaaattgtaaatagaataggcattcaaaaatacctcaagattccagcgttcagtaacacatataggaacaagtgaggatagtagataaacatgtagaaactgcaaaacaaatagcaaaaaataaagattgattagtatattatatacttgagattgataaggtaaacagctatgagtggaataaaatgtaaaagcataccaaacataaaatatttaattgcttctaggtctaggagatttaggcaattgcatttgcctagttttctttttatgaaatgcttttttgattttttgaaaatcaagtcctttgaatatatctctctcaatgttctgaaattgtcaaaaattcaagaatatgtacctcttttgtgaagccaatgcctttccttttctctttctatccattttgtgttgatttcttcagttgaatccttctctttcttttgttgtttgctcggcctgcctgcagcctgcctctgcctggcaccgccccgccgcacccaccctgccgcctgcgggctaccggcggccgttagcccgctcccctcctcgaggccgccctgcgcggcagcgccgccgccacaccgcacggctgccggctgccgcttccctccgcgaccgcgagcaagcccgccgcgccgccgcacgccggcgcgcccgctcccctcagcgccgtgacgccgttgaatttcaccgatttgactaggtgctcggattggagaattggggaaatagggattagggtttcaaggtcatggtcccactcccatttacacaaaaacaagtccaatgggcctaattggggtggggggggggggggg

SEQ ID NO: 18250 - DNA, 9860 bp, Oryza sativa
cttcttacgaaaagagtatttcttcgcatatgtgtctgcgtataatgaaaatgggaaaatgtgtaactctttttatattatacgcagtcacatacgcgagcgtacaccactacataagtaacaccacattcacacccctgtgaatacgctcctaacatatactcagagggatataaaaacctgcggtacatctctaatctcactaattacatgttagaatcacacctacatgtgcgcaatatttgtaggcatcaatattaaaatcctggtgggtgaagtcatgcatacagaactacaccatcccattaattatacttttcccgagaaaaggtgtaacttggctctcatttcttttcgatcaatttggtcaccacaagttttggggaaagtttagccactaggaagtgtgtgattctgtccatttcaaaaggtgtaccccccttgatggaatgagttggacatcgtcatgaccgaacaatacaaaaccttattatatttcgaattttgaacaggtattaggtgagtcagtgttataaaaaaaattgtaaatggaactagcgcatccgtgtgagcgacgggggcttatgcatggtgttcttccgtctgaattgatcggaagaaaaactgtctccagcagaaacgtccagtattatcgagaaagtcaagaaatcccctcctgtcaatccgatcgagctacggaagcacataaacacggccgtctctgtcatcgtaccagtcaccagtccacgccggttcaacagttaatgacgctcccgtcagctgaaaggtgcctgcgcccctgcaaatcattcagctgctgctgcatcctgtcgatctcacgcttcgttgaaccaaccgacagcacggcggtgactcaccccggcgactccgccgtcatccagaaccaaaaaaagccgtcctacgcagttttacgtgctactactaccgtcccaaaataagtgtagttttagcactattcatatttaacgtttgaccgtttgtcttatttaaaaaaaaattataattagtatttttattgttattatatgataaaacataaatagtactttatttgtgactaatttttttaatattttttataaatttttcaaataagacggatagtaaaaacgctaaatacggatatttatagatacacttattttagaacggaagtaagtactaaaattgcacgtatcgaattcaaaccgaacctctgatcgcatcgaagcttccattgccacgttgtgtctttggactgcagagacgtgctcctacgcggctcttggggctggaacccgcgccgccggtttcgagcgtcgtcgggcgggcgttcgctcaccgcggctccgtcgccaccggcggcgcgcggcactcgcgcgcgtttgcccaactgaatcaactgaagtgatgagttttctattccaaaatactatatgacgtggtagattttcctacagcgtttaattatttatcttattaaatattatttattttgttatcacttgtagcacaatattattttatgattttgaaatgaaggtacgtacggcatcgagtagtttcttcaaatttccttgtcgaggctgatggataggtttgctgcctgccaagatttaaacaagcaagcaggaatcccgttttctaacaaaaaaagcgagattggtagtatttctatattttactaccagttggcgcaccacgcaggatgaaaatatttgtaaaaggcgacggcccgctccagcggtccagccatgatagcaactcctctactgcacagtagtgcgatgaaactgatgatgatttgtgtgtactaattccactgaaactttcaaggctagcagtaacaacaactgtaaaaccaatcagcaacccaatccaaccttcctccgtccgaccagggcatgtaaaattctgtcacgaactgtgtaccggatgccacgtcacacagttgtctctgactctgtgactcacgcgccgccatctagaaggataacaggagcacgagagtgagtggtgggcgcgcgcgcgcacacaggtctttctcaattctcccctttcctacgcagttttcgcccaccgccgccgacgcccctcccgtcccgtctcctcttctcttcttccgcacccaccgttgttttgaccctgttttcacaaaacaaaaattttttcactcatcacattaaatgtttagacatatacatagaatattaaatgtgaaaaaaaatcaattacataatttacgtgtaaattacgaaacgaatcttttaagcttaattgcgtcatgatttgacaatgtgacgttacaataaacatttgctaataacatattaattaggtttaataaattcatctcgcagttacctggcagaatctatgatttattttgttattaaactacgtttaatattttaaatgtgtatccgtatatccgatgtaacacaaaatccaaattttttccccatccataaacaaggccattgtataagaggcagccctaccctccaccggtgagagctccacgtctccaaccaaattccatcgtcttcaacccaacccaacccaaacaccaccatgagcagggggaggagcaggctgagctggctgtggagggcgccggcgagggcgctggggagggcgcgggacatgtacgtgcgggggatgacggggtgcgcgcgctgcgtgccggcggacgccgcgttcggctacccggtgttcgtgccgtcctccgccgccgcctcgatgaggagcaacagcttcgggtcggactcgcggttcggcggcggcgccgacgacgacctccgggagctgatccgcgcggcgtcgcagaggcgcgccgcggagcaggagcgggaggcgcgggccgtggccaggagccagagcatggcgtcggggatctccatggcgcggatcgacgaggacgcgccgtgcgaggagttcggcgacgccggcgtgatgcactaccccaggagccagagctgcgtcggcggcgtcggcgggaggatcgctcactgtcacaggaaggtggcggccttggcctgagctgctgcccgccggtcgtgctcgcgacggtgttcatcgccattaatggtcttctctggaggtctagtagccattcaaactttgggattttgcgtttgtaaatatgatttttgttgagaattcgtgagtcgtaattgctatttttgctgctgcaaaacaggggcaaatgcaagaaactgaatagtattttcggaattgctatatgtcacgcaaaagttagcttaacttagtttttttttcccttttagcgtatggtttaataattcacctgtcacgttacgcactcatctatccaaatcccccacgtaagcatacaccagttcgttaaacaaaaaacagcgccaccagcttggtatggccacgtctgaattgaaagcaggactgcagcttgccaattgagtacgcctaatccaattaagtgccaaattgtagaaaattaacggccaaactgtagctaaatttatgtagcacagtggagcagtggacttcattctggaatgcacctatcattagtcaaagtacactagttcggcttcatcattagtcaacggcaacatctaaatatgagccaaacgtcggctgcccaatggctcatttgaaacatagggggtggattttagaaatacgtaaataggaaaatttgtagaagtgagatgtcaaataaatccggcagacatagaaaagacagaaatttacaaagtgtttggatagctgataaggacaataacataggatttttataggttttagagagagaagagagacagagcattggacttctcgaagaaaaaaaagtttggagctcctattcaaaattccctatggaattggagtataggattgcaatccaaatgaattttcctatgttcaatcctatattccaaataacctagcaaggaaattttccatacgatttaaatcatttgaaatcatcaatcaataactcccctaaccccaccgtttttctccttttttttgaattatttttaggctccttgtttaatttagacgttgtcttttactgttttgggctcctcatgcagattagcttgactgctaataagcagttttcggttagtgtactgttcaaagattactaagctttgccttgtgtccggtaccatcaaccgggtgttggatgtttatgccgtgcatgcagggcacgtatgctctatgcgttttttcaaaaaaactctcaatcctctaggaaacaacgaagcagtcctcctggagattcatccttattctaatttttactaaaaaagccttacctttatatgaaatacaatgtgaagaagagaaaattcggattttagggacagcgctgtaatcccaaaaagtacgagggcattctaaaaaaacagatcctaatccaatccctcctctttctctgctgccaacccatccccaacacgcaacatctctctgcccaatcctcctcccggccaatccgccatccccatccccggccaatccatgcggcctcctcctcccggccgggggcaaggacggcgccggcgtttacaaagacgacggagcaaggggacgacaacattgccgccctccaccatgcctcctgtgctgccctcctctaccatgatggcctcctcgaccttgtggttgcgtccacggggggagggaggaggcggcacccgcccgagctgccgccggtgctcccctcctccttctccatccacttgtggtgacggcggcggcgggtggagggacgcccgctgaatccgccaccggttctccttccctccttgttctccctccacttaggccggcggcggcggtggtggcggggggagggcagatccggcgcccgacgccggcggatccgccgtcgtgccccctcccttcccttgtggcggcagtggcgagggtacctacgttggcggcagagccggctgcgcgtctgccgccgatgcccttccctcatggcggcgtcggaccggccgcctgcgcaggactgccgtacgtcttcccccgtcgccgcgttgcctctccgtcctctcctccgcagcttcccaaccgttcccctctcaactctcgacctctcctctctacgtggaacaccatgaccgtcgccgccgaggtcgacgcatcccctgacggagaggagaggaggaagcaagcttgcaatcgcacaaccatctatcgatttctcccttccttctctttcttctttctttctttcgtttccccctctcacatgtcaggttattttttctcctcatcctctccggatgatttcacttttgctcgaaatctctcaggttgttgttgtgttgaaggtggcgaagggggaaactttggtggtggtggtggccggagtggaggatggcggcagcggtggcgatgcccgatgcggagcggcagcggcagtgacggcagcgggtacgacaaggccgggatggactccggcaagtacgtgcactacacgccgggtcaggtggaggcgctggagcgggtgtacgccgagtgccccaagcccagattctctcgccgccagcagttactctgcgagttatccatcctcgccaacatcgagcccaagcagaagatcaaggtctggttcccaaaacagaaggtgagcaaaagcatgcagggatatactatcaaactggtttgccttttgtgtgtctggctgtgaaatgttctggacaaattggttgacaatggagcaatagcaatagtagtgttcaattgtttgccttggttgtgcatactctgcttcaactatatttaggaattgcaagtctatgtatttatttgttttgcttcctttcttgcataatggaacaacctttatataatcaaggaagaatactgtacttaccagagtatgtgccagattaagccatccattaattagatgctgaagtaaactatatgactatattgcgatgtattctaattccactacttacaaaactgtagggtataagatttgcttatttttagaagataggctaaacgagggtcatttaggtcacatggccaaactaagacacatatacataacgtattatcatgcatctgatagtaatgcaaaacaatgcagtactatttactttcactgcaggtatttaggctctatcttttatttttctcaagaggcacttaacatgatatacaaaatttgaagagttacattttttaaaaaacttctatgagttctgcctaaatgattgttatccatggtgtgcctaaataattgttcgatctagaggtgatccaaagattcgtctatattagacgtaacaataatgcagtgttttttttgtttattttttagcctacaaatgtttgacaagaagaggatgaaagagtgacataggcgagctctgtagcatatatagaatgtttgctatccactggtacatctttaacccgagcctacctactgtatagatgtgtttagtacgtgcttactatgcttaattttggggataatatagtacgacgtgtaagaaaattcagaactatgttgtatgctctagctgaatttgtttacttcctacaaaaaaatggatgaactactgatccagttcatgttgtgatcctcctccaaggagtttttttttgtttctttgctatctgaaagattccttttttttttttgctttgttgaagtggaaggagctcattggtgtacctttgttgaaatggctcctttgcatcctcattgtttcacatgtctgtttcatttccgtttttaagggactggccttattaaaggttgtttaaaagcttgaacaagacttctatttgattgatctttagtccctattttacctaccaggtgaattgtcgcctcgggtaagatattgctaacagggaattaactctatttcattgccttgtaattaacttgttatactaaatcagaagattctccggaggaggggatcagggggagaagaaaccaaagaaatggcagcaaccctcttttttccggaggcgatacattgatactacttcgatagtagtagcagtagtagtcgtcgtctatatggatatagaacgctacagagttcactactgctttagctattgatactacttcaatagtagtagcagtagtaatattttggaactaaacacggtcatatatataagcaactgcaacgaggctatagggtcgtaaacaattcactgacacgtaccgggcctctccatgtttcatgagacacacgtcatacatgtagcatgaattatgacggtaacagtacactattcactatttatataatcttggtgggccacagaagccggtggagagtgtcaaagtttacaagaagactcatctcccagctaaggaagcatattttctgcatcaaatcctctttttatgcaagcaaattaggcattaataagtatgttgttgattatatgataaacaacttatactatgaacaaataaaatgcatccgtataagccgactctgtttacttgcaacctgtacactaaccattttaactgtgcgtttttttaatccatgtaaacaatttgcatgctcgccaagtgttgcattctctgttttacagacatgctacctgcccttgcaactgtttagtgaagaattttagatatctactcggctaattccacacgaaacacaccttcctcttcattatatcatctccactcattgacatacgtatctaaacccggaaaggcaaagttaacttaagcgtaaagcccagaactaatagcccaccgataaaataacttttcaacacgtacataggctggtgaattgtactcttcacaggctgagctgaaccttaggttggctctaagtttgtctctattagcatcatggataaatgcacaaaccattagacaaatattaattactcgttgcaattttatttaatatacgttctgcataataaacctattggttctcgttatcaaacccatttacaactaaactctgcttttttgaccaatctctgttgtccttacatcacatgttaccatttgctttttcaaactgccccattttcacctgcccttacttcataaaaaaaatctttcccaatttctgttaaacaaaaaagccccatatcatactgtgttgttcaatcaaattaatatacatataatataccatagcgtaaggtctaactgaacttgattacgtacacttctacctacgcaagtgttagcgtgcgcggcgtggcgccgcgctcgcatttctagtttataaaacaactctccattccaaaggcgccctaattggaccgccacatatgttttaatcgcgtctagcccactgaatgtagtcctcaagtatgctaggaataggttcactttatgtccaccttaaaatcattcgaactgatgtgtctctcaacttgtaaactggtgtgtctgaggtccaggagcagtataggggcaatatagtatccggttttgactaacgtgacaaattaattaatccccgcaccaaatccgcagcctcggtatttgcaacattgccctacacctccacgtcgccctacaagttgagagagatagagagatggggcaagacaggggagagagggagagaggagtaataagactaggtctctgacatgtgggtcccacatagaccccacactgactcagctaacctgatcatagtcaactagcatggtgacccgcgcagattgcgcggctagcatcattatattttatctcatataatagcatatatgttttctcattatattattcaaatatattaaaatgacaatataattttaaattttgcaataactttacaaaactactaatgtgcaatattcatattatattttatatacgtgttagttattaattatttttaatatcaaattttagttatttttaaattatatatattcctatatggactctagactcgtcttttaatatatttttttaattccgaattttctgtaaattgtatttctatatagactctatgctcttcttccaatattatttatttttatttttgaatttttattatttctaattgtatttcaacgtgggctctactcatctttcaatattctttaatttttaatttcgaatttcagttacttctaaattgtattctatattgactttaaactcttattcccatgtttttcttaattttgaattttagttatttgtaaattatatttttatacggactctaaactctacttttaattttattatgtttattccaaattttagttagttttaaattccaatatggactctatactctacttccaatattccttattttttaatttcgaattttttttcttaattgtatttctatatggaatctataatctacttcaaatattccttatttttaattttaaatttctattatttcctaattgtatttatatatggactctatactctacttctaatatcccttatttttaatttcaaatttcagttattttctaattgtatttctatatggactatatactctacttctagtattccttttttttaattccgaatttcaactatttctaaattgtatttctatatggactctagtctcctcttctaatattccttattttttaattacgaatttcaactatttctaaattgtatttctatatgcactctgccttttctttttctccgattaatgtgagaatttctaggccatgagagcgaacgtggaggctcttttttctatttctttaataatataatagattcttcatgtcagcgaaaaccgaacacaatactgttttaggacctaaggaccctaaggtgctttggttttgcaagtcgaggaacacgtatctag

SEQ ID NO: 18251 - DNA, 2527 bp, Oryza sativa
attcctgcagcccagtcccgttcggattacgcgagatttcttcgtgcggaccacaaactcaaccaactccgtgtaggccccacaattccccatcgccattatccgccggtcgctcgccggagtccccacgaaaaacacgcgaagggaaaaaaaaagggccaaaaaaaaaagaaaaaaaaacagagagagggagaccggcacggtacgcgcaccgcaccacacgaaccaatccgaaaccctagctccggcgagccgccgccgccatggacagccgcctcgtggccttctcccaccgccgccggcgctggatcctcctcgcggcgggcggggcggcggcggtgttcggggcgtacaagatctaccaccacccggccgtggcggcccgccgccgccgcctcgcgcggctggccggcgcggtcgcggccttcctcgacgccgccgcggcctccgccgacgcggcggccctggtggcctccgacctctccgacttcgtccgctccggctcggacgagctcccccgcagcgtcacgcagctggccaagctcgccgcgtcccccgaggtctccgcgaccgtctccgcgatctcggaggccatcaccgccgggatactccgcggagtcggatccgactccgggcccggctccggcggtggcgtggccctctccgatcgcctcgtcgacaggctcttctcggagtccggggagcgccttgcggctgccatcgccgggagcttcgcccgccatctcgtagctgctatctactccgcctcttcgactcccggggagacctcctcgccgatgaagtgggtcaacttgattgccactggaaagggccagaaggcgattagtaattgggttgaggtgttcgtgagcacagccgtgggggtgttcgttgacaagacaatccacatcaatacctatgatcagctattccaaggccttaccaatgcaagccatgatgctaaggttaaagaattgcttgtttcggtatgcaacggggcagtggagactatggtgaaggccactcaccatgttatgtccaatgccaattataaatcggttggcagtggcagcaatggtgctggggaagggtgggtcgagacagtgtcgagcacattggcagttccaagcaacaggaagtttgtgcttgatgttactggtagagttacatttgagacagtgaggtcgttccttgagttcgcactgtggaaaatgcacgctggggcgaagaagggtggcaacacagtgatggatagcggactgcgcgcgatgcaatacatgactgataagtctatggttatcgccacaatatgcattacactttgtttgcatgttttgaatggcactcggctcctggtaacagcttgatgatgtgttcaagatcaacacgggtgtatttggattgcattgttggtacatgacttgtaggaaaatttatactgaaactgtaaattcatctagaaaagaagagctgaaatgacgtaaatgatttcgtgttgtgtttgagattgttattcaaaactgctgtgccgggattgttgatttgttgtgcccttggggaagtgtatacacgggaacttttatagtgtcatgtgtttagattgttattcaaaattgctgtgccgggattgttgatttgttgtgcccttggggaaatgtatacacgggatttattgataaaggagatgtgatttgcattttgaatgaactagtgtcattgttacatcgctgatatcatcaggcaatttttatcagtttaagattgattatgcccattactaagctttctggtgatccggttgctccaccaatttgcgtagttatgtatttcgttcttgttaccaaaattctacttccaccaaattgtttgttatgttgcagcatcttttttagccttgtattgtccagctgaactcaactttctcatgtgaagtatcaagtatctaaagtttcggtttattgttctgaaccagtttagactagtcctgagtaaagaattagcaatttgctatccatcttgagtatcataaaaattttagcaggtcatacctagtgtatattatctattgatgagatctcacaatcagtgctctgtagtgacctttattctttgttcttggtccaaaagataagactagtataccagagcttagttcatcctatccccatgtgatgcatcttggtattaggttcagctggcagtaataattctcaagtggtttttgacaccgtggtagattcagttccttttaattccttttggacatatggactgaaaggtcagaaagaggaggaaagtaacttttcattatccattgtggatttgtggttggcggaggccgttttatacaattttcagtgtttgtgtgtttgtcttaccaaagtcatacaaatgccttttcttgttttctctgcaaaatctgacatatccagttttacactttagtaattggaatggccgcaatatgaggttcaagtcttcaagaagacttgcccaacgatgtcatctgcaccatgtttatcatgta

SEQ ID NO: 18252 - DNA, 2544 bp, Oryza sativa
atagggatgaaacccatatatatatatatatatatatatatatatatatatgaaaataagcttgataggttacatctgtggaatcaaggttctatacttctattcttatgtagatatagtaaaatacactactgaaattaatgcattcggcaaaacttgcaaccacaatgtaatttacaaaggagttaagcttgtcgtgataattttgttctacctaattggaagttttgccacctctttgtaatttacaaacgagttaagcttgtcgtgataattttgttctacctaactggaaattcccttagatatcttctgggtggtgtttactttacatctcacacctttactcctaagcacattggagttatgatctagttttgtcattatttgagttttatttgtttatataattatttttagtatgtttttaatcaaacaacttattgatgcatttgataggttgatgttaagagagccgagcgtagacatgatcataagcaaaccagtccatctattaagaaccaaaacgacagcgtgcagaaaaatcaatttatttttcaaaagaaggtctttgttggtggtttgcacgaaactgttacagtgaaggacctcataagttattttgagaaatttggcaccataacggatgctgtggtcatgcgtaatagaactacaaatagagcaaggggatttggtttcatatcttttgattcacatgaagctgtgtgcaagatactactaaataggttccataatttaaatggaagggatgtcgaagttaaaattgccgtcccaaagagtccaacctactcagaggcaaaatattatcacatgagaatggatatgagtttaagtcctatcacttattatgatggaatggtccatgtccatccatacacaccatacacatttggctgtgttacacctcttgctcacttaactcattcaggttatggttatggaggacctattgattattcatgttatgcttatggaggaccaattggacatcagcatgatcttgtgggttcttactattatgctaaagattatagcaaaactactcctatcgacctcgataccacagataccacaaagaaatgacttgctggtgagtgctacttatgtggatttaattatttttataatatattttagtagatcaatagtctcttatatctttaaatttttacttgatttgctaccatttgtttatagtgtttcagatttacttcaaatatatatgccccatgtttttagttgttgattgttgattgagtaactaatgactaatggatgtgtcttaccatgacatagttgacttttattttatgttgtatataatttggattgtctttgtggtttgctttactgggcaccacaactctttcgatatttgcctttcatacaaattgatattataaattcagattaaaaaaatgatttaaccatttattcagttatcctcttcccactcattttaagttattactccattacaaaataaatgtttataggagacaatgttcacaaactctcaaaagttttacattgaggaaagttttactgtacaatcgatttttgtttcccctattacatatcccttaaggtctatttataggtttataggcaggtttacaacctagggtttagtgtgctaataatttttatatataattgtttctctgatagggacatatatataactagcatcttttggctcattaggctggttcatcgtcattattcggccaccaccatgccgcctacagggccttcctcttcttttttttttggctttcgtcttacattgttaggctttcacaacctggtgctttgctcccttgtttcgcctagctccgcgtcgcctagacttcataccgcgccgcttcgacaagctcacttgttattatttcacctagcctcgtgtcatctggccttcgccttgcgctgcttcgccaggctcattagttgcttcggcatgccagtcaaaggccctcatagcatgcctccaacaatctttaaatatcaaaaatatttgattgaacaaaaggattttaatttgtcattctgttatataatatcatttatgaaggacactatttgatacatataggaagttgtctgtaaatgggttgacacttaccgctacagttgggtccaaagtttaagtagatgcacacaacaagcctaataaaacaatataactaacataccattattggattcatggtttgaatgtgtaacataaactaatgatattattgtcgcgtacaaccacacaaacttgtccggattcatggtttgaatgtgtaacataaactaatgatatttttatcgcgtacaaccacacaaacttgtccgtattcattcagttgtgttgtttcttagtataatggtactccttttgtcctggtgtactttactcttactttcattgcaaggattatttatatatttcctttatatgatgattttgtcgatagtttcattgctaagattttatatatatatatatatatatatatatatatatatatatat

SEQ ID NO: 18253 - DNA, 3867 bp, Oryza sativa
ccatcaaataatgatggtgagaggttctcatcctcttatcctagccggagtcggtcctcccgctctggtcaaagcaaggctcccgtttcccggtataataggagcccagaagtcctcacctattaaatggtgactgacgggggcaccccccgtgtcaggcggcaatatttgacaggcctcatcatcaagatgacgtgcgcttgcttcccaggtcaaagagacaagacatgcatttaatgcaaagattgtaatccttctccactaagttatgtttttgggcccatgtgataaccccttaagatataaaaggaggtccagacctagtaggagaggggagggttggagcccctgatgatcaacaccttctaccccaacaaggagatcttgtaatttctcacaagatcagctaagcacaggagtagggtattacgcttctcagcttgatttctttcttgtagtgtgagttttcaataatactttagtttatagtgttactctcggtctcacaaaataaacctagtgaacatatattagtacaaaaaaatctgaataaaaggctgtctagatttgtcacacataaaaaagacaaaccatatccaggttcatagcgtcacgaacctggacacgcatatgtccatatgtcttggacacgcatatgtccatatgtccagtttcgggtttttttagtcatatgtccaagttcatagctaggattggggttttcttttgagtcatatgtccaggttcgtagctaggattggggtttttttggagtgtcctggttcgtagttaggattgggggtttttcttttttattacggtggggtagtattataagcatcctcccaagaatgtgggaaatgctagaatgacttacattgtgaaatggtgggagtatggttgaaaatgtcatcaacctgaacagccccataaactttttttaatctagttaccactcatgatactaattatattcatagtttttgtctaatccgtttttaagtatggagtagctatattttagaatgagtgagtatataagtctaagagcaacttagttaaaatgtaatgattgtttggttttctttgaaagatgacttgttttggtatggaaagaatattacttattgcatcggagcatttgtttatttaatcagtcttcaatgtgtttggtgtgcacaaggttgtgtgcggtaagattttctactacaatatttcttttagaaaaaagacagaaagaaaagattgttagaataggtgtcgaatatactagttctatttggttacagttggacttaaagatgcaataggtgttagggggtggggttagagtcgaactctataacccggcatctctcttaaataaagaggttgcaccacaatgtaatcatggcgattacaatgtaacgtagatacgcagggagatgatggcggcgaggccatagactcgtagcggctaggagctattttggttggggaggagtgcccataatcaaagcctatgggatgtaggctttgactaaacctcgttaacaaatatagtgtgttcatgtgtcgtcatctagcatgtattgggtgatcaatgattgaatcgatcgagaaggttagtcatcgttccgttatatggactaaggccctgtttaggtggtgtttgggtggtttagtccctctcaccaaaagacttatattttgatgagaggggctagaggtgtgtttagttcgcgccaaaattaaaagtttagttgaaattggaatgatatgatagaaaagttggaggtttttgtgtgtaggaaagttttgatgtgatggaaaagttgaaagtttgaaaaaaaaatttgcaactaaacacggactaaactttagtccctctcccacccaaacaccaccttagatcccaacttttttctttaaactttcaacttttccatcacattgaactttcctacacacacaaatggtgtgtttagttcacaccaaaattaaaagtttggttaaaattaaaacaatgtgatggaaaagttgaaagtttgtgtgtgtagaaaagttttgatgtgttagaaaagttgaaattttgaagaaaaaaattggaactaaactctactcccactagaaggagtagaagccgtagcagcaacaactaggctagtgctttaggcatggcaaggcccacagaagctatggtgagtgagctgacccctcgtgtcattccttgtccctcttccgcctattactactagctcttcgtcctcatcaatgcgtgcttgcatggccatgtccatggaacacgagacgccagaaagaaagatggagtcgaatgctctcatctcatctctctcgcaaagtcgtctactcgatccttttcacatgctcttattataccctaaaattgatgtcgatatcgatgtggtgagatgatggatggatggagaagacgggcgagtacgtgatggatgggcgatgcgccatggaatcgccgatttcggggcgccgaacattttccgtccggccaccgatccatccatcgattgatttgaatccgcggtttggttttgctgctgctccgcctgtctttgctttgctttcgcttggacaggagctggaagcctggaactgctgttgctgttgcttggttttgttggttgcttgccgtctccatgcattactccgttttgatgccggggtagatgaggaggagtagatatattgatggggtcaactgtgactttttacaatggtggtcagcaactgcaattgaggtcttgaatgctgccatattgggaggagtactgagagatttggcctgagaccaaagggcctgttttagttcccagaacaaaaatgtttgcacacatacattgagtattagatatatgaaaaaaactaattatacagaatacgtgtaaattgcaagacaaatcttttaagactaattgcgccgtgatttggtaatgtgttcatacagtaaatatttgctaatgacgaattaattaggcttaataaattcgtctcgcaatttcctggcagaacctgtaatttgttttgttattagagtacgtttaatacttcaaatgtgtgtacgtatatccgatgtgacaaccaaacctaaaaattttccccaactaaacaaggccttagtttgcgagacgaaaagttttaacgtgtcacatcggatatgaattaacctaattttctcctactggggcatccatcgaagcggcagcgtcggtcctggatggggcggaggtgatgggtagcgccttgtgaggatggtgctccgagaagactgtgcggttggtgccaacgccgacgcggaacggggtggtgagtgcgaagccagcagcggaacggggtggtgggtgcgaagccgtcagcgtccaacaggagcgaggtggagccgaggagtgtgaggttgctcgtccacgagatgtgctggtaggaggcgccggtcccttatttcctctgccatcagcacaaccccctacggcgccggcttggagatcgggcggaggcttcccaagacgatgacgcctcttgctccttccttccatggcttcggttgggacgatacgagacggtaacggacgaggacgtaggcagtggaggcggtgacccggcgggcgggaggcctctccgtccactggcggaagaggcgacgacacagcgggcagattccggtggatcagagagtattcagggaaagagagataggggaagaaggcatgggccccactgatggtaagccggctttggctggccatgtttggttagtgaaggaggtttggctagggagatggcttggccatctagattgtaagtctgttggaatccattttttatttaaaattgttaaattttgatttggagagt

SEQ ID NO: 18254 - DNA, 8478 bp, Oryza sativa
attcctgcagccctgcaggagtaaacaagctgatttgaatgagaactgtgcctctgactccccagcattgctcaccatgcaaaccaacccagtctgccgaattcctaaagaggagaaatcaaagatgcatccctgccctcccgaccaaactctactcatgtgtgggcgatgcctcactggtgacgaagcagtacatataaacagtattttgtcctccatggacaatttattggcaaaatttcatggccaagcaggcaagcactgtgtgtcgtcttggtctcttagagaccataattcagtctgagttccggacaaaaaatattcaggtcgaaattgattgctgttactattgctagattgcaacgcggcttagttttgcctttcctttttctccatctttgaataatcaattattcatatttgaacgtacgcgccatttttttcttatcttagatcaaagttgaattactctgatcagagttcagctcgtacaatgtactttcacttcaagtttataaagcatcttcagattagtttttattaaattcaccattaaatatattaaattttctagtatatttgtttagtgttaaaaatattactgcattttgtcaacttgatcaaactctaaaaaaaaacttagagtaaacctaaaataacttatggggctcgcgatgaggacatcactccttgatactaggtgaaaccccgcgcattgctgcgggaatttagtatgaagatatacatcgaaacattatgtgaattatgttggatgataatttaacatgtttgtatttgaaaagctcttaaattataaaaactataaagatatagcatgtttgcatgatgtttaaatgtgatgattgttagtggatgatgatgtgacatcttgttaattagtgaatgatgatgtggcatcttgttagtggatgatgatgtggcatctttgcatattaagcttaaggagttagtggggtataactttatagtaagataggatacgcgtgaggggaagtgagaagcacttagagagaggcttgagacagaggtataattcatatcaagttcgaggacacctcggaatccaagagtagcacacactaaaattgacacctagaactcattcggactcggttttttacgttctatatatgtatgaaaaggtaacgagatcgcctttccaatgggtctggtctcatatcaaaactcctattgagtatcaggaatcatcaaaacaaaagagcgtccataatcttttcagatgatgtgttagcatctttaggcccgtgtaccatattggagtttgttcgggggtcctaggttgatcctagaacttaatcatttagtagttgtcattggattagggttgagttttatttagattattccgtcgttgcagtttcaccacttagttcagtttgtgcaaccccaacttgtgagcttcattgtatatttgcaatatattcagattgcttcttatactctcttgtttgtgttcttgattcgcttgctggagatagacttctccacgaggttaaccgcgttttggcacggttgataaccaacggagcaattgtgtagtgaatgataatggttcgatcgttctggtcggagcctttggatcatcaacatcgagtctacacaattgatttatccttacctatcggaagattggaacctggttcctcatcagctcgttcaaactgttatcaaaatcatccataccaaatttttaatatggccaaattaattttggcaaggcaacaaactgaacaagattttaacatcgcaacatcgccaatccctaccaacatttgatagtttcagaaaaacttctactcacaaaattataccaaattttggtaagatatcaaatcaagcattacctttttacatattgatcttgtaaaaaaaaactggcattgccaaattttaactttaccaacaaattgtaagtttttttttctttttttgcaatatacttcaaagtaatcaacaagcccatagtataaaacgaggggagcgctctgtatttatagctcatttggaacgcacgattcttaacataggaacgggaaaaaagaaacgtaagattgaaagtgtcatgtcaccttaaatcctatgaattaaagaaacacgagaaattaactgcaagaataaccgtttggattgagaaaaaaaatgtagaaatcataagagaaatacacatatatagatgattttcctaagaggttaaatctcatgttaaaatccctaaaatttcctatttttgagccaattcaaataaaggaccacacgatttttttgtccgtaggagtagatccctaaaacaaaaaactttttccaaagaagtccggcatgtaggaactagctatatcattccaacgtactaatcttctagtatatatccgtattctcctagtaggcaccttgtctcatagtagcactctcttttctttctttctaatcttgttgccaacttgaggcactcgactgatctagtactaccagactacctctccacaagaggccaggccaggacaaactatgcacacatagaaacgacgccggtgtgcattgcatgcagctgtttcgcttgctgcagaggcatgaagaaaaagcaagacagaatgagaaaaaaggcaaagcaaaaaaggcacagagagagagaacacaggttgcacagcacaatggggagcaaagtggcctattttcagccttgcacactgcacccctctctctgatgagagagatgatgatcgatcgatcagccatggctggccatctctactgctccccttggctttaatcggccatggccatggcagctgggtggggaatgtggaggcatgcatcacgagtacctgtgcccccacacacgcacgagacccaaccgtttccagcggcgccgcggcagcagcagccagcaggaggtgtatctctctcatcgctgcaggaattagggctcctaggcatgtacatttcggtgtaaaatctccatcaatggctctctctccttctcagaagttcagataccagcattgcaagtttttcaaccacctactgttcattggtctcaggcagtcaaaagctatagtatctgtctacttcgtacaaggatagcataaaattaaatcacagtagtagaatgtttaattagcgatgcagataatatcctttgggtatgagtgacggtgatgatgacgaactgcagcaaagtaggagtatctcccttggcgtacgagacgctagctgaatgattgatacatcacgtaccaatctccatcggtttcatactctcatcatgtactggtgtgtgcatgttctgacagactacgtacaaaaaaaaaacgtgaaataccacacagcatctcaagctgattctgtattctgtagtagtacgtaccatctctgcaggcggctcgtgtaagagcatctccagcagggacactaaatatagcccctaaacagattttgggtgttagaggctaaaaaactcaatccagcagagcccctatcaaggatcctaaattaggtaggcacccaaataacctttcctagcccccagtctcaggggctctactgcacagcccccatccacagttagaaaagcgcgggagccgcccgacgtggtcttggtccgccggcacctcccctgcccagggctcatccccggctggtgcggctcctccctgcctaccgtgtcatccctcaggtgcattcctctacccgacgctccttcccggccgacgcgtctgctgtacctggagtctcctctagcctgcaccctctgcctaaactcgatgaaaaacatggcccagtggccgagtcatgcgatggcgtcgaggcactggatgattcaagtgttgttgcaggctgcgaaattgagaaagtagtagcagggtagcactagcagttacgattgtgggacttagaagaatggggaaagtgatacatgcgatgtgctatgcagcttttttgttgctttgcttggttgttgcttcgtgagagaagtagctggtctattggtggatgagaagacgggaaaaatcaacacatgtgagaaaatgcatggaagcgccacagcagcataagctcgttttacccgagctatgaatacatgctactaggatttgtatttccattttattttttttaaaagaatcgaatttgaattgtgaatttaaatatggttggattattatggttttatactaggagtagcgtagagtatagaactatagatttgtactttaaagtatatgttaaaatagaagatgaaatgaaataaggggcgagaaaagagactgctgttagagttaaaggtattttttaggtacttagaaaataggggaagctcccattaaatgatgctctaacactgctccagtttgctcgtacagtacgtactaagttaaactacagtgacgaccaaaagtaaaaaaaaaatggaatctgcaatggcctacggagtactatactaacccccacaaaattctcatatgaaacaaacaaaaactccagcagcttcacgccaacgaaccagaccagagaccccccaaagtgaacaaaaaatcacaacttttcaacctgaatctgccgcaagtcgccattggttggcatgcagattcaaacttcagcgatggcgtcggcaaacggcatcatcgcctacgcatgtaaatctaccgagaaaaatggaacaaaatgtcgatcgcctagctagctactacgtggacgcatggaccacgaactgtcaccaaccatggcgccatttgcagggacgatcagctagaaagaaacaaagataaagcctgagatgtgagccaaagttaccagtttgcatgccaattaaggacaatgagtttgtagataaggaccatgcaggctgctgcaggcagaagctagcagggcgcctgccgatgatgatgcagattcagaatttcagatgtgtgtggcatgtatcctactccctccgtcccataatataagagattttgagtttttgtttatattgtttgaccactcttcttatttaaaaaatttgtgcaaatataaaaaataaaaagttgtgcttaaaatactttgaataataaagtaagtcacacaaaaataaataataattccattttttttaataagatgagtggtcaaacagtacaagcaaaaactcaaaatcctatattatggtacggagggagtagcaaattccaaatgcgattaattatcgattcgattcgatcggatcgtgctatagtaggtgtctctgcatcctccgttctgaaggtgtgttcagagaatgggagcagcacatgcgcgaggacatggacgcaccttcagatggcgacccctcagtgcaggcaagcagctagctatagtgcagatgcagggaaaggtgaggatgagtatgcatgtgtcatgtgtgtgttacatttgtagctgtgtaaatgagagcactgtgttagtggcattaggggttgttttgttatggcaggcaggaggggcaggagggagctaaagttgcttttaatgaaacaattcaatgtgtgtactgtaccacatgtgggggcatggctcatttgcaggtttataggagtataactaaactgatgggagcagaagaagttttaggagtaaattccctctgtaccctgaaaactcactcaatcccttttatgtcactaaaatttatccgatcccttctatacccctgaaattttaacttgatccctttcatgctcctaccattatattttctttcatttcactattacccctgaaaactcactcaatcccttttatgtccctaaatttacccgatcccttctatacacctgaaatttttaacttgatccctttcatgctcctaccattatattttccttcatttcactattacgtttggttgcaaatgtcttttttttttgcccttgatgctttatatttgaatataagctgaaaaaatgattgaaaattttgtttgagtgcatagtatgtgcattttatgaaactaatgagactaaatatttagtgcagaaaattttgacataaattttgaaaataaaataaatgaaataaattaaaacttttatttaaaattttaataggacaatagatttttttatcgggagcattcataaaaaaaattatcgtgagcattggtagtcctatctttataggaatgcttctcttttttatgacttttttataaaaaaataaatatatattttattatttcattacctaaaaataaattttgtgataaataatgcatcgcacgacaaactcataactataatagtctcatgcgacaaacttttacatttttaataatgtaattaataaatttctatgttcatccaaagggtaaaatagttatttttatagaaattagacggtcaactgacagcatgggtatggaaggaatcaaaatcaaattttagggtatacaaggaagtaagcaaaattcaggggcatagaagggattagctaaaaattcaggggtatacaagagattttctcaagttttattgggtttgtagggaaagagaatgatatcattccagcattttaacttaaaggaaaatacctccgaaaaagaccgaactgcccccacctctcctactctaccgcccttcctcctcccaaaattaaccaacctataaaaccggataaaaatactaaaccctataaaatcattatttgtattctttttagattcggttgtaacaccctagtatagcactaacatatagaaaaacctattccttgcccctccttccaatcacacgtcgcagcaaatgctcctacggccctaactcctcatgcaccacatcgctcctcacactggtgaggggtgccaacaaccgctccttggctgccaacatttaaaataaggagagcgtcatcgcactccttcccgcgctcttcgtgctactctcaactcccacgagattccccataccgccattgttagtgatctaggagccaggacccccaaagcatacaacgtgcaccatgaagttgccatgtatccgctcatctggctcatcactcatgccaatgatcaattcaggggcaacacgtggcctctcctaggtcgagaaggctaggatagaatccttggggaacccaaaggtcaaatccaagacggaagttgaataacatgtctaagtggcctcgggtccttaacttgtccccatttaaatgggatggttatccaccacagaggtgagggcatggaagacagggcaacgattgttgtagccgttgctcatcacctcacccatgtcgggcctgatatgggcgtgggaaaccagaggatcgtggttgactactcctcccttcctcgagacacacacctttgactacctcttgcgaggcaatggtcggcaggccccatgcccagcgaggcatggtgaaccctattcaccattgtagattaagcaagcatgcatggcaatgctatgaccacgccccactcaaagatgccccgaggccccagtggattgggtgggtcaacgtagcaagatctagctcgccatacctcatccgcagtgtgccctgttaaggcccgccccgaagctagcgatgggggcgagaaaaggagttgctgataaaacgtaccatactcaaatgttgatacgaataaaaccttacatcgaattttgaccgtatggtatcccctagagatgttataagggaagagttgggaccaagagagatggggtcggatcctagtgactaaggagggacttcaacacatttagtaaagttcttaagtaacccggaagagaaaggaagagaaactactaatccgagtagtcgataaacttgtaagatctttcaaggacaaatagagaaatcaccacaacaataggagtagggtattacaccttcgggtgacccaaacttgtacatatctttgtgtttatccattctagagtgatagaggggcccaagccccttactttgatgcgactagctccttggctgaactcagaaaaggcagtcccaccggatccccgcttttgggttccacaatccgacggtcgtcctccttatctctaatggctccctccacctgatactgtaccattgaccgctactttggaaacaaccgcttgagatgcccccgttgcccacattgccctcctctattccttcgtcttcaacgtctcatcgcctccacctcccctcctccctccttcatcgtcgagtctccaccgcccaccgctaggctgatgtcaccccggtctccgtctaattgcaagggatccccccccaccctcgccacccctcctaacccactcttacccctaccccacacctggacactaaattgtctgagcttgatggagttggagaacgaggtcatagcacatgaattgtggagtagatcccaaggacaagaattcatagtattttgcataggttttccgcctaatgccatttagcaaatctgtttaatttaatcaatgc

SEQ ID NO: 18255 - DNA, 2349 bp, Oryza sativa
atgcatccactcgtgaagagacaatgaaaaaccacagccccagccggcccagggccagtgccacagccacagccaccttcaattgcaagcattgcagctgcagctgcaacaacagcagcagcagcagcagcagctataccactgtgcttttcagaagcagcagtagtagtctactgctacggccacagccatgcacatcactagctacatcactcactcaactcaaacacaggctgatactgtaccagctgctagagttgcattgccaacggatcgaccggatgatggatgcgtggacagattggagcactggcatatggatggatggatcggtctaccggtcgctgggtggttggaggcatcgatctcgatcgcccgcggtcgccgtgcgtgtgtcaggccatatatgggaacgcatgcaaccgttgggcagtagaggccaaggggagacgacgacgacgacgacgaagactgagggagctgctgatcgatcgccggtagctccagctgagctgcatagtagtcgcctgtgagctcggtctggctagctgctgctgcgtactagcttggctgaagtagctatggctgatcagcagcagcagctagctgggtgtggctacactctggtcatctggtgccatgttatctattctcgtgatccactgatccccctgtgtatgtgtatattctagtgcttgttaacttgtagcttctcctgcttgttggcttcttgtgatcgatcttgtgctagcgctctgacctttctccagtttgagcttgtactgcttgctgcatcttcatcagcacgactttttttttcttcatcaattatatgcatgcatggaaccatcaaatttatataccccaccatggttaggttttgttataactaaactctactacggacctgtttaaatcccaccctaaaattttacatactattacatcaaacatttaaatacatgcataaagtattaaatgtacatttaaaaaaataactaattgcacagattgcgactaatttgcgagacggatcttttaagcctaattgctacatgatttgacaatgtggtgctgtagtaaacatttgctaatgacggattaattaggcttaataaattcgtctcgcggtttactgacggattctgtaattagttttttattagtgctcaaacaccccatgcgacactctataatatctgatgtgatacgccaaaactttacacccctagggccatgtttagattccaacttttttcttcaaacttctaacttttccgtcacatcgaactttcctacacacacaaacttccaacttttccgtcatatcgttccaatttcttcaaattttcaattttggcgtggaactaaatacaaccgatgtactccctctgtttcaggttataatttgttttgactttggttaaagtcaaactgcttcaagttttattaagtttatagacaaatatagtaataattacaataccaaattagtttcatcaaatcaataattgaatatattttcataataaatttgtcttgagctaaaaatgttactacttttttctacaaacttgatcaaacttaaagcagtttaactttgaccaaagttaaaataacttataatctaaaacagattgagtaatattcagaggtgaatgctactcctgacataataggagtacttactccgtctcaaaatgtagctatgttatataggatgtgttattacctagtactacaaatctggataagaggtagtatatatctctcctgacataataggagtactccattcatcccaaaaaaactcaacctagtattagatggacattttctaatacaacaaatttagacagaagtctagaaaatatcacattcaatattaggaaggtttttttggaaggagtgagtataggtgaagcttcacccctgttcgttctaaaacgtgcccacgttaagatatcgcgaagcaaagacgacattacgacttgtcacttttcatgcgccgctagctagctggagtatagcctaatcccaagttccaagccgtgcgagagagattgacaaacaatttgacatgactcggattattggcttgcgtgcgctagctggttgcatgaaattgaccagggcggtatatatgacacgtgtgtgtcacgtaagttagctggcttgatgatcggccacaggtagagcaattccagctgtatatgcagaagtagatgcatatatgcatggttggttggtgccacgaaaagatgtcgttgttggttagtaattcggcagatggttcgcacgcgtgtactgaattcgtctgagaaaagaatgaatgctgcaaaaattgct

SEQ ID NO: 18256 - DNA, 3719 bp, Oryza sativa
  unsure (1)..(3719): unsure at all n locations
gaccgttcgttttatttaaaaaaatttaagtaattattaattatttttctataatttgatttattgttaaatatacttttatgtatacatatagttttacatatttcacaaaagtttttctgaataagacgaacggtcagacatgttttaaaaagtcaacggcgtcaaacatttagggaaggagggagtagtaaacatttacgtagctctgttaataatacctcaaaggctgtttgtacaggtgatgtgtctgaaaatagctctgactagaaaaattgtcgcatggtacccatttatttgaaagaaaaatatataattttttattctgtataggaacaataaatttttatataggaaatttttctatatgatttttgaactaaaggattattgaaaactattaaatcctatcaaatttctaaggaatacccaaattttacataagttttggagcatttttaacatgtaagtctctcatgaccttatctctctcatcctatgtaatcaacttcatgtaatctgaatacctgatgtgacattggctactatagatacaaccgtcgttcacatcaagatcaagccgtacaagttctgcaatccagttcggccacctgctacagtctcgacttcaaacggccgccaaatatgcatgcgagctccattttgggtctatgagtacttgatggaaagctctcggagtcatctttccaatggatccagcttcatcgccaaattccatcccagtcggccgaaatcacaaaaaaaaaagtgttgcgtcacctataatgggcctatgggcttgtaacttcgtctgggaccccggcccaagtggggcccatgtggggtgcgccccaagctggtggagcacgaccctaggcacccctaggtcgtccttccacccctatatatagctaattaccccttcagggtttctcgagttttgattaattgtaagtttagccattgctacttcgcttgcagcgcgcgtgtcggctagaccgtccgtctgcttgttcggaccccactttatcgtgtatcaatttatctttgtgcgtcttgtctatctagcaattcagttgctttatatcttgttcttgcttgttctcgattgcttgcaggaataaggttaatatacaccggcaagatcaataacccacggagaggtgtatcgatcgctaaggcgcaacgcaacgtcttgtacggttgtagtcggatcgtcaacgtttctcccaaatcgtagttatcatcaactcaccgaaagatcgggccaaacaactgccttgagtgtcgagtggaactcagggtctatcaggtggtatcagagctttcgttgctcggtgagttcttatctacccataaccagaaaatagccataaaaaaaagaattgaatcctttacctagccatacttgtgccattgcattgttcttttcagttttgctttgttgaattttgtgttgcatcgtcacgtcgtgttgctggtcttagcgtctagttcgtttagagtttcgagttctggtcacgttttgtaccacagtcgtcgctggccccgtgtctcagttgtcgtcaggacctacgaaaacggaatcggctcgctgccacggttctattttcgtagttttcagaagtttctgtcggttagtttttgagttcttgagttgcatagcttctgttcggtgctgtgtcgtgatggtgtgtcgtgatggtgcacctgtgatgttgcgtgtgaggaagaaggaaggaggatattagattagatcagtttttggtagtagattggatcggtttcaatttgaaccggattcggtttccttgcatgcgacttttccttttattcggccgtggtgcccttcacattaacatgccgagtgagtccgactcctccctctcctctcggtttgcatctatgtcgtggcttcccatatagatacattggtgattttcttttccgagtgttggattggaaatctgttagcaaaaacggaaactaccggacgagagcattccatttttgtataaatttaatttttgagttcgcacttttgcatctgagtccctgtaatttttgatatttacaattcagtccctgtaactttgcattttggtccttggtcagttctggtcaggaaaaaaaaaagaaaaggcagaaaggtgctaaaaaagagaaaagagaaaagccgcaccgaaaaaaaaagtgtgaaaaaaaagaaaaaaaaagaagagacaaggaaaaattcagtttattcttgatcttggttttggatatcagagtgatgcttgagttgttcctagtgctatcttgtggtatcgtttgtgtctaggttcgcgtctctagtacgttctagcctaggaccagcacggtacttgactttgaaccattattcaactttgcattctctgatttgagcatttgctatccctttgctacatatttaagcctacccagagctccacagatctgattgcagccgtacagcaagtgtttgccaaggaatcgatacatccaacctcaattggggtgcttggttaagtcggtgtacatcaccattccgcttgctttggtaagaacttgtaagagcttggttaaaagcttgagtgtgtgtgatatttgagctgccactacctagtagttgataggagcgtgcatatttttgtgtgtttcttgtttgctactaaccatggcaggattgcgtaagggaatacgagaacatcgacttctacaccttcgacgagatatgacgacttctccacgcgggcnnatgaggtacatgactataattttgaacaagttgcatctaagttaccattctttgatgggaaatatgattctattacatacattgattgggagctagcagtagacaatgaatttgatatatatgatttttctgatgctcaaatgattaaggctgctagtaataagtttacctcttctgcattattttggtggacttatgttagtaataaacctgaaacttgggatgaattgaaaaccatgataagaaaacgctttatgacatcttattacaaatgtactcttcgggagaaattagaacatctgaaacaaggtgatagaactgttagggagtacattcatgaatttaaggtctgtatcatctacagtggtctcaaagagtgcaatgaaaatacaatgcgtagatttttcaatgggcttaattctgaaattcaggttttgcttgataatgtgacatataatcatattgggcacctattcatgcttgctcgtagcattgagagtcagatcatatcaaaggcgaggatgcatgaccaatgtgatttatctcctatttatgaatctccaatatacttatgtaatgatgatgtgcaaacattggaggagcaatcttttgtctcccctgttactaacgttttgcaggaagatcagcacatccaagaaaaggagaatgatatacttgagaagaaagaggatgaagcacctgcgatgtctgaagaaagctcgcaaggtaaattaaatggtgctgagagaaatgaaggtgagtattctcaaggtgagctacacttgtccacttttcatgctatagtagagcaaccattagtggaatcaattgctgagttacctttgtcacaagttgatttacttgctgttccttgtgataaagaagagttgtgcgataatgcttcacttatattcatgccacaactagtgaatgaacatgctattcctgttgttaatactaa

SEQ ID NO: 18257 - DNA, 2798 bp, Oryza sativa
agatacaaccgtcgttcacatcaaaatcaagccgtccaagttctgcaatccagttcggccacctgctacagtgttgacttcaaacggccaccaaatatgcatgcgagctccattttgggtccatgagtacttgatggaaagctctcggagccatctttccaatggatccagcttcatcgccaaattccatcccagttggccgaaatcacaaaaagaaggtgttgtgtcacctataatgagcctataggctcgtaacttcgtctgggaccctaacccaagtggagcccatgtggggtgcgccccaagctggtggagcatgaccctaggcacccctaggtcgtcctcccacccctatatatagctagttacccctttagggtttctcgggttttgattaattgtaagtttagccattgctacttcgcttgcagcgcgcgtgtcggctagaccgtccgtctgcttgttcggaaccccactttattgtgtatcaatttatctttgtgcgtcttgtctatctagcaattcagttgctttatatcttgttcttgcttgttctcgattgcttgcaggaataaggttgatatgcaccggcaagatcaacaacccacagagaggtgtatcgatcgctaaggcgcaacgcaacgtcttgtacagttgtagtcggatcgtcaacgtttctcccaaatcgtagttatcatcaactcaccgaaagatcgggctaaacaactgccttgagtgtcgagtggaactcagggtccatcaataccccatccatctcaagctctctctctctctacatacaagttctatgcaatcaacttcctataatccgaataccctcaactttcttgtttctttgtttatcattcctatttcgatacactttctatcctatgtttttcccatccagtaatccgaacaagccctgaaaatggttgggatgaatagccccatttttttggcttatacttgagcttatgtcaaattttgtattttaaaacttaattttaaagttgattttgtgctttttttcatcgaaatttatttggtagcatttgcttttgtatttttttaaatagtgataagcgtttgagcaaagatagtgtcagaagtgatgtcggccgggctgttggtaatggtctcagcgcattctctcccacaaccttttttttccctagttaatgcattgggtatttgtatgctacatgcatacgtaatatctcatacgtttcacctagtgtgttcttgtgccatcacatagcctgctgaaccatgacgttatacccatggacctaaatcatctagttgcttcattgatagaaacttttggatgcccgttgcatgaacgcacacgagcgttttaggatcactgcccgcgcgctagcaagatcgagcctttgttccacgaaactggtgctgccacgtggcacaattttccttgggatttttttgcatcgaattcgtattataagataagataagataagatagcaagcttgtccagatgggtatataactcaagttggtaaacaaccaaacgtggcctaatagtttttaccttattcaactgccgttttatttaaaaacctgcaaataaaaaatatttttgcaagatgctggcagtcctcaaaatataaagttttgcatataagattttagaatttgtaagatttaataaatttatattatcacattacagaagaaggattttctaaaagcctctataatctactacatactggtgtttgtatatatttattcttttttttttcgatcgacggttttactatttagctccgaagttttttttttacctaagcaaaattcctagatttatctggaagttacacgggatattacacaaccaacgctctaactgaatcagaacaaaatcagcgattgcacaggggacacgtggctaattttcacgggagctaaccctaaattctcaggaggccacgtggcccaatcacatgcctgattttcatccctgaaatcggtttataagatttgatcggttcctattcttatataggagacgataatgctactactatctgaagtgcaaatgcacgtgttataattttattaaaccatccaccatattataacttacgagcagtaggtagtactagtacgtagctacatgtacaaggccacgccaaaaatatgcgagacaaaatttgtgctcatgatgcaaatattcttattctatgaatagtactcctaccaattgttgcatgcagcttcagccatgcaagcatgatggaacatggatggagctttaggttttccatggtggagacggagatggagtagtaccttgctccgtgaattgtcaaatcgcatgcaatggacaaaattggacccggccatgtctctcgagcgcttgcatgcatgacaacctcccatctacaactccaagtcaccaacgtacagataagcacaggaattgaactcctgataaactctcaagttccctaagaaaaataatcatccaccatgggtgtgtttagttcctgaaaaaagttgtaagtttaaagaaagttgggagtttagaaaaaaaagttaaaaatttagtgtaggaaagtttttgatgtgatagaaagttgggaataagggggaaactaaacacggcccatattaatccatcgttcataaaataagtttatttttagcccttccatttgtaaaaaataaggtacttttaagtaatcattgcatcggagtttgtgaaagttagagaataaataaattggggtagagataaagaaagaaataattgtgctggaatttga

SEQ ID NO: 18258 - DNA, 1779 bp, Oryza sativa
tcatcagcaattaacaggtagaccgtcgcgtccatctgcactgccacctgcacggcagccggctcgatcttgtgctaacagaacagggcctttgtccaccacggatagatacatctttgccactgcagctgcactgcacatcgcagttcacacgcacgaacgaacaagatcgtccttgtgtttctcttctctgcaccccccccccccttggtactgatgtggcacgcgtaccaagagacaaaaccaccagcagtagcagccatccattaatacgccttgacccactcccctggatgtctctctcgccaccgtttgcattcgccaatctccaccaccacatcatcttcttcctcctccacctcttacctcgtcgtcctgagcgctcctggttgcagttgccttctcctgacaactcctcttcgccttggctaagttagctagctcatcatcacactctgcatacgtgcttgtcaactccattgagagcgtcgccgttgatggctgagccgccggcgaccaaggtgtaccacgatggctgccccggctgcgccatggagcagaggaaggaggagcacaagggcattccctacagggagttcctcttcgttgccatcaccaccctcgcctcctgtatgaattgaacacacatatacatgcagagtcaacttagtttgatgtttatcataatctcctctgggtcttatcttattctactggtttttaattagtagccttgtctgtctctccccttaaattttcagctctgccaatctcttccttgttccccttcctgtacttcatggtaagtttagtttccatgcattccatctaatttcatgaaaaatatattttttacaaaaggtactcgatccattctcttctctagagcagataagagacttgcatgttgctcggacagaggaagatattggattctatgctggatttcttggtataacatttctgaaaaataatttgtcactgagtaacaaattattttgaacacttcttcacaactacgtcaaaaatgcagtaacgtttacatgatatatttctgctgcaggcgcatcatatatgatcggtcgtggtttcgcatcgatcttgtggggtatggtggcagatcgtattggccgtaagcctgtcattatcttttccatttttgcagtgtaagcactatggtacctttcctaaaatattgacaggaatgtatccatggcatatggcatttactttgtagtctgttccatctgctaaacaatttttaacctgtctttgaatctatacttccagcattgtgctcaatactttgtttggattaagtgtgaagtactggatggctgttaccacaagatttcttcttggtgctctgaatggattgcttgcaccaataaaggtacctttttaggagacattaagatactttgaaatgtgaaagaagtttgttggggacaaatgaaggatgtggtgtcaatatcgattggtattcttattccatcaaacatttactcaattattttttctattacttatggctgcaggcgtactctatcgaagtttgccgagctgaacatcaacctttgggcctatcaattgtaaattacaaatctataaatagcaaattgcatctatatatacgatgtaagaactctgtttcatccatgtcatctaaattttaggtgagcacagcatgggggataggtcttgtagttggcccagcaactgggggatacctcgcacaggtaatattacattatattattcgggttcatagatacattt

SEQ ID NO: 18259 - DNA, 7171 bp, Oryza sativa
attcctgcagcccctatggtagttcaaaaccgatgaagatgatgctaaacgagaaaacccgttagtgcatgattaattgaattttaattattacaaacttaaaaataatctttttatattttggagtaacttctatatagcaaaaactatatgcattcttaataatcacaaaagaaaaacgaattttctaaaaaaaaaactttcgtaagttttttgcccccaaaacttttagatttgtgatcatcggatcatctcgagatctttgcatgaaggaaaaaaaatgttagaaattttcacacatgtcacgcgtaccatcctaatactaaccaatctatagttgaatgcaagatctatataagttatagcatagttatagtgcaattataatgtagttatagtacaggtacatgtaattacaatggacacaactacaccgagagtgctagctggatagtgctaaagagagacaccattctttccaaaaaaaagctactagtacactcaatatctatggttttttttcttcttagagaagtttctcttaaattactcatccgatttataatccgattacaccgttgtgttcgtaacaattaaatctttacaacaagatctcacatgattatattttgataaaaaatcacatattacttttatgatatgtctaaattacttctagatttcactaagtcacttcttagacatataaaagtaaatttagtaaagcttaaaagtagtttacatatattatagaagtaacttataacaaaaagaaagtaactttaatttagaactatatctagattcattaacatctatataaatgtgggcaatactaaaatgacttacattatgaaacagggggagtaactctctgtagtagaaataattatattgtgagtgagcttaaataagaaactatgtagagtgaattcgcaagtacagtgtagagaagatttataaagtccacaaaatatagaattaactaaaaataataataataataatcaacttagagaattatgaatgtacagaagtaatttagtcaaatatgaaagtaacttatatatattataaaagtaacttagtatataataaaagtaatttataaatataaatattttttcatcgtaatataatcatgtaagatcttgttgtgaagatttaattgtaacaaacacaatagtgtaattggattgtaaatcggataagtaatttgagagaaaactttataagaaggaagaaaaagacacacatgtctaagaggaaaaacagcgcgcacatcagcacgtgtagcagtaattcttctcacaattggatcgtcgttggttaacactaaaccgagaggcttctcggtttagattttaccaattacaatgcagttacacttcaattatactataattatatctaaaagttttttattaaaaaaatttgcggtaatttttttagatacaatcgctcgtattaggccatgcctctggtattcctttgcatttcgatcgtgtagcccaatacgacggcccaaacccaaactccaatcccagcgggcccagcaagtcagcctcacatcttcttcttcatctccctgtctctgtctctgtctctaacctaaacccacacctcgcgcgccgccgccttgctctcctcctccccgaccccgagtcctcttcgtgtgagctcgcactcgcagtcgcagcaatggcgatcaagcggaccaaggcggagaagaaggtggcgtacgacaagaagctgtgccagcttctggacgagtacaccaaggtgctcatcgccgtcgccgacaacgtgggatccaaccagctgcaggagatccgcaaggggctcaggggcgactccatcgtcctcatggggaagaacaccctcatccgccgctgcatcaaggtgcacgccgacaacaccggcaacaaggacttcctcgagctcatgcccctcctcgtcgtaagttcaccttcttcttccatgttcatacctaacctcgagtccactgtttttcctgacctgtttttcttgttgtttgtagggtaacgttggtctcatcttcaccaagggtgacctcaaggaggtccgcgaggaggtcgccaagtacaaggtataatcgatagccaagtacaaggctatcgatctctgttcaatacatacactgcaagaacataacagaacagtgttcaataaactgcaagaatagaaaacataacagaatagtgttcaataaactgcattgggttgaaggggcataatttgttctgtaagtgaaattggtggatttagtgtgctatcttaaggtgatcatgctgagttatgaaaataataataggatatgctgggttactttgaatttagctctatgttgtgccattttatccatatgcgttgtatatattctctgtgtgtggtattattagatgttctgtgagatgtgaaagtacaattttcaaccttatgtaacttttccaatgctatttatatctcaagtattccattgtttatatcatgatgtgatgccatatataatgatacatatagatatagggtttgatattagctagtattggctattgggtcatgatgttaaaagttgacttgttatggtgtgagtagctcaagtctctagctggtttatgtttttcttttcactgcaatctttttctactacaatgtagtttgtactgactgatctctgtaagaattctaactaggtcattatgtcgtgaacttgtgatgctatccaatgagtgaataaccatgatcttgtttttgttataaaacaggttggagctcctgctcgtgttggtctggttgctcctgttgatgtggttgttccccctggaaacactggtctcgatccctcccagacttctttcttccaggtgatcatttgtcgatgtgttaacatattgtttatcctcagagtcaaatacaagttctcactgttctatcttgttacaggtgcttaacatccccaccaagattaacaagggtactgtggaaattatcacccctgtagagctcattaagaagggtgacaaggttggctcctctgagtctgccctgcttgccaagcttggtatccgccccttctcatatgggctggtgatcaccaatgtgtacgacagtgggtcagtcttcagccctgaggtgctcgacctcactgaagaggacctgatggagaagtttgcatctggtgtttcgatggttgcctcagtgtccctggcaatctcatacccaactatcgcagctgcgccacacatgttcctcaatgggtacaagaatgtgctcgctgttgctgtggagaccgaatactcatacccacatgctgacaagatcaaggagtatttgaaggtaacctagtttctatttcataatttccctttttgatgtctaaatgcgtaagaattgtctgaggtagtctgataattagattgcggtactaagctgtagcatgcccatgtcttggcacaaacttatttgttctggtcttaacaatcaatcaatcaatcattgagaatttcatggtttagtaagaaactgaattatctatgatagctatttcacttagtttgatatgcctttagtgcttttagcactttcttgagactgcagtttacttttcttattcacgatgaagactcagttaaatattgattactactggaagctaagttaatgctgatttttgagaacttgggcatttcaccaccacagtttcttacatatttgtcttgcctattcttctcaggaccccagcaagtttgctgttgctgcccctgttgctgctgctgacagtggcgctgctgctgtagcttcttccaaggaggaagagaagaaggaagagcccgaggaagaatctgacggtgacctgggcatgagcctcttcgactaaagcctctgatgccatatctttgccaagtcgaaagttttgtttcagttctaaacatcaaagtctgtctataatctttagcatttcaagcttctggtagtcaagaactatctaggccttagcgtgtatccaacaatgttatctttattatgcaattcaattcagttgtgcccgtattcctctggtgtcatggtgtgtttgtgcgatgatcatctttctgttcatcctcttgtgcaattgttgctacagacgatttgaattggaatcaggttgatgctcagctcaagaactattttgatttagggaactaccagactggacttttcaccttttggtcctttgtaaaaacattatacaaatagatccttaaaaaaacttattctaagaatgaatcatttttgcggtgccaatgtcatctgcatcgtagtccaactgtccaacatgacccgttgaaaagtcactaatgtggagggagacggtaccaatatcgtttgtgccaagaacctatttgttaaaaaaataaaaaaggatccatttgtaataaaaatttacaaataagttctcggtgtcaatgacacttgtgccaaggatctatttataaatatttttttattacaaataggtccttttttattacaaatagatcttttaaaaattacaaatatattctatttgtagaatgatttttctaaaaagatcgaaaggtgaaaaatccatactaccagacgaccaaagggcgtagtgataagccatacatctctgatcattcagtcccttgcaaaaattgtcatttaagtttcgttaatgcaggttctcgtgggcacaaaaacgctagcatatgctttcttcattctaggtgaagtttgttgtctttctgaaaaaaattgcacaaattttcccagtaagatgcagacacatgcatcaagctgcagggttcaatcctgagcatcgatttttagattggacggctggtaaagcagcatgtgcttgctgcagaacccaatatataaagggaggcagccatcggttcaggttcagtaactgtgctcgagtgggcagttttgcagcagcagagcagatcgatcaaccaaggataaataccatacgactgatacgagctagcagctgaaaataaactaagatcgacgggaccggagccagaggagatcgatgggcagcggcagcgaggaggcggcgccgctgctgctgccggtggcggcggcgacggcgacggcggaggagaggtgcccggggtgcgtgcaggagcggaggaaggcgagccgcggagggcggatcccctacacggagctcttcttcgtcgccgttaccactcttgcctcatgtaatccgttcatttcagctactgcattttttttatatatatactccctccgtttcacaatgtaagttattctagcattttctacatttatattgatgctaatgaatatagacatataaatctataatcaatataaatgtgggaaatattagaaagacttaaattatgaaaaggaggaagtataagcaaatgattttaccagctgcattatccttgcacttcttattagtagttcttacatcttcatccgtctcttaaatctctcctcttttctactgcatgcgcaacactgcaatgcaccaaccatatggtagctatatattgattacagttatcatcgttgttaatgtttctgttcatgcatgttcatcaacgtgaacacatgcatacattgatacatagcactctttccagttataaacacttaaatttaagataagacgtgatcaacttttaaaattttgatcagatcatcaatagtttctcaaatgcttaatttaaaagaaaaaaaatagtgtgtgtaaatttatctggaaaggtactattataaaatcataaatctatcaaaaatttaaaacttattctaacataaatctaatggttaaaaatcaaaaaattaaccaagtcttatcttaaacatccaatatttatggcatcatttgatcatccttagccactagagagatgaagggggcatcgatcatgatgaataaacggtactacaagacggacaaaaggcaggttgcaagttgcaaacttggatctcctactcctaaataaaaggaaataaaaagtaaactaggatgcccttctggtacttgacaaaaagaaaagcataactagcacccaccaatacaaccccaacttgctctcttcttgacaaatcttgatctacatgccaaataaatatatactagtaatatattgccatattgatgcatcctaggctaactatagtatataagaccacatatttacctgttttgagatatgccaaaaacaagtatatatataatgacatggacccaatatatatatatatatatatatatatatatatatatatatatatatatatatatatatatatatatatatatatataagaggagagagaggagaacaaaggagaggatggaggaagaagacgagagaaattttgtccgaaaaatttagaatttgcattgaaagggtatgtagtggtacatcttaaacacatgttaaattatagtggcgtggttccaatttcacaaacagtaatgatatatcacaaaacaggtaaatatataatggcatgatccaattaaccctatatatataggagtacttgtggagccgcttgaattgaagctcaaacatgcatgtaaaatttgttcaggatagcaagtagtatctgtctatctgagatctgttccagcactatgcacctatgcaattatgtactatcagtatacatatcatattaatattggagatcaatagcgtaactaaccacaaacagcagcaggagcaagcacatgctttcttgtcgtgaataacaggattcttgtgtttgttcccttcatgctgcaagctgcacatctcgtttctgatttattgcttcctctgtcctttaaatattgcagctttaccaatcacgtgcctcttccccttcctctacttcatggtaagtatgtattcacttctccatctaattatttcatcatgcgtcttgagctacagtatcacctgcgtcgcacaaagacgtttacctaacttgaaggacactgctttgcatcattcctaattaatctctgaaccctggatcatttcgaatgcatgtcccagttcacacatttctccctaaccattataccttaccacttggttgcaacttggatctcatgagatattccaactgtagccttcaccgttttgctttgtatagctgg

SEQ ID NO: 18260 - DNA, 6954 bp, Oryza sativa
ccagctacaacacatttctatcagtcattttagggtagtacttagatttccatgtgtgtactgtagggtcatatttaacacattatttgggctaagtacaaagtattggatggcacttactacaaggtttgttctaggtgctctaaatggtttacttgcgccaataaaggtaactaaaagtctttcaagtgacaatttcagcatgaagttgtatgaaattattcatgtgcctaggagggagctttcctaacatagtatttatcaagcattacaggcttattctattgaagtttgccaaactgaacatcaagctcttggactctccattgtaatgccaagcaattctcttgtttgcccccattgtgttccacaatcctttcaatatgcactgctataaagctgttatgatttactttgatcataggttaacacagcatggggtttgggtctcgttgttggtccagctcttggaggctaccttgcacaggtactaatttcaaaatggaaaaagaagaaaagaagctaatattcggtttcttacatcgttctgcttccttctcagcctgttgaaaaatatccacatgtattttctaaggagtcagtttttgggaggtatgtcatacactgatacaagagcaagatataagcccagattgcttgcagtcagtgttgtaactactaaatacccatatctaatttcattacattttgcagattcccgtatctcttaccttgccttggtgtatcattgtttgctgctattgttctgataagttgtatttggcttccggtacgtaaagtttcacttagatgccatttccccaataattcttaagcgaattctagcactaaatgctcgttacttagcccttttctatggtctagttaatttcacaaaacaaaaaaaatattggattaatttttttagaactgtttttctagtgttactattaatgtggttttgtttgaaaaatgtatctggcaggagactatacataaacataaatctcctgataaggacatcaaaagaatcaaagaattgccattacagcaggcttattgggattcacctcgtaagaagagcttgttccagaatcggccatggatgtctactatgatttcatattgtttttttggtcttcatgacacagcatacagtgaggtaaagaaccatgttttctacgcctttgcttgttaccagtcagaaggtcacgttaatctatctagatgccactcagtttatttctcatgcttcaaaaattattatctacatacttgctaaactattcacacacagctttgatattcacataacttaaggggttctaaaaagattaataccattagcatatttatgctagatattatccttgtgggctgtgagtgatagaaaatatggtggccttagcttttcatctgaggatattggtcaggttcttgctgttgcaggtatattgccatctttcccccaacatacataatttatatatatattctgaactattcatcagactttaaagattcatgttctcacatagctgcataaatttgttgttaaataattgtacttcatgtctcttcgtttcaggtgctagtcttctagcatatcagcttattatttaccactgggttcataagtttcttggaccaatcatttcattacgaattgcttctgtgagtagtctcctatcacgacttcaaaagaaatataaataatcatttcatggtcatcactcatatttaactgaaattgcaggctctatctatacttattctttctacttatccttttatgacatacctatctggcgcggaactttccttagctttttattcagcggcaatgatgaaaagtgctcttgcagtaagcaatttcaaagctcttccttcaaattttaagtatctacacgtgtatccaaccacaccatttgttagctaataggtacagcagtaatatttcaaaagtaataatgtacaaaaaagaagatgtgttgcactgcagaatgcagattatgaaaatctaactcagtctacaatatgacaaattcaactgtaactacttggggaagacaagcctgggttatttcatagagtactattttcagggatttaagagtaacaactaaaataggggctttattatacttccattaatatccaagtctttatctctaatgtttgttttgtacaacgtgtgcagattactataagcacaggaatttgccttttacagaacaatgctgtggtatgcataaaaatcaagtgaatgcatgtgttctgatactgtgttcacgtaaataagctaaattatttattgactttgaaattcaatatcagcttcaagaacatagaggcactgcaaatggtgtatcaacaacagctatgtcatttttcaaggcgattgctccagtaggggcaggtgttctgtgagtaccacctcttaacacttttctcataaatacaattaatgatcgagacataatgtttcttaaatgattgagataaatgatttagattttagtgatcaatactcaattttcaattcagattctcgtgggcgcaaaaacgtcaggatgccctcttctttccaggtgagctatttatctgaactgcactgcgctatacgcctatatcttgcctcgtcttttaattagccaggttggccgaaagaacaccccttccctcccttgtctttcaatttgtttggcctagtaaactaccatatctttcagtcgaccatacattacatacccttgtcctatcttatttcgttaacaaggggtttgcctggactaattgtactaaaagaacatgtaatcaggaaaaagaaaaaggaaaggctgatccagtttggctttcttgaaacctgtaggtgatcaagtggtgttcttgatgctgaactttgtggagctcattggactcatatttacttttgagccttttatggtgttacctgaggcatcagatgagtgtagttagccaagtgcagaggaattgtttcttatcaataataaatttgaaacagtaataatacttaacacttgctaatgggctgagtaatgaggcatagcttaaatatgtggcatgcttgtctgctcacagaaatggaagtccttgaatgatgaatctggctgcagtcagcatgacatgtccaattttgtcatcatggtgtattagttgcatcttgtcacaatgattactttttaaacagaacaacattttaaggtagttcatgttctcagatgtcaacatttcccctttttgaggtcactactcctacttgactaggctgacagcttagtagttgacagttaagtttagcctgaaggaactgaagacaagaagaaatcaggcgggtaatgatgagactgattgattagacaatgggaggttaactcatcataatgcttacgcacctctgtcaaaactcaaaagccagtcatcatcatcttcggattgcatcgccgctgccggggccatgacggtgttctgttcagcttcagcagcctggacccaggagccagcagcaaagcagctagctgccttggcgtcggagctcaccttcaaggaggagatacggcgggactaaccgcgcgtagacgtagcgcgcttgcttctcgccggaaacctcccgtccttccccccccccccccctctccggctgcagcggccagcggcgatgattgggttgggggcagctctcgcagtgatctaggagcctttctcttcccgcggagaagaggagcatggttgggcggggctcccacggcgatgccggcggcgggcgccgccggaggcgagagcgaaacgcgatgagccactcaaaacaggggctaaaatgcaaaaaatcaggatcgctactgttgatagctagcgatcctaaataaataaggggtaaattgaaaataacccctatcgcgatccaaagcaggggttcttttgcaaaaacatccgagactcactggattgggccgcatcgcgttgcttgttttgtgggcctagctcccgattcggcccacgctaaccttgggccgcagagaaagtttattaccagttcaggctttccttcccgccaccgcggggatgcgccggcgatgaaccgccgtgaacggcggcgagggagaggcgcgcggtcccatgccctcttgacgaactcgtccatgtcaggcggcacgccggcgcgtggcctgacctcctcgggcgtcagaatctgacatgaaatcctcgccgggagggagagggacgggacgcacgccgctgctcgtggctcgccgccggcgttgccaagctagtctgcagcatgcaatgcacgactctgcccagtgcacgcgtggctgatgcaagcctcaaatgcgctgcgttttcagcatcctgattaatataatcagagattcagggaggggggcttgttccagtttggtgttctagaaacctgcaggtgatgttcttgattgcttaatttggtgaagctcgttggactcatattgcccaattatttgtcatcgtggtgtactaattgcatctcgagacaatgatcaacatactgacaaaacagaaatctaaggtagtactactgtcatcagatatctgtactgtttttttctggattatgacttgatgaatgactaggctgacaggttagttgtccggactgaagcctgaaggaaccgaaggaaagctaaaccaattttcgggccaaaataaaaaagctaggcggctgggctgacgatgagaatgttgagcttgattggtcttcaggcttgtgcacctctgtaaaaggccagtcaccatcttcagattgctttgcattattgcatattcgtgtaaggtcaccatcttctgattgcatggttcgcataatcgcatggccctcaaaatcgataggaactttaagtttctctccttgatgtaaaggtgagaactggtgagtggtgaccagtgatcatgcacacactgtcgcagtcgcgtactatgtattcctcattcctgaatatggcccaaattagaagagaatgattggtttatgcagactgcaactactgcactctggctaacttaagagcaagtttaatagtggagctgactgtttgctccaaaagaatccacgtcaccaaaaaaaaaagtaagtgaagagtagatttgttattggtactcctgctatctttgcacaactatcaaaattatattttaattgaatgggcaacttttacactagcaggacggggtgtttagatcccacccaatcaaaatttacaccatatcacatcgaacgtttgaacatctgcataaagtattaaatataggctaaaaagaactaattacacatattgcgactaatttgcgagacgaatcttttaagcctaattgctccatgatttgacaatgtggtgctacaataaacatttgttaataagtgattaattaggtttaataaattcgtctcgtggtttaccgacggattatataattagtttttttattagtgcctgaacacccatgcgacaccccatataatacccgatgtgacacaccaaaaatttacaacccttaatctaaacacccccgaaggcttgctggtcactcataggctgagcattagtggaccccacagtatgcatgggagcatgtgttagagcaagtataataggaggctgtaagacgactaaatactgaggtggaggagaaaagagaggagagagaggagaagcaggctgtaaacttacagccgacttggcacaagaaccaagaaactctgtgagagagacaagtggaccctgtattaattgtaaagagctaactataatatgggtgggctgagagaaggctgcaaagaaccttacagccaataagtcagctgtattattacccttgctcttagagctagcgataaaataagtgcccatatttctctctcttccatctcaacacaaatataacttgtttattgctacagcctgtttacataggattattgtacctactctaacaagtaatcatttgtactacaccgtgaaacagtgagcaaactgatttttctgtctcctagctagactaacactggaagctagatagtactgacaaagaaggaaggaaagaaagaaaaggagaactctcctagctagctttctacctggtgagtgtttaaagtctccttgatattctatactggaaacattacatatggcagcattgtagactaacaaagtgtaaagtacaccaccgatccttgggacgtggtgtcactcagtggcagagctaccacccggcgacaatgggcagccgcccgggctcatcggcattaaatccattaaaatttcatgtaattagaaaatttgaaatagaatatatgtagtaaatactagctataatgaagtttactcgggctctaaaatattttctagatccgctactggtgtcacttagatccacgatattgtcaatctgacatgtgggtccatgatcctatttcaatgaaccatcatggtctaaaagcccatctgactaggttgaccaccgacatggctgtctagtgtggtcgcaactttgcagtttgctctctccccacccggtcaacccacttctcccccaaatatctttgttatgtattgttttgattcagggaacgttgtatcgtagcggcagcgacatagtgatagggctagcgcagtgacgaggagggatgtgggtagggtggtgtcagcacaggaggaggcaggggggcttcatgaagtgcgtcaataggggaggccatggctactcgaagcaatgcgtcatcttcaagtgctcagagtaagaagcatgatctcctgctgattctgtgcccttgctgccgcaagaagaacatcgtagaacttactgcagcgacacatgctaattacggtcgcgtctccagccaccatagagtactgacgatcgcgagtgccgccctcagagtcatcgcagggctgcaggaat

SEQ ID NO: 18261 - DNA, 769 bp, Oryza sativa
tttctatccactattgaaatacttaactagctagcatactgcaaccgggctttacaggcttatgccgttgaagtttgttgaccagagcatcaatccattgggttgtcattggtatactacaaagttctataatattttttactatagttatattgcactttagattatgacactctttttatatgattaggttagcacatcatgggcaataggtctcattgttgggccagctatcagtggatatcttgcacaggtatcctactaaattttaataccatatgagttgggtgcatgcttaaacaatgcattgacgctattatgatgcttttgtttcatttgacagccatcagaaaaatatccaattctatttttagcaaactcattatttggaaggtatcgttgttataggaaatataattgttctagatggtataactccttaaatgactgattcttgaaaatctttccttaggttcccatattttctaccttgtttatgtatatcgatcttctgcttcgttattcttataagttgcatttggctcccggtaagtgcacaactagccaattttattcttattgatattaatttgggcacacataattcttgtttttatgcttcccttagctaaaatttatcttacctactaaaatacaaaagttaattaatattttgctaatactttcaggaaaataatgtgttttcatttcaaaataatgtgtttcataaaatttcaggaaacactacataaatattcaatagaaagaa

SEQ ID NO: 18262 - DNA, 1068 bp, Oryza sativa
ttcaaatatttgatttgatagaaaagttaaagtatgagaggtaactaaacacacagccttggtagttatttcttagagctaaaaaattggttttctagctttctacttctattttattttgttaattcaacaactataacttattagagtacgaacgaaaagttaaatcgcttgaagagcttctgattatcataagaagctacagctattcagaaacccctcgaataagccattgctaaaattgaacggttgtatgaggtgcacaaatcttaaaacaaatcataaaattagtaattattaatttgatgattttgattaattgaagggactgtatgtatatatatagctctccaatgtggctgcatgatcaatggagaatatatatatatatatatatatatatatataggagaaactaattaagcagactcatcatgataaaactcgctaaaatatggagatcaaatgagaaagagaggaacggaatcagctgcagctgcagatcgatgagagcgcgattgatgatgcatgtgggtgtgggtggaagagagaataaatgaagggaggctattacctgtgcagagcgtgacaatccagacaaagaggaagctcccgtaggggatgccgtagctcgcggccttccgccggtcgacgacgcacccggggcacccctcaatgcagtacccatcgtccacgccggtgccggtgctgcccttcttctccagcagcggcgccgccgcctgccgccggcgtccatgatcacccatcaattcaccgatctcgctcgccgagatgtcgatctctctgactcgatagaccttgcttctgtctgaatggctgtattgtattgaataactgatgggtagttgttgagatcgattaactattgcctgctgatcgatcgatcgatcgatcgatcgggaatcagcaataaataaagagagtgaatgggcacgtgaggctcgcagctagcagagggacttgcttgcagttgcagagcagaaaacgcatggaacagaaaagccggaggggagaagacaagtcgaaacaggctttccgttgtccaaa

SEQ ID NO: 18263 - DNA, 1643 bp, Oryza sativa
tctcttacatagatactaaatttataaacatttttaaataggaattaatactcatgttggatccgttttgggtgtagcatttaatactactatatgatatggctatcttgatgatatatttatcaacaatattaaattcggcagtatttgtttttcgtgaaagatagcatatcttgaagatatatgcgttgaatctcgttaaatatgcatctatatggtatcgatcttagaagatttgcatccacgtcatccatgatatggcctcaatgttttcacccattgttaagtgtaagtacctagagctatttcctaaatgcaatcctgacaaaataaattcaattcaaggtgtcaattgggagcggattaagacggcccattttgtttgggctggagaatctagctagcaccatgttactactcatgacggcccagtgggccactctttatccaagtattcggccttggcccagctaagctagcgcctattagggctcgcccccctgcccgtgcgcgccgccacttccaagttccaacctccgccctctcttctcttctcctctctccttctccccgagctgcccctcttctcttcctccgatgggtcgcaagatcaaagtcaagaagaagaaggcatcgagcaaggtgagcgattggtgctgactgtctcgcgatattttattttattttattttattttcatcatggtttaattcgagcctaactctgcctctactctttcttcaatctttatcggtgggtggattgaagaaagccgaagcttcatcgtctagggtgccttcttgcccagccaaggtgagagggcaaatacatgccaattattacaagcagatgcacacatatttttcttttcttttattttttttggtagttgcagtgagaggaaaaggttcgatgtgtgattagttttttttttctcctatagttttaatttcctaagctaaggcaaattgctcctgtcactgctcttcgaatgaaacactgacccgattggtatttcttttcaggtatggcaacctggtgtggatacactggaagaaggggaggagctccagttcgatcctcaggcttacaattatctcagagggtttaacattggctggccgtgcttgaggtaaaagttcaccatggcagccattgcgcgctccttatccgaggccaatatgcgcatcattgtatgggttatttatcctcatcgatttgttatctgttgcagtttcgatgttgtgcgggatcaacttggactcgtgcgatcggaattcccacatacattatatggcgttgctggaactcaggttgcattctctctataatgctttccttcaaaatttacatgatgaatatacatatattttcctattttgattaatgaattctgtcaacaacaaaattaggattccagttcgtttccatgtcaactgtgctctgtcatgattcatgggtgcatttgacttttttttttcctagtaacattccttttcaatcagtggttttgcctgctcctgaattgatggaatcaatcttttgtcaacatagtttgtgtaattatgagtggtgcctgtgttttcaggctgagagggcttcatggaattatataggcattttcaagatttgcaacataaatg

SEQ ID NO: 18264 - DNA, 1094 bp, Oryza sativa
atatttggtggccataaagatgaaggctatgcaattgattggagtccgcttgttactggaagacttgtttctggtgtgtgatcttgtccatgctatatttgtttgtcacgtcctatgctgttttgcttagaaaaccgtggcctgtcctgtgttaatagaacatccatatgctttcatttcgtacatgggcattgagtatatcaatttaatgatttgcctatgcaggtgattgcaataaatgcatccacctctgggagccaacttcaaacagttggaatgtcgatacaaatccatttgtaggacacactgcaagtgttgaagatttgcaggcatgccactgaaagcatatatacttcttggtgctctctagagcactgaacgtttgattatctcaaacatcttgactatatttttgcagtggagtcccacagaagccgacatatttgcctcttgttcagccgacagaacaatatctatctgggatatacggacagggaagaaaccttgtatttctgttagggctcacaatgctgacgtgaatgtcatctcatggaaccggtatgatatgttcacttgaaaattcgattatcttcataaaaaattcttctaatatttcatgaatatacggactaccattaccaggctcgctagctgtatgatagcttcaggatgcgatgatggaagtttctcaattcgtgatcttagattaatcaaggtacttcatattgttaagccacactgttctgtgcttgtcagttgcaaatagcacactgaaatggcatattccctccattgctgtttttatggtttattttcagtttggatttctgtctatgcatttaatattttggaaggaaaatgtggggtattgggtcttttgatagtaatattgatacaagatgattgaaccatttcatggatgaatgatattttgcattttcttgctactagatttgtcaagccagagacgctatggtagataatttgttgcttctgatgtctatatttaatatgcagactcctgtagaatacacgctcttgtgcaaaaatcagtgcagctacgatagttaaacgataatgttaattctttgtta

SEQ ID NO: 18265 - DNA, 5371 bp, Oryza sativa
ctgccgcccctccaagttttataccttatgtttaaagtgtgctgaaatgccccaaaaagaatgctttctttactattttctgacttgcatttttcaatcctgaattgtttgtgtacagaatttgggatctttcattggaaaaagatgctgaagaggaggcagagttcagggcaaggatgagagaacaggctgatgcccctgaagatttacccccacaacttctctttgttcatcaggtactgttaccacacttgttttatgtttacttcctctcattttcatatcattgtgttcaccattccttgtgtaattaaaatacatgtttgtggacctcgagatgtatttcaaaagtacagacactgttactgagtgaaatcataaatgtgatgttgattgttttatgtgcagggccagaaagacttgaaagaattgcactggcatccacagatacctagtatgatcatatctacggcagctgatggattcaatatgttgatgcccagcaacatcgatacaaccattcgagaagctgacgcatagatttctacagtagttgtttatctgaatcaaggtttcatgggttttttttttttttgaagtggatgagtgtaatgatactgcatgtctacaagtatcagtttttgatagcttgtatcctagtttcgttgtcattcatagtggtaggttctcagttttgcactgatgtcgcccgaatgaggataatcaaaagtatctcgatcaactgaaatgacatgttatattctacaagataagattaataattgtgcatctctgtgtttgcattaggtaatattcacctcgatcgtttgtatatttttgcctgataattaagttggatattaggtccatcggccagaaatctgggtcttgcagcaaaataagttgcccaagcatcattcttgctgtaaaatcttgttcttagaaaaccaagtggcatgtacctggtggtgttaatgacaccaaaggtgccaatataagttgtttattttataagttcctttatcgattgctcgcagaatgtaatcatgttctcctattatagcttggatgcgatgcgccactttcggcacttgacaatcaactatctgatactcctattaatcagcaaagtttctgacactgtaatctgaatatttgttactgttatggcatcagaacgtgcaattcgctgactagaatcaggatggatatgttgtgtgtgaagctctggttggccatttgatatctttgacaaactttattcgtttccgaaaatttggcagccgcccatgttgcctttccgaagatgcttatgctgttggttcgttttgtgaaaaaaaatcagaatcagaatgtcatcattctccctgaaactagtagaaaagagcatagcagcagcagcagcagccatcgatcacgatcactgcactgcaagccttcaacctggagcaagtgagccatgccatattggcatacgatacgcgagcaagtgccctcctttttatagccaacagcaagagcaaggcagatattagatagaatgaaagttggggaatcaatcagcggcagcttaatcctctcgtcatctccatcaatccatcgtcattaatcagagaatttgcttcttgtgttactaataatctttgaggggaggcaattaatggaccacctgacaaaggagcagatcgccgagttccgggaggcattcaacctgttcgacaaagatggagacggtaatccaatcaatcaatcaatcaattgcatgtgttcttggacgatgatcaatcaatgaatccagaagaaaatgcaatgcagggacgatcacgagcaaggagcttgggacggtgatggggtcgctggggcagtcgcagacggaggcggagctgaagaagatggtggaggaggtggacgcggacggcagcggcagcatcgagttcgaggagttcctgggcctcctcgcccgcaagcttcgcgacaccggcgccgaggacgacatccgcgacgccttccgcgtcttcgacaaggaccagaacggcttcatcacccccgacgagctccgccacgtcatggccaacttcagcgaccccctctccgacgacgagctcgccgacatgctccacgaggccgactccgacggcgacggccagatcaactacaacgagttcctcaaggtcatgatggcaaagtcagtctctctcttcttccttcctcccatttcatttcttttctgctttcttgatttctttttctttttcttttctccatgtagattattactagcactggaattacaaatcttttctagattatcattatatttcttcttcctatttaatctgcaaatgttgcttctgctgaactgtacataatgtagtgcattcgtcatcagataatcatatttatctgaacaactttggtgctatcatatgcaggcgaaggcagaatatgatggagggacatggaagtggaggccatcggtcaagtaactcccacaagaaatccggctgctgcggcccgaattcctcatgtaccatcctctgaaaaagatgtaggtttcaggtttgcaactgttctgatgaggattgtatagttcagagttttttttttgtcacctcaatttctggttacacttgttctggggctatgcaaacaagaaaatcaaacaactacacagtgtaaatgaaaatgaataatgctggccaattaatatacttgttcctcacaagattctgatttacatacaaaacttgacacacaaaacccattgagtgatcagcttcacttgagctatcacaagggttctctgacaaataagagcagcatttacaacactagtggagaccaaacatagtttacagggccactcacatctaattacagatgcaatgaacatgctttctgcttttccagcctctagaaatgggaatgctgattcaaaagaatgggatgctaaaatagttcacccattcctcctctcccaagttactctaggaaagttgattttgaagatcatctgatttccaaacaacatcctttaaggttctggagaggttcttgtagaactgcaacacattacaagtttgaagtgattcagtacaagccattcaaccaaatgttgcaaaagaaaaaaaaaacatagtcataattctgtgagtagttgatccaatcatcaaagcactgactcaattttccaatgataattcatgagcatcaacttttaattggcatgatctaccttatgaaattcgagggtgtcgccttttgcttttcgtacttcaaccatatgaagagagggtgcaacctgcagtatctgaataatagtgcacaataaatgttagattgaagaagcttacacaaaccagattgcagtatagcagttcttcatattacctcagtagcaacattgagatttccttttctccctgcttttaccttttccaaccttaactggtcaatcaataaaaaaaaattcagcacgtagaaaatatatatttgaatttgctataaattgtccctagaacccattactttaaaacggatattcatgcagatagttgttaggcaaggggagcataccttgtaatttttcttctgaacatcaaatcctagaggttttgcggcttcctcaatcttgcggacaatttcttttggtggacattttgatgtgaaccttgtttctcttttgaattcctgaaatagtgtgaacaaaattaaagtacagcagaataagttgcaaaactataacaaagttatggcagaattatgaggtgcaaaaatcaaaagacattctgaccaatgaactactacatatattctgggacttgtgacatgcagcattctccaaccatatgattgagtaaattgacaaagtgccagtgagccagtttacatgtttccagcttgatttagggaggtataagttgaaccaaaaacaatgacgcttaactttaagttacaggttcgttcataaaaataatacagggagaataggttcaaaaggttgttggtcaatattgattaaatagggagatcacgtacctgctctgaatcaaacaaattcccaagattgaggcctgctgacattgaaatcagttcaaatgcattgagagcttctggttcttctttcttttctgtcacatggtgctcctggaggaggtcaaatcacagtggtcaaaccatttagcaactggcatgcttttatcttcatgtcatgtgaaacagaaattcaagtgcatattgcagtttactcacttcagagtcattgaagacagcataaacatcatccaatgttgtgtcatatttttcgtcaaactctgggcgtttgtagccctttttgaaccactcatcctctaatatttctggaattgttactctctacaacagtagctcaagtagttagcttaagaaatcatccaatgttgtgtcacgaagaaagatgatattattttattagttattactatctgttttaatgattattattaagcatagaagagctttctaaaaggagtgctagcccctgtagaattgagtattatctggttgatgaatgctacaggcattacaggatctactgtgttattagaagacacattacagtgccttcagtgatgcattatacctaattatctactatgttattcagttgttctagcataccgtcattgggtttggatcaaggattcttgttaacaacctcttggcaggaaaagacgtccaaggtggaaacgtaaactctgcatttgatatctgccaggaagtgcagagaagaatcaaataagcatgaaatattaatacaacaaaaatgatctaaaagtggtacaattctcactttcttatacaacgtcataagattagagtcctcaaaaggcaaataccctgctagcagaacgaacaggataactccacatgaccacaaatctgccattgctccatcatatccttgatcttcaaggacctatcacaaaggtggatgaaatgtgtgaattattaatggcttctgatgaaaaatagttccaagtatggtaggttaaaattctataatttctctttctgacattacctccggtgcaacataatttggtgtcccgcaggttgtgtgcagcaaaccatcatcctgaacaaggccacaaagaaaaaagaaatattaattgaagagacatataacgattatctaataatttctgaactgtaatatttgtagcctgttggtacatacttagatgatacagtataaagcaataaacctttaccttaatttgctgagaaagtgcactcagcccaaaatcagagaccttcagattcccatatgaatctagtagtaaattttctggctgcaagtattgtaatttagattgtttcttttggaagg

SEQ ID NO: 18266 - DNA, 22937 bp, Oryza sativa
gacccgagaatgaggacgtagagttgggaatcaaaaatcatgttgtagatactctgccatgcgtcgtcatcttcatgcacgttacaacgttatcatcttccagtggagtacagtacacgtacatgtagagggagtagtatacgttttctgttcgttccgggttcgcaagactggagaggtagctgaacgagagtgacgcaatgagctgcaatgcaccacagcagcagcacaaactctgcacatgtgctgctgcgaatgcagagttggccgtagagcaatgttgtgctgtactactactggagactggactggccgtcgccattctagcaaatgtcatttgtaacaacgatacactggagtatgcacagtggtgtaccgtgaaccagcaaggacgtgcgaatgcacagtgtgtaacagcaaatgtgccccaggcagaggtagcaagccagaaagtccaacactacactgcataaagttttggatctttataggattctcccaacacatgatgagtcgcacgcagctactactcctacagtagcagctagggacaatttcttcttcagctcaggctcagctgctgagccggtcgcgcctcccaacgcataggcatgctcccgccggccccgtctttcttgtccgccattacgccaaccagccgcagtaactcagcgtactactctactcctactccttttctttcgtttaatagtatagtcaactactaactttaaatcaccattaacttaatagctacttcataccatacttagagcagtcccaacccttcacttaggatagtgtttatggcattaactacattgcaatgtaggacttttagcttatgtgacactatattaattaaaagagagagtgaagagaggaagaaactgggtctcatataggacacagcttcaacacgagaatatatgcactatacactatcaagttttacattgagagataatagtgtctttataatagatgaagaataaatatgattggtagagaagagagatgatgtatttattaatggcccattttaagaaaccatgggttgtagagtgtagtttctattgtaatgtcttattaacatggcaccatagacacggtttatgtatactatgggttgtgactgcctttatatactacactattaatacttgatcctatttatcatacacacattgcgtcttgaaattcgtgctacagctggctataaatttatagccctctgctcatctctcttctctattatcttcttaaaatatatttatagctggcttatagcctgctattatacctgctcttactcgctgcagcattgctcactactgtactctcttcgttaaaaaaaaaattaaattctggccgtaaacctgaaccagcgtaagccacctatacgtataccaggtttactaaggcctgcttagttccaaaaactttttttaaaaaatatcacctcaaatctttagatatatgtatgaattattaaatatagataaattaaaaaactaattgcacagttggaggagaaatcacgagacgaatcttttaaggctaattagtccatgattagccataagtgctacagtaacccacatgtactaatgacggattaattaggctcaaaagattcgtctcgcggtttccaggcgagttataaaattagttttttaattcgtgtccaaaaaccccttccgacatccggtcaaacgtccggtgtgacacccaaaaattttcttttcatgaactaaacaggccctaaaccttgaggtgaggtcattgccacctacggagtatgaggtatgatttaacggttaccacgaaatatatcggttttaaaaactaagaagattatcgcacgtgatgtcgtgataattgtacggttttataaaccttgtatatgactctgtagtacaacttatgtacaattaaagacatgtaattatagattaattaaaaaataacatgttcatatgtctgtatagttgtttataatcgttaatcaaatttagtgataacgtgagtcaaacagttagaccgtatgcataatattttttttttgaccgaggatgtactcccaacccagacgagccaccaccatgctagctgctgctgctgctagcgttgcccagtgaccttgcagctcgccatgctagctccgctgctgcttttgcccaaagctgcaccccctgcattgcccctcccctgaccaccttgcctcatctgtatctccgcccccccccccccctctcctcaacctctcttgtgcttgcttctccattgcagctcacctccatctcctattctcctcctccttgttgaaggagttcgtgtgcctctaccaagaacaataagaagccttgcattggtagccatgatcacggtggtggacctgtaccacgtcctgacggcggtggtgccgttgtacgtggcgatgacgctggcgtacgcctccgtccggtggtggcgcatcttctccccggaccagtgctccggcatcaaccgcttcgtcgcgctcttcgccgtcccgctcctctccttccacttcatctccaccaacaaccccttcgccatgaacctccgcttcctcgccgccgacacgctccagaagctcatcgtcctcgccctcctcgcgctctggtgccgcctctccgcgcgcgggtccctcgactggctcatcaccctcttctccctctccaccctccccaacaccctcgtcatgggcatcccgctgctcaaggggatgtacgccgccgccggcgccgcagccggcgccgactccggcagcctcatggtgcagatcgtcgtgctccagtgcatcatctggtacacgctcatgctgttcctcttcgagtaccgtggcgcgcggcttcttgtcatggagcagttcccggacaccgccgcctccatcgtctccttccgggtggattccgacgtcgtctcgctcgccggcggcggtggtggagccgcggagctgcaggcggaggcggaggtcggggacgatggcaagatgcgagtcaccgtgcgcaagtcgacgagctcgcgctccgaggcggcgtgctcgcacgggacgcagtcacactcgcagtccatgcagccgcgcgtctccaacctctccggcgtcgagatttactcgctgcagtcgtcgcggaacccgacgccgcggggctccagcttcaaccacgccgagttcttcaacatcgtcggcaacggcaagcacggcgacgaggagaagggcgccgccggtggcgggggccactcgccgcagccggtggtggggaagaggaaggacctgcacatgttcgtgtggagctcaagcgcctcgccggtgtcggagcgcgccgccgccgccgccgctgccggcgcggtgcacgtcttcggcggtggtggcgccgaccacggcgacgccaaaggtgacgacaccttttttatcatcttttcgtgcactttgacttccctttttgttttgcccgcgtgtattacactgttgtttgcttctgcacaattaatcactcttgtcttgtgctcttgaccatccgatcagtataatcaacggtccagatcacactggtctgctgattgtttggagaactcaactgcgtatactgatttaataccacattcttgaagtgattctttttcacaaacttaccttcttgaattgttaattcatgtaagcttttctgatcttaacagtgacattgactgttaagtagagttgaattgtacagttaagacaaaatcttaacagtaaactactgatttgacaaaagaaaatgttctttgatggatgcacaggtgctcaggcctatgatgagtacagcttcgggaacaagaatgagaaggacgggccgacactgtcgaagctggggtccaactcgacggcgcagctccggccaaaggacgacggcgaggggagggcggcagcgatgccgccggcgagcgtgatgacgaggctcatactgatcatggtctggaggaagctgatcaggaacccaaacacttactccagcctcctcggtgtcatctggtccctcgtctcctacaggtcaattaagcaaacattttactcacacttttcacattgccatgttcatcatcagtcatctctgtttgttgcatgtgttgttaatcttgtgaacaatgtgatgtaattcaggtggggaattgagatgccggctatcatcgcccggtcgatttcgatcctttcagatgcagggctcggaatggccatgttcagcctaggtttgtttgtgcatctctgatacatgctgcattgctgtaatcttacatggttccatgtctgattgcaatgactgaactatgttctggtttgcaggattgttcatggcattgcagccacggatcattgcctgtgggaactcccttgcttcgtatgccatggccgtcaggttcctcgttggtcctgccgtcatggctgcggcctccatcgccgtcggacttcgcggggtgcttctgcacattgccattgttcaggtaagctgcaagttcaggcttctgcaccaaaatgcatccttaactgcaaaagaatctatcgtaactcaacaattgtcattgaactctcaggccgctcttcctcaaggaatcgtgcccttcgtgtttgccaaggagtacaatgttcatcctaacattctgagcacagcgtatgatctctttaccaccatttttttcagtattggagaaatgtccccattttgaggtttcttttcttttatgccctgaaatctctcgccctgtttcccggttcccttttccattgtatcacaaacgccatgcactgaattttctgaaaaggggcgcatcttgcagcttttgatgattcctaatcatattgttttagactaagaaatccatttttactcatgatttatcatccacaaaggcagagtccataacaataccattaaccatgattctataacactatcattgtatctgacatgaccatgaactcttgttctgcagcgtgatattcgggatgctgatagctctccccatcacattggtctactacatactgctggggctctgaagagctctccaagtctcaactcaactgtgcaagaacttgatgttactgacagtttgattaggatttatggtctgttttagttgctcagattttgtttggatgataggtcagcttagtgatgctaggtggacaattatccgagaacttttgggttcaagtgacggccagccacggtttctgattgaagattaggaacatagacatcacattagtgataacaggcatccaatttgtaagacattgagaaggtctgtttcaaattactgacaatgtagtaagacattgaacagtgcttatttagcattccaataactgatggtaatgcgcttacttaaggagctactctgaaggaatttatttttaatctcttgagagattagctccggattttccttttcaaatgtttctgagtttgagggctccttcggaagacaagattctgaaaacacgggaataatcgtaggaataggatgtcatgctataacaaatattataggaaataaatttataaatttataggattctataaaaagtattgttttgtagtaccataggaaaatcaagaaactttaagttacaaggatgagaaaacatgaggtctagtctcatgttagttttctgtcaaaattcctacaaaatgagcaataggaattttaaaggattttggggaagccatttctatgtttcaaaagatcatatggggaaatttttcaatggattttaggggttgaacgctttatcatcacttgccaacaaaagttattacactttgtttaaggtgaggtgaataaattcttagacataacttactaagggcaacaacaatgtatatagcaaaaatagtccatataaataggacctatatatgtgggttttaactattataacattcacaatgtatataaatagcaaatagtattaggaggagagaaagtagagacaaaaaatatattttatcctatatgagaagcccatatgcttatgaattttttttccttactatggactagttccacaatgttgttaggtgactggataaaatattgtattagttatgaactagttttacactatagttatgaactatattgtattagactgaataaaataagtctaagggaatcttgccacattttttaagttattaacacatgagactgactccctctatttcaggttataaaacgttttgactttggtcaaagtcaaactactgtaagtttaactaattctgtagaaaaaaaagtaatatttacaacaccagcatagtttcattaaatctataattaaataaaatttcataatatatttgtcttggtttaaaaatattactacttttttctaaagaatttatcaaacttatagtagtttgactttgatcaaattgaaaacatattataacctgaaacggagggagtagttagaagggaatcttattaacggtggttacaatcaaacacttaccaaattgattaaatttgtctaaccttaggtttgcagactatggtaaaatgtagcttacaaccaaacattctctaatcctttaaaattttctctatgtttctttttatctacttttcctttgttccaaagaatcggaaagatggaatctttttgccacttttttcaagtttcaaatgaagaaaaacatgcgtagcattttgagcatcttttctagtactactcccaagtataacaaaaagtttgggcccaaaattaaaaggctaatggctggcctgtttgctcgaaacagcaggacagaaaaatgattgtgttgggagtcagacaaaagtgttggctttaggcatgcgcacttgaaggttgaagcagcaaccgacgattatactccactcttctcgtcctgtgacagacttgacacggttggatgtctctgaagcttataaccaacggtaattttatcatttttgccgagacatatttcttattataaaatttggtatattagcatatcatgatataaaaaaatttagtataaaatttatatacttataaggaccgtaaaaattctttagtaccaatgcatggatcttgtgaagaagattttttttactcttcatcacactcttttagatcatctgatatagtacacggttaccatgggttcttttagatcatctggcatagtacacggttaccaagggttattagacatatccacggacctaatttacaaaatcgtggaataaattggtcaagtttaagagaaggtaaactcaaaatatagataaaatttatacaatttgtcaacgaaattgcaacggtttttagagcaagtagtttttattattttttcggtttagatcccaacctatgtattttgaatttgttttatatctcttctatagagctgggtattctttttacattaatatactcccttagtcttgtagtatagcaacctatgattggatgagatattttagacctattcaaatttattataccgtgaaatgttccatctggtcctaacttggataaagggagtaggggtgaaaacgggatggatatttatatttctgtccagtcgcccgctcgtattattttggagcaatttcgggtaaaaaatccgggtactcgggtgtttgtacagatatcgaagccgaattcggatacattttggttgatacgtgatcgggtttgagagggtggtatccgatggatacggattatccgataaataatacagatattacacggtgtctgaattgatacctattcgttccgtatttatgaccgatattatccatgtttgtatctgtattcgatactatctatgtctgacccgattccaattattaaatatgggttaggatatgggaaggatgcgatccgacgaaaacaaccccatttcacccgtaggagggagtagttggtttgattgttttttcgattgtgtagaatttgatttttgtaaaagattgttgtcagggtctcgggtgggccacacatgggctgtcagcccatcaccaagaagtccaagcaagccccaacctgaagtaatacatagcagcaacagcttacaggagaggacatcgatcgatcaattggccaaggcggcaaacggcggcggcggcgacctggaggcgggcttgcctccttgtcgatctctaccttccctcttcctctgcttgtctagaagttactagacctttctagcccttgtattcctccatcttccaccccaaaaccttccaatattgtaacagattcactagctccttgtgttggatttgataccactacttctgaaattgcattgttgaagtgggtcgctaacaattgtaaaaacgaaaaaaccccttgtcgtcttctccattgcggcactgaaactcaggcggcgccaccagccagcgtaccacgacgttgctctgctagggtttgctccaccctcctcccacctcgcgccatcggattccaccttcccaggtctccctcccctcccgtcgccatgccgcacctcgtccgcgagcgcctcttcttcggcgacatcaacgacgccatcgccgcgctcaccaccaccaccgcggaagccggcggcttcacccacctcctctccgtcgtcagctccgccttcatctccttcatcaccgactgccgcccgggcctctccatccccaccgaggaggtccgccgcgtggtcgccggggaggagggcgcgccgccggtctccgccgtggcccccgggcggctgatgcgagtggtggagcgcgctggggtcgggctgcgggtcacgcggatggccgtgccgctgcgggacaccgaggaggagaacctgctcgatcacctcgagccgtgtcttgatttcatcgatgagggcaggaaggaggggaacgtccttgtccattgctttgctggggtctccaggaggtacgattaatatttaccaacactaatattccgagtaatctgtgcttttttgtaatctttagtgtcgtgtgctaatcaaagtgaagttcattagatatttttagttctggaatgttacatatatctgttaggcatacttccgttttagccaaatggacattgtgaattttgttccaagaatttatcaattaatcataagcatatgatggaatgtgaatccctgtatcatgctctgttttgacaagttggatatttttgcctgtcctgatgcattggttataacaaatatattggttaacagcgatgtatctcctgttcactgttgttcatttgtaagaaaattaaatacttgtaaatttatctgtatcttgttgcagtgctaccatcatcgttgcttatcttatgagaacagaacaaaaatctctggaaggttcgattatttcaacaaaatgggtgatttttcagtcgttgctttggttattactccagatgaatacctgagctgtctttttgatacactctggtgacatgccatgcttactgtcttgtttcagaagcactagagtctcttaaggaagtcaatgagtcagcctgcccaaatgacggttttcttgagcaggtaaccctttgtgatctgtttgcaccctattgctcttagctttcttttatttatttgttgaatgtgttgtaaattgcagttgaaactgtttgaagaaatgggcttcaaagttgatacttcaagtcctctatacaagcgtttccgtttaaaattgctaggttagtcataattcatcttggattctttgttactgttggacaggttgtgtggttattatgtcagggaaactgtgaagattctggccactggttagcatttatttaaaaaatggagatgtaaattctttgttttagtaaatttcaacattgcatgtctgtgaatcatgatatatttgatgttttcctgctttttttttaattatccatgactaagagtgctattcatgcagtcctgttgaaaataaagcagtcatacacttctcaatattgcttacttttgtttcttacttatgaaaaatctttgacaaatggacagatttgggtactttactgtttcacctttgtcctttctcttatgcatagtctcttactttgccacttttcactaaacttgtcaattttttttacttctcacaggccaatcctacaaaattggagagaaaataggaagctatgtatttgaagatgatcctggtctttctggacagcctaattcttctactcagaatttaccaaacaagcaaacccaacaaccagcataccgctgcaaaaaatgcaggagaattattgctgtgcagggcaatgttgtgagccacactcctggtgagggtgaatcttgctttcagtggcaaaacaagagaaaaggagagcgatcatatagcaaagaacaagattgctcatcgttgtttgttgagcctctgaagtggatgactccaggtaattcaccctcgtaattcagccctttgcagttacctacggtcacaaatgacttctcagattgatctcctattgatgtggctcatagcaaatctgtgtttactgctgagtgttcgtccaatctgttatgtaattctatttgttttatcatttctaattggtgcttttgttattgatggaacagtggaagatggtgctttggaggggaagctatcgtgtatccactgcggagcacggctaggatatttcaactggtcaggaatccagtgcaactgtggcagttggatcaccccagccttccaaatttccaagagcaaagttgatattagtaccacttagatagttgtcagaggctagtagattatttcaggaccatgtgagctggtgtaaataccgttttatcagaaggatttacgaactcgaaggatctcgaccgaagattttcagatccattgtgcactagatagataccatgaagaaatatagtctcagaaaccaccacttgtattgctacttgctgttagactatgccatcaattgtaattgttggttctgatgatctgaaatgctatcagcacgaatttcattttttttcttctcttttttcgagtacgcaatgcatcgtagtacgtatataaatccgtaatgcagttttgttgtacatgagtgcatccattgaaaacaatactgtgtttctcatgttccgttttatgccgctgaggtggcgggttcggagtttttgcttccggcccagccaataatgctctaagatgggcttgctcaccaagggtgtgggctcgacgtctaattgtgggccttgtattcggcctcagccacgtacgtgggctttatattgggccgcatgttccttgaggcccatgtacaccatcaagtcaggaggagaaatccccttccacgccgcacactctgtcacacgccggcgcgccggccagcggcggaactcgcgacacccgccggcgaaggagcagcagcacaggaggtggacggcgcgccagcgaggtcgcccatccagcctctgcgtttagttgtttgaccaatcgggaaagaaggcgaggaagggaggagaggagcggagaggaaaggaggaggggaggatgccgcaccacgcgcggccgatgacggggctgctgctgttcacgggagtcaacctggtgctcctcaacaccatcacccccgtctatgacttcgtctgcttccacccctactgggaacgcagggtacgccgcctccctctttcttcttcacccaccttatccccccattccgatctcccaaggctacgctttgatcctgtcgccctactacaccctggccaagccttttccccacagttcgatccgtgcatctgttgattgtttcttgtctcgagcatgcgcgccagctgtttgtggaaatgcctcgcgtctgtgctgcaactttcttcaattttatgatttcgggaacgaactatccctaacacttcctttcgacagacaatttggtgaagaaattccatattcgctagccagaaatttttacaattgaagagtgctcttataggagcatctttgtgctattatgatgtttttcctttctatactatgatcttgatatattgcatacaatttgaagttttgttgatgtgtaatcttgtgaccaatttagagagaacgtcgtcaaaaggagcgtaaagcactacaagccaatggttctctacaaactgctaaatgattttattcctaggtatgtgcgtgacactccttgagaaaaatctgtttgatggaagtgttcatttttataaccacttcaggagtagcttcacaatttggtggatgtgaaaggaaggtgagaatccccaatttatctggtaaaaaacttgagatatatttttgttcatcctagtgatagtgaacttgcttttggtatgctttatttatgcatgcatttgtttaactttgaattgacatggtatattttaaattttcagttgttttactacttggttagttggatgaaaccctggattcttcattgatatggagtgaagaaaattttataggcaggtaatattgtgatgctcttcagatatgagtagatctccgcactccaggtcttgctttcataatgctactcaactgcatcatcacatccttgtaaaattaccgaggaaactagatctgatgaatattgtttcttgaaactacctttatgtatctcttatcttctcatactcatctggctataacatagtaaatgaaaaccactgtttggctcaagccatttattctgatcaggatcctattaacttagttatttcctggggtggaaggaacatatgtttaacaactgatcctgcagagtgcttcattacgtgtttgaaagttctgaaaacctccaaccattttactgttcttccctcaacggtttatctgtcaacaagcagtagaggaatgctttctctgttcttgttgaatgtaccagtaatcttttgggctttctaatcaggtaggattcaatcatgtagtgtacaagatgactgaacagaaagaaggaacaaatccatcttcccaacaactagccaggacaatgtgcaagaccaaacatgaacctgagcccaacctgaaatgtaaatatgcaattggaaagaaaattccattgtatacattacactcgtggtaaatgcacatcatgtttgaaattgtgcacaaaccagccactatacacactaccctgtttcgctatagaactagatctcgcctcttcttctttgggtttgttgcttctgcacagcctgatcctttcctcatcatggccacaaactctgaataatctatcctcccatcctacatgtgcaaaatgcattcagcgtctcttgataggacaaatattttcagctttatcgatttcatctgttttgcatgaacacaatttaaagagcatttcttccttacattattagagtctgcatctgtgatgacatccttgatctcgttggcgtcgtataacccttgttccttcaaggcttgctcgagctcttcctttgtgatgtacctgcaagagggatggaataaatgtgtacaaatccctgaagttcagaattcagttatatcagtttttgctatccttaacttacccactattatccttgtcaaagtactggaatgccgtgtaaaggtgctcttctcgatccattttgttcatgtgcaccgtcgcggtgacgaactcctcatagtcgataattccattgccatcagcatcagcctgaaagttgaaaggaatttccaggagtcctgtcagttttagcatttcatctcgaactgaactgaagtttgtagcttcactatgaggactcactgcttccataagttgctcaatttcgttgtctgaaaacttggtgccctgctttgctaacccatttttgagctcctcaagcgtaatggtcccactattgtccttgtcgatgttcttgaacatctccttcagccccttgatctcctcctctgacaggcatccggctataatctacagaagattcaaaacaacaattaagatgcatatatctaccctgatgatgtgattaagagtaatatttaccctcagtgcagctttcttgaactggttcatggccctgaactgcttgagcctgttgagaacaacattgtcaagtggtacatcaggagcatccccatcttctttgatccacgggtgatctgcaaatccaaattgatccaaatgaatccaaatttaattctgacaccaattaagggaaaattaatccaaactgtacctctatatgaaaaaaaggagcagatttgagtaattaatctgtaacaaataaacttactgagcacttggaatgctgtaagcctctccttggggttgatgttgagcatcttcctgacgaggtccttggctccagaggagatcttcggccatggctcactggcgaggtcgatctgtccgcgaaggatggcggcgaagatggcgttctccgactcggcccagaagggcggcacgccggcgaggaagatgtagagcatgacgccgatgctccagatgtcggcctcggggccgtacttcctcttgagcacctccggcgcgatgtagtaggcgctgccgacgatgtcgcggaacacctcgccttccttgaagaagacggagaggccgaagtcggtggccttgagcggcgcgtcgtcccctttgctcagcagcaggaagttctccggcttgaggtcccggtggatcacccccatggagtggcaggtgtgcacgatcccgacgatggcgcggaggagcgccgccgcggcgcgctccgtgtagtggccacgcgcgatgatgcggtcgaagagctcgccgccggcgcagagctccatcacgaggtggacgttgtgcttgtcctcgtaggcgccgcggaggtcgacgatgttgggctggccagagaggtggtgcatgatctgcacctcgcggcggacgtcgtcgacgtcctccttgttcgccagcttccgcttcgcgatcgtcttgcacgccagcttctcgccggtggccttgtgggtgcacaggtgggtcacgccgaactgcccgcgcccgagctccttgccgatggagtacgtcgtgcgaacctcctccatcggccgctccagcacctcgccgatggggcctgccggcttcttggacgacgacgccgccgccgccgcttccgtcgccgccgccttggccgccggcgagcacggctgctgcttggcggacccatttttggaggaggtgccgcggctcggcggcgccgccttggaggtccctggctctgcctcgtcgccggcgacggccttcccgccacccgtgcagcactggcccatggcgtcgggggatgcgcgcgtgcctgctccggcgacggagaggcacggatcggagagagaatttttggtagaaggaagaaatggatgtgtgagtttgatgggttgagaggaaatggcgggaagaagtgagcggtagttgtttcggtttggattttcagcgtctcgtaggtttggtcgctggctattcttggctgctaataattgtttctggttagattttcctgtgaccaatcatcaatcgattagctgctaatagttttttctgattagatttttccagtgaccaatcaacaatctgcctttacaattgcctaaaaaaatgcgcctttgcaaacactaccaaactagtcaaagcttacaatatcaagcgtctcctctgttatgaaagaaaaaacaggccctaacatcttaagctctcatttctgcagaagcaccgagagcaaatacaaggatacttttcctaattttggtgtgctatgtatgtattttaactttcaggatacactcacaatttgttgattttagtcctgcattagtatgtcaccgcaaaattcaagaagaccatttaatcatgtaactgtataaggtgttccactgtcaatagagtgaaagcttcttctggaatttctattgccgtatgcaattctccctcctgaataaccacatcagataatgttctcctgaagctgtcaatagcatcctctggatgccctttcgcaatggatgcctgcagtggtgttgataaccgtaagcaaataacctatcacaagaccaaaactagaagtacaagagccaaagtttaggcactgtagatgatgcgaaaaattcagacataccaaatgcatttcatcaatcttgaaaagccaaaacatccatttcctagcctcttctccatcaatacagagagaaatattagtccaattcatatggtggaattccaaacgttgcagcccgaatccaacgccagcacctgtagctttgacaaatgcttctttaagacaccaatacctacagaaacagacaattgttaactccacaaattttggcttgtaaacatgatcagcaccctgcacttgttctgaaaagaaaaaaatgaacaagaacaaatgcatacctgtagaactcagttagcataccatcatgactgtctgcagtaacaatgcagttccactcatgatctgtgagataggaagtgaaattgttgatgaactccagggcagtttctcgttggggcttggagatgcacacaatgtccaggccaacgaggcagagaggctcagatgctatgccaacgtactccccctgatgcgacgtgttgaagttgaagccaggaaggttgacatttttattctgctgcaacaacaagacgtgatcgattccaatttgggcttcagaaactgacagaatgtaaacgtgaaactgaagatatggatttgggatgaattaattgatgagaatatctactagactactactactaccagatagggcttcccttcaagcgtgcggttgatgcgaatttggtggaatggcattccaagggcatggtgcacgagcgagtacttgagcaggcggctgacgagcgctcgtttcctgtcttcttctctgacgaacctgcaccggtgaggtcgtgaggacgaggagaaaaatctagaggctgaattcaattgcagtagtgagtgggtggaatcaatggggagaaagaggagttggttggaaaaacctgtggatggcggggcggtcgtgcggcgggaggacggcggcggcggcttggaactcggcgggggaggggcgccaccggccgacgtcgacgagccacctacaccgccaccgccccccgctgctctgcttctctccttcctccatcatcaacaactcgatcaacggacaacggtcaactcaagagttaaggcagagaaagccgtagaccatggcctggccggccggcaaggaaaggaaaggaaaggaagagggacgacgacaacagagaggggaggttaggatgggcctttctcacgaggcctgtaaacttttgaagctaaactaggcccaaattgcatatgtgcatcttgccatggtgccatggcagagacatcagcaaattaaacagcaacagagacataaccatagccatcagtccatcaccatctgccaatctctcacattcaataacagtcgccattgatacgctgagtgttgtgcactacattgattttttcgtcagactcggaggagatggagattaattgagctcgagtgtgagactaacagcaatgctacgcaggctaaagatcgcaatagtaattaatggcgaatcgagccaacgtcagttcgctatcgaccgacataataaatcaggttggttgtgaaccgagacatctcatcatctcaccctggagtcaggagctcaggaacagcaaagcaagaggaggaagaagcggagatggctgcaggcgacgctgcgacgccattgctggagatggcgtaccaataccatgagggctgccccgcctgcgccgtggagcgcagcaaggcgctcaaccccggcatcccctacatgcgcttcttccacatctggatcatcatcctcgtctcatgtacgtacgcgcctcctatatatcgatcactgcttcatttatacgtgttcatgcatgcttcgcttcctgctctgcttgactgcctctccagtctccttattatctattattaacttatgaagtctcatgttcgctctcatggcctaaaaattctcacattaatcggagaaaaaaaacagtctatataggaatctacctatattattttactacttaaagttcaaaatatttccatcgtcataaaaaagaaaaaaaataagtcggactcaacatgcgagaaaaaagattctctcgtcagtaaaaataggaaaaaaatatttcgtagtaaaaacaacgtccgactcattataacagaaaaaaagaatctcccccataaaatacatccgattccttaaaaaaaagaaaaaaatatcgccagtaaagaaaacgaaaaaaaaagtccaactcccatagaaaggaaaaaataacttctgacatcctactcccataaataaaggaaaaaaacatgtcctactcaaaatcgagaaaaaacacatattataaaaaatcccgtttataaaagaaatcgattcgaaaaaaccacccgactagataaaaaaccgaaaaaacacagattataaaaaatcccgtttataaaagaaaccgattcgaaaaaaccacccgactagataaaaaaccgctccgaaataaaccatcagaaaaaacattgctgaaaaaggatcgaaaaaaccatccgaattcacacgagaaagaaccgccatatataaaaaatactaccccgaaaaaactgtctgacccaacacgagaaaaatcccgcgtttataaaataattccgattcagtactgtgcaatgcgaaaaaaaactgtctaatttcataaaaaaaatccgatttcatgaaataagatccgtattgtttgtattgtccatcgtctaccatgtcgttttggtttttccatagcgtcgtcgaatgttcagacgtgtggatctaaaacaagtcttgcttaggcttgtttttctcggaacaagatcaaattgatcgaggctttgggtcagataggattctcgatttttccatcatctaaaaacttggtttgtgttccacgattatattctcctctattggagactctacatgtctctgtatgcaattattatactactggtaagtatagctaatattcttgatagcttatcatataaaaataataataataaataaacatatttttaattgttattaagagaagagtgcactgaggctctatttatttagacttgacaatacaagacaatgcaggatttgattgatcctattattattgcaagaatgagattgaaagattattttagattatatgtgtacaaccacataaataatccaatttgtttgggtaaaacatgcattgttaaggttgtcatagtcaagattgggtcattatattacagatgtttcaattttccttataatatgtcttagcaacaacgatcgatacgattattatcatgggaaaattgaaaccatgccattataattttgcaaaatttgagatatgacatcctgacccacatgtcattgactcatgtgggtcctacatgtcattgagataccgatggcatatcttaaactttgcaaaattataatggcatggttccaatttaccctatcatcattgacataattatagaatatagctgaaattcggaatttaaaataaggaacacaggaagaaaagactagagtccatactggcataccatagaactaatggaaatccggaactagaaaaataagaaaactaaaagtagaggttagagtccatatagaaatacaatttagctggaatttggaattagaaaaataacaaaactgaaagtagaggttagagtccatatagaaatacaatttagctgaaattcgaaattaaagataaggaatataggaagataagactatagtccataccggtatacaatataactaatggaaatttgggattagaaaaataagaaaatttaaagtagaggttagagtccatatagaaatacaatttagaaataacgaaaattcaaaattttaaaaaataaggaatatggaatgaagtatatagagtccatataaaaatacaattttaaaataattaaattcgcaattagaaaaaataaatactaaaagataagtttagagtccaaatacaatttagacataatagaaactaggaattaaaattaagaatattggaagaagagtatagagtcatataggaatttataattaactaaaatttgaaataaaaataataaaactaaaagtagagtttagagcacatgtagaaacacattttacaaataaataaataaattataatgaaaaaaagaatattggaacaatagtccataaagaaataatattgaaacatgagtccataaagaaataaaattagaaataataaaaatttagaattaaaataataagcaatagtagaaaaagagtctagagtccatataaaaatacaatttataaagaaaagaaattcggaattaaaaataagaaatattggaagatgagtataggaatataatttagaaataactaaaattttgaattttgaattagaaatataggaataaaattataaataatagaaattcatgattaacaaaatgaagaatgttggaagaggattctagagtccatatagaaatacaatttagaaataactaaaattcgctattaaaaataattaataattgtcatttatatacaatacattacgaatattacacattggttagtttgatcaagttagtacaaaatttaaaattatgttgtccttttaatatatttgataataaaatatgaaatatgctattatatgagagaaaatataagaatgctagctgcgcaatttacgcgggccaccatgctagttcatgttatgttcgaaaaagctaatggacgagcgctcgcgttcacctgcccccacgcgatcaatttactctgaccaatcccatgccacacgaagtatagatggccaatggattgcccggctccgcatggcccaagcacggctgtgcctgggctgaggtcagtcaggcaagcacggcccaacctacatgtcaggctgtgtcgtgccagctcacgggctgcacacacattccaggcacggccctatatgactcgggtcatgccgtttcggctgtaaggcacgataacccatcgtgcttcttcatagaataagtctatttttcatcctcaactctttgggctgtcttatatgactataaataagtctattttgtattcctcctctcttttggcattgccttatatggttgattaagtctattttggatccctataatattttcttcgatcgtgccgtgccgggccagcccaccgtgccaaggcattggcctaagcacagcccaactgtcgggccatgccgtgcttaggcccggccaaatggtcgtgtcttcggccgggtcgttgggccccgggccatatggccatctataacatgaagcgtcatattctttttggctctaatacgaatatagccacttcttccattttcggctagtcctttttcttttcggctttactctttcccatttaattttatttgaccaagttgaattttaggtgagaccaaccagttaggcctcacaacccgcatgcatgatttttctttttttattctatgaattcattttaatttgtatatatgatacaaactttatacgtatgaagtttctatacataaagtttatatgtataaaatttattgcatattttttttgggacagattaacatgtcgttgaattcatttgaaatttatgtttataaaaatttacatgcacaaatttctatataaaaaatttctctttctatatatgtatatatattttagatatgtaaagtctatatataaatatattttctttactgggccatgttgcttttgttgggctgaattctagaaaagagagaaaaagatgcacgtggaagcctacgagcgtggaaacatgaccgagaaatctgagtcgtcgcgctcgcgccttagcaattccttcttaggtgtgtaaacgtaatcgtgcacaccgtggacccatggttgctaagtattagacggaccctattatgtttgcatatccattttttttccatttccaccagcattgcaagatgtgaatgctttatcagtcatttctagttcacctgaatttatcttatagaggattattttgtactacctccattttttctttttatatagatgactcatttgacttttggcataatgtttaatcattcgtcttatttaagaatttagtataaatatgaaaaaaatatgagtcatataaattttattaataagagaaatggtcaaatgtcacgttaaaagttaaaaaaataaagagagtattagtgtctaaaattaaggggctaaaaggaaagttcaagcttgtaatcgttggtcgaactattgaagcaaaattctaaattgttgtttcttgcatctcttttgcatctttatttatcttgtcattggcttagcttgttccattgatgcgggcctgtgagcttttcatggtagatttttaacctttcatccttacaatattttttttactgaattccatccttataattgaatttcaggtttgccaatatcatcgttatttcccttcttatacttcatggtatgtatttatgattgtaaaatttacaatagcaccaaaagtatactctacattgtataagttttagtgtaaattagctgtttctatttctcattagcggaatttgtaccttgcataattttatcatttggttccgtgaaatgttgttcatcattcatgtagcaattcaaatttctctagtttccatttatattaactagttttttagtcttggaaacggaaataacagtaaagttaccacctaattcctaattcttcaagctatgtatagtcatatatatgttgctatgtatactcatactcatatgttttggctaatcattgtttgggggtgcaggaa

SEQ ID NO: 18267 - DNA, 1415 bp, Oryza sativa
cctgcagccccgtattattttgtttctggctttccaatatttccgatattattttcgtttccgactttaccatttttgatttcgtttctgagaaaaatatgattatggaaatggttgaggctgtttttcgatcgtttccgatcgttttcatccctagctgagacgtactctaaacacacacagtttcggttgaaatttatggaactgctgggtttaggctgcagctggttgactttagttaacagcacacaatttgcctaaaatttaaggaattactgggttctggcagattaattagttctcttacaattgcagcagcaatggtgcctccattaagtttttttttaatttgtatgtacgtaatctgtcaatgggatgtacgatagatgaataatcttgaactacttctactttttttaaaaataaacttcaactaaatatttttaattattattattattattattattattattattattattattattattattattattattattattattactactactactactactactaccatatatatactccagtttggagtagtacatagagtaccgttgaagaagattggcaacaacggcaggtgacaattccgacttggaatggtgcagatatatacatgatgtatacatgatgaagaaatcaagtcagtgaaacctgcatgtcataatcttgagtcaatagttatgcacctgttcactaactttggatggagattcacaaatagaattcaataatttttatgatctttttatgctgtgagttcttattagttcgtgtatgcttttgtttattctagtgtgagtttttgttgaattggtgtaataattggttgtagctctttgagcaaagcccgggattatattccattatctaaaaaaaaggtggaaaagtctattcgtctcgagggaacaccctttatttttatatatcgtttacaaatcataaaaaaaataacaagatgtagatcaatatacaatatattaataaataaaatacaagctcaaatttaactagaaatagaaataataaattgattccgaataaaacatgtcattcatattgaaatttattttttaactatatatatctaattgaatttacatatttgttgagtgacatatcacatatttaataaatcttattatatttttattaaatttattaatgatattttaagatgacatacaccgacatgcacaagtaaagaaacatagcaccgatatatatatagggtttagggttagagttagaatccccttatctctaagaaggaaggcaacactatgatatgccttggtaaggaactaggcataactttgagtgatcaaagagaatcattcgaggagctaagctatgtttacattttcaaaatcaaatggaaaaacccaagt

SEQ ID NO: 18268 - DNA, 6172 bp, Oryza sativa
ccccgttcacaggttcatgtgaagcctggaataacttgtatgcatgtttcatatcaaggagatgacccatcttggtctttaaagcttttctcgaggacgagtaaaggactaaagtgtgggggagcttgttggcggtccttaactcatatttccaactgccaactctcacataaaatctgcataaacaaacaccaaactttgcaagacttacacataaataactaatgaattccacgagttttggtgattcaccattgtttgcaagacttatacataaatatggtggaattataaagaaaggcacattccgaaaagcataaatgtagaatccgtgcaaaggaacaagatgaaggcccaagtatcctacgaacatgggccaaccaccgacgtaggagaggtcctggctgacgcaacagccctccacgtgaacatggtggtgagggggagcccatagaggggcagccgcacccctggtgcgccctaccttctcagccctccttcgtgtggcagtgcattccatacatgggttttccatgtatatttctcctatataccgacctatttggactataaaagaagagtagaacatccctcatcatcatcaacatccaggaagaagagctactagatattgagcaacactccaaagggcgactgtagcgaagaagagagatgtgagatgcaaagaagagagcgactgtagctgcatgagtcttctactcggtctactatgtacaccaaagggtaaaaggagtgccgggcctgtcggctccctacaacttatacctctgagcacttgtgcttccatgggttctcctgttaagtaagtgttcgtggttcttatggtattgtgtattttgattagctaagctatgtttttgtttgtttgcaggttcatcgttcgttcttgtaacagatgttctagcgtaggactacgatcttctcggactccacgatcaacgttagaatagtaatcgatagcatagatatggtgtctaggctagaggttaccttcgttttcttcgtttccccacggtagaggggtaggcggcaagtggtgacagccctatccgtccctagcactcccccacgtacgggttggaagtagagctataagccagacatctacctagtggactaggtgctggccggtgcatgaagtaaagatctgttcttagacctctaaaaccgtaggaatccatctttgccctaacctttcctacccttgtgttatccttgcatggattagctagaagaataccttcgttccctgtggaaaatacgatactttgaatacagcttggtgaagtgctacgttggtaattccgttacgctttcagattatttctgtttgcgttaaaaaataccaacaagcaaaggttcaaccccattactgactaagtcaagcctgatgattatttagcgtcgaactcggcactaaagtggaaacacttcaccaagaatggagaatttaaaaaaaattacttggagctccttacatccttatggcaagccattgattatgcaattgaagatctatcaagcagtttaactatttggattcccagctaactggttcgataaccagttgaactggtcggatcaccagtcaggctggtctgctacaagtcagcttgctctgaaatgctcaagacggtgttgctcaatggatacaaggcgcttggggactagctgtggagggtataacccccggtacccacaacaaggcgcatgggccggcccaccaggaatggcctgacctagtacctgaagacctgtggcgcacggcagcgctcggaggcgctcggcgtgcactgcaagtctaccataaggcaattagcagatagatagggatctgatctgataagctagatatcagatcccttgattgatgcttatcattgtaaaccaactagattagatcttaaccgacttgtaaaccctatctcccggctatataaggagggcatggtaacccctcaaaacccgataactacacctcatcttgtatcaatatacaatccaccagaacacatgacgtagggtattacgtcgccttgatggcccgaacctgtctaaagctttgtcacagccagattttcgttttaggatttataaattatctaataaattattaatagaatttatattaaatgttcattaatttacaagtgaagttaaatgtgggaaataaaatttcctaaatttaaagcatggatggatttaatttttattaaattctccatgattaattatactctctgaaattttctcggattttttttcagagctcaattcctaaatgatacaaagaacagttcagtaattatttaatcattaatgatctaattataattatgttaagtgttttttttgtttaaaaatccttaatttataaattgttgtctaaaagggaattattagaaatgatcttaaaagcctagaagagaagatctaattttaatttgttaaatctcaatataaaattgggctagataaaattttgttaaatacttctcttgattctttagttcctagatttttctaggacttatttgagccaaggaagtatttttaataaatggaattgcatttcatgaataatttaaatagaaaaatgtttttaaatcctccttttggctttgggccgaaagtcggcccaaaaccgctctctctctccctcggcccaagtcggcccaagccgagccgcccgtgcgcgcgcgtgcgaccgccgctgacaggtgggtcctacccgtcagtcgtcatcttcctctcgccgaaaccctagccaagctgcgctgccgccaccctcgccttagtctctcgtcgccagtagagctctagcgccgtgccgcctcgcgccgccgtcgccgccgccgctcctaccgtgcgctgccgtcgctccagtcgtcgtcgtcgctcggggatgtcatagccgtggtcgccgtcgcgtcgccgtcctcatccgccctttcgccgtccctgtcagccgccggagcaccgtcgccgctgttgatccgaccgttgccgccgctcttcctcgtcgccgtcgtcgtccgttgatcttccgccgtcgttttggtcaccaatgagttcgccgtgctgtccgctacgtgtaggtgtcctccgtttgggccgccgcgccgttgttcgctggcgagcacgcgaggccgagccgtcaccggtgatgacgtcatcgccaacgtcatcgttgccgtctgccgtggtccggtcgtggaccgatggatcttggccgtccgttttggatggatgaatctcggccgttcgttttcgtgaaccgtcgccatgcacccggtcctccgcgaaccctagccgatgacgcaataattcccttttccttttcaaaaataattcattattgcgtcataattcaattaaaatccatataaatgctttaatccggtttaatctttaaaaattcataactaattcattgtaactcagtttaatgtggttcaagttgcaaaagttgtataaaataaagatctacatattaaaattatccataaattgaattaaatttatttaatcctttttaaatgggctttaattagatttaatcttgtaaaattcgtaataaattcatatgaagtcagaatgaggccgttcaagtctcaaaattcatctaaaattatgatctacatgtttgtttactttttatgtattgtttatttggagtttcttagtctttttcctcgttttgtgtgttagcttgtcgtttccgtcgtttcgaaagttcgcgagtgcgccggaagtgttcaagaagattaattgaagaccctttattgcaaggcaagtcacacagatcccaaacacaattcctttgagcatgttgatcctatatttaaattctctatttatttcaactgtgcatttatttttgaatgtcaccgggtggtgtgaacctattcctttgttatggctagtttgcattgattaccctatttcttgattacctcgggttataatttgactggttggatttatatattggttcaactagatgttagacataattgcttagccatgcttagaaacattagcacacaattgggataactaatgtttcactattacttaatgatggatatttaatgatagctcacgatggtcaatcgtgattggttaattaattaatgtgccaactaaaacttgataatggtgggttgtgagcacatggttttgatggtcgtgctcatgacaattaaggaccggttcacgattttcggttgtgaaacattaaccgtgccaaccacaagccagaatgggcaacggctggacacttcgtataacaaggctcattgcggagcaccagactgagaagtggcggagataagcccacgggggtcgctggggagtccatgccttgtttataagggggtgactatgatccgggaacggtgcactgctttgagttgagttatgcgaggggtcttgtcacaatcactcaacatggtgacgtgtctgcgcggacacggtaacatgctggtgggttgtgtcttgtgggtacagtggtacacctctggccagagtaaaactattcgaatagccgtgcccgcggttatgggcgggtctaacaatgtctttcgtgattagtctcacacttctcaccataataaatgatgctataactggtaataatttgattagctcctggtttggaatggtatattcctggtttggagatagatctgtgcagccgggtatggttgttcagaatggttgggcctgtgtagcatgggtgtgctgttcagtgttgattaatattgatgattaattactctattgttttacaaattctcaaatgtttgctaaatgctgtttttgcaaatgagccctatattatgccatcctttggtatccttgtgcacttgcatatttgttgtgtggcttgctgagtatgtcatatgctcaccttgcaataatcaatcaaaccttagttgaagacaagttgcgaaggagaagacgtttggcttataccccagttgagctgcctgtgggagtggagccggagcttcgctagattttattttccgctgcagttttcttcatggtgaggactaagtgcctcttaagtaagtatttatcgttttagttaatttgatgaatctgtatattaaattgtcagtttgtgtacctcggctgattcctggacgaggattttatgcacaaataagttcagaaattactagtgaatttctgggcgtgacaagcttcatgtccctgctcttcgtgttcatcatctggttctgatcatgcacgtccctccacgtagttaatctaccatcgtggttatccccctcagtggactgccgaccatatttagtcaaagtgaactataggagcctttgagcaagtttaattgcatagccaactactaaatgcaaatcatctatagccaatctaatagctcattcatacaatagttatccataaaccattaatacatggtcccacctctcatacacacataacgtattggagtttgtgctacagctggctacgaatctgtagcccgctttccttctctctcttctctcctccacatatgcttacaattgacttgtagcctgctattgtactcactcttatagattactgtaacctgcccttaacaactaattaaggtggaattaaaattccacggtctcataacacagtaacacatgagccaaattcaaataggctgactgtcacctaatttaaggtgactaaataaaagggctaccatgccaaaaacaaaattatagttcttggacatgcaaagctgccgagcttgtcaacatcgattctttggcctgatctgttgtagtatgttgttgctctctggggtagatatgtgtagatttctcaatatcgtcatcagtgacatcatcagtctcattaccctctttgctcttaccccacagcatggtgtaaagacttgcgaccagcaaaattccacccaagatgctgccaataaaggaagagaagaaaaggaaagtttgtttatttcagcgtgtttttagaatattgcacctttgatcagctgacagtgagtatatatatatatatatatatatatatatatatatatatatatatatatatatatatatactatatgatttaatttacttgccgaggtgaacaatctctccggggtgcagga

SEQ ID NO: 18269 - DNA, 15017 bp, Oryza sativa
gactcagcttttcatctaaagatgttgggcaagttcttgcagtggcaggtaagtcaaattcaatcaatttctttcctgcaaattttaaacacattcaattccttaatcacaggatcagggtgtttgcatttaatgttgagctctaacatcttggttcggaagataaacatctcctttgttacattgtaggtgccagccttcttgtatatcagctttttatctacggttgggttgataaaattcttggacctatccactcaacccgcatttcagcggtgagttactaaatttcagtatttcttatataatttttacagtttacttgttattggtaactgtgagttttaaaagaaaagagttcaaaatattgctggttactactttgcttttatcagctgacctttagcattgcaggcactatctgtaccaattattgctgcttatccctttatgacacacttatcaggaataagacttggtgttgccctctatagtgcagcaatgatcaaaagtgttcttgctgtaagtactttatgaacttaggattttttttaataaaaaattatagaagtacaaattcttaggtactttttaacaaacattttggttgtgccactcatggaggcatggaaaactaatactgcaacaccacgaaaatttcatagcaaaggtaatattgcacaattgttcagagagactatgtgaaaataaataccaattttttagttcaaaagagaggttgagaaaaaaatatccatgagcttacagttctgaaatttaacccatataaaattagttagcacttcactgcaaattgctagataatttagtttatttatttttcacatggcatatttgaagatatcaagatactgatattttgtaatgttgatcagataactataattacgggcacctctcttctgcaaaacaaagcagtggtacttgtcgaacttatctcaatcgactgttgtctgataggctcaaaaagaaaagaaatttctctgatacactaatatcaaataaatttaatttttgaaaattgcatcgttttgacagccacaagggcaacggggtgctgcaaatggaatagccacaacagccatgtccttgttcaaggctattgctccggctggggcaggagttatgtaagtacaaatgttgctgtctacaactcctagttataaacaaacaactcaacaaagctactagactcagtatcactttccaagattgaacagtagatttctggctgacataattgtcagtttgcaatttgcagaaagactagagggatttttttttgaacaaacctacatttagattttaccaatttcaatgaatagagcagaaaaaaaaactgtaatcatgaaaatgttggtgattagttcgcccttcccaatttagtgaatagttgttgcctgaagcctaaagatgaacatgtccttacgaaactgtaaacccgtttgaagaaagaaaaggactgactgttcaaaacctgtggttgcagattttcttgggcacaaaagagacaacatgtggcattttttccaggtaaataactaaatactccaatgaatttttaggaaccatcaactgtgtgtgacaaccatttactacaatactttaaattagagcaagtttaatagtatagccaactagtaaatccaaattatctacaatcaatttgatagccaattcataaaatagttacctacaagtatatactgcactattaatatttggtcccacctgtcatacacacaggagtccgtgttgcagcccgcttctcttctctctttcctcttttatctcctccacatgtgtttatagctggtttatagtctgctattgtacctgctcttaggtatgtataaatcggtgctttgtaatgtttatttgatcatataaattgtaaattcaacgttgtgcaggtgaccagatggtatttcttctactgaatctgaccgaggtcattgggctcatgttaaccttcaaacctttcttggctgttcctcaacaatataaatagaacattcagatactgctagctggtgtgacaaagatcataaagatgtagttacagtgagtaataagtatggcttggtattaaaagatggtttagatgtggttatagcataatggtaggatcatgcagcattccagtgcagagtctctgttggattttgttctgctttgggcttatgagcaagataaccttgtatattgcagtgttgaatttgaataactgctcttctagctgtggagtactagtgaggtgaggtttggccattggaactgattaatcaaaactaccaaccatccaatcaaatcaagcacaagaaaacatgtaggactaaaaatcagttgagtgctattcgcgacacagaaaatgggatgaatagctcgtaccaggcagagggcaggatgaattcgggtgcagaggcgatggggagtagctgctaatcggatctctcagcagagatcaatctctatctccgtaacgccgccgcctccgccatcgccaagggcaccacgaatcggggcgcggagcactgaggagccactggcctccgccctcctcgagcggctgccctcgttcgctcgatgagccgtatgtatccgtacaccacctccgtcgtctcccggcgcggcacggcagccacggccccgtttcatttggggaagacgagcggccaaccgccgtcatatttactagtaggtcgagaaaacggacgatatgccggatgaaatgccacttaataccatgcacaggataaaatactactcaatatattatctaccggatgaaaattgaaatgccactttgaagatttttatgcccaaaatatccatggagagagagggagaggggagtgccggccgggcgacgccggaggccttcccgggtggcagcgatggaggcggccagcattgacgacggggagaggaggacggggcggcgacgacgggggaggaggataggccttgccgagcggtggccggcgtggacgacaggggagggaggagaggcgatgacgtgtggaaggaggacgggcagcgagcacgcctacccgcacgttcgtcgggaggtggcagcagcggggagcagggggaggaggaggcgacgcggagggaggaggatggcgaggcgagcagcatcgcccgagcgacaacggggacgacggtctgaggctccagggccggccctggccctatgcagccgaggcgaccaccgggggcccatgatggtggggggccaactctgaaaatttaaaatccttcgatgaagtagatctttggtcgcactgcaagatttttgcgaaaacatttagggcccctttgaatcaaaggattcatgtaggaatttcatagaattcaaatcctatagaaaaatatcctatttggccctttgattcaaatgattgaagctctccaaatcctatgaaattcctatggaatggcacattacatgtgaattttggaggaaatttagcaagagctccaacctcttggaaaatttcctttgagtctatctctctcatccgattcctatgtttttcctgcgctccaatcaaacgaccattcctgttttttttcatgtgttttgcaatcctctgttttacacttcaattcctgccagaatcctgtgtttttcctattcctctgttttttctaccttgcaattcaaaggggcccttactcatgagaactcatccaatgtttagatcaatgatttttattcagaatcttcgatgtccgcgcctgagattctgaagtctgttatggatacagattgctatctaaatgtttcagttgcctatcgaattctcttaactgtacctatgacggtagcttcagctgaaaaaagtttatcaaaattgaggttgttgaagaactatttgagatcaactatgtcgcaagaaaggttaaatggcttggttatgtgctctattgagaatgatatcttggacactattgatcttaataccgttcttgataattttgcatcaagaaatatccaaagaagtatcttttcataagaagcaatgaatatgatggggttctatttttcactaaggtaatgatattagttctaaggtattattttggtcgactttatttctcaataattaccagtcatgttaaatttaatatatggatgtatttattttcgttttgcaagtaaaattagcgtttatatatatcacaaaattttttatatagtttagagggcccatcacgataagttcgcctagggcactcaaaatcataggaccggccctgtgaggctccactgcagtcgcctcttcttccgccctgtcctcctcccccgtcgtccccgccagccgtcgccgttgcctggcgaggcctccggcaccctccggccagccctcccctctccctctctctccaaggacattttgggcataaaaatctccaatgtggcatttccctctccctctctctccagggatattttgggcataaaaatctccaatgtggtatttcatccggtaaatgtattgagtggcagtcaggggcggatccactatataggcagtggggtcctaggaccccagtcaaattttaactcgcaaatataccctttagatgtatgacatatgggtctccactatacccgggaaaaaggacccccgctctcataatttcagttcattttctcacttgtgcatcggtgacaaccttttctgtggacatgatgaatcaaaatagtctaaaacaatatatacatggagtatactatgaagtaaaatggtgtgtatgttctaaaccttggataactctcatatagatgcccccagtccatttttgtcttgcgtccgcccctggtggcagtttatccggtgcattatattgagtgtcatttcatccgaacccaagctagagagtgacatattatccattttctctatttaggtccgtttgttttagtaatctagattattgagtcattactacttccgctttacattatggagtagtagtataagctactctctccattttatattataaattattttgattttttttagtcaatcttggttaagtttgattaagtttataaaaaaagtaacattttaaacattaaattagtttcattgaatatatttccataatatatttgttttgtattaaaattactactatatttgtctataaacttagtcaaacgtaaaaaagtttgactagaaaaaaagtcaaaacgatttagggtagtcccaacccatagtgtccataagcagtatttatggtgccatgtcaataagacatcataatagaaactacactccacaacccatgatttcttaaagtgagccattaataaatacatcatctctcttctctaccaatcatatttattcttcatctattatgaagatattattctctcccgatgtaaaacttgataatgtctagtgcataggttctcgtgttgaagttggatcttgcatgagacccagtttcttcctctctcctctctctcttaattaatatagtgccacataaggtaaaagtcctacataacaatgtagttaatgccatagaaaccatcctaggtggagggttgggactgccctaatataatacgaaacataagaagtatttgtttctctctagattattggagacacaaaatactaggtttgaaagattaaagtctataaagcccttagctgttttgttcgcctaaacagcgacgcccgtctgagtgctgccatgattcgctaggtctctctaactctcgatctgttctggagtaggggcgataagagctaagaggtacaaatgatagaagtgagtactttctttgaagtatgtaggggccgtgggtttttagccacccaagaataaaaaaagaacatatttttggaggagattactagattatactaatttgaataatatgattataataatctacttcctccgtattttaatgtatgacgccgttgactttttaaccaacgtttgaccattcgtttttttttaattttttttatgcaaatataaaaatacttatgtcatgcttaaagaatatttgatgataaatgaagtcataataaaataaatgataattacataaatttttttgaataagacgaaatgtcaaacatttatcaaaaagtcaacggcgtcatacattaaaatacggattaaaatacggagggagtattaattttgtttcaaattacttctaataatcttaatctgattgcaattgcgtggccgttgctgacatggattgtaggcttgtagcgggtcaacacacagttggcccagaacacatttacccctctgtctaggcccatatctttgcctgtttaatgtcacggcctctaccctagtcgtcgtcgtcgtcgtcttctttttacatggatatccctgttctttttatagcactaaaagttagcgtacagttcaactaaataattgaccatttacaaaaaaaaaactaaacaattgacccaaaacaaggttcaaatcaagaatcacatgtacagtttttttaatgaagatatcatgtctgtcgtcctaaggccttcggtgggttaggaattcctaaccttaggttggcagggttcgccttgcgcgttcgctggctttggcttcagcgttccgggcatccctattgggatggcttgaaggccccggtcgagcagtctgtctctgacatgttcgaggcgtccaccttcttcgtgccgggggatggtgaatctatgctcttctggactgactattggattgatggaggccgctcagtggcctccttggctcctgacctcctcttcgttgtgccacagcacctccgttcgcgcacggttgcttctggcctggcgaacaactcctgggtttcggacatccgcggggccctcactgtccctgtcatctcccagtttcttcttatatgggatgctgcacttcgaattcagctctcgccgggtgtcagagaccgtcttgtttggcgttggacgagcgaccagcgctactctgcgcgttcagcgtaccaggccttcttttttggctagcactcctttgcctgtgccgatcttctctggcacgcgaagggccctgctaaatgcaagttctttctctggtttgcatttcagcagcgctgctggacggccgacctcctcctaaagcgcggcttggatagtcattcggcctgccctttctacggtcaagagcttgagactgcgaaccacatcctcctcgattgcgtgttcacgcggcaagtttggctccgtgtgcagtcgcctcttggttggactgccctctctcctccccggggtagctgtctccaagattggtggccttcttctagggtttgcttgccggggcatctccgggccagtttcgattctatggtcctcctagtctcttggcaactgtggaaagagcggaactccagagttttcgactctgcattgtcatcggtctcggaggtccttgagtccatcatctctgagggccacctttggtctttagctgatatcattaattttgggcttctcctgggagggtaatggctttgccccctcccagctatttggagttgtgtgtggccatcacagtagtctttcgtctcttctttattttatctttttttctcccctttcttggcataagtcggtctgactgattgcgttgtgtaacaaacattctattcttctaatatattgacgtgcaatccttttgcgcgtttgagaaaaatgaagatatcataggtagaagtaatggaacatatcatagtactccctccgtttcgaaatatttgacaccgttgactttttagcacatgtttaaccgttcgtcttattcaaaaacttttgtgaaatatgtaaaattatatgcctacataaaaatatatttaacaatgaattaaatgataggaaaataattaataattacttaaattttttgaataagactaacggtcaaatatatgcttaaaaagtcaacgacgtcaaacatttcgaaacggagggagtactatatagctagctaactgccaccgccggccaggttattttggcttgtggcgtgttcatcgatgcaaagaatgcatactttgtttcagaattaactgatctggaagaaccatgcgttacacctatcgaccaatcaagatatgaaattatgcaccattgtttcacgggattaattaattaaagctagcttacatgcatggctactggctaggagaggccgaactgggtggcacacttcatgcatgctgccgaactcaagcacattgcaagctgatgatgatccatcgatggtgctgtatccatcatcagtgtaaaatgaatgggagaagcgataccctttgtctcgggttcgcatgtatttatataggtagaaagagcctctaccgtggctgttacaagagattgaatcacagaagtttatcccgtgagtttacaacaaaccaaccttatctatctatcttaacaaactacagatgaatatacatgagataacaactcttatcttaacactccccctcaatcacaacttaccaagattgagattgtgtcgaaaacctatcaactgctgaagagaaattggtttcgtgaaaccatcagcaacctgatcttgtgagctcacaaaatgtatatccaacaatttctgagctacttgttcacgcacaaaatgataatcaacttcaatgtgtttcgtccgagcatgaaacacggggtttgcagtcatataagttgcacccaaattatcacaccaaagtcttgcagcattaggatgtaaaatacctaattcagttaataactttcttacccaaataatttcagctgctgcattagctagtgctttatactctgcttcagtactagaccgtgagacagtggcttgcttccttgcactccatgaaatcaagttatcaccaaaaaacacagcaaaaccccctgtagatctcctgtcagcaaaaccccctgtagatctcctgtcatcaacagaccctgcccagtctgcatcagagaaagcactaacaagatttgatgaagacttaacaatcttgagtcctagatccaaagttcccttcaaatacctcaaaatccttttgactgctgaccaatgagctgttgtaggagtttgcaaaaactgacatactttattcactgagtaagatatatcaggcctagttaaagtaagatattgtaaagcaccaacaatactcctatactgtgtcacatcactaggccccaattcatctccaatctcaacagacaatttttcagcagttgacaaaggtgtactcacaggtttacacgatgtcatattaactctttcaagaagttcagtagtatacctttcctgtgagagtaatagagtttgcggtgtcctcttaacttctattcccaagaagtaatgcagatcacctagatcctttagagcaaagtccttttccagatctttcaacaacgcatttacagctggggaagatgagctagcaacaatgatatcatcaacataaacaagtacaaacattttatgatgccccttattatagaaaaatagggaggtatctgcctttgaagagctgaaaccaagttcctgcagtttcttactcaacctagaataccatgccctaggagcctgtttcaatccatataaagctttatcaagtttgcacagaaaatgtggttgtctagcatcttcaaaaccaggaggttgtctcatatatacttcctcatctaaataaccatgtaaaaaggcattttgcacatccaactgtcttaaactccaaccttgagacattgcaatggacaagactaatcttatagtagcagccttaacaacaggactaaaagtatcctcatagtctatcccataccgttgtttaaaaccctttgctactaacctggctttgtatctgtctatagtgccatctgctttctttttaatcttgtaaacccatttagaatctataatatttttacccttgaccggtggtactaaatgccaggttttattatgcaaaagagcagaaaattctttgtccattgcctgtttccagtttgcactgctaagagcttcctgtaaactagatggctcacctgtctcagtcaaacaaccatacctgacagtaccatccgtatacttctttgggcgatgaacaccatgctgtgatcttgtcactggacgctgctggatctgttgtgctgcatcaaacgtgtgtgggctggagacgttgcctccactggacgtagcggatccatgcgtcgcatgcatcccatctgcagccgcagacgagaccacatcggctggcgaaatcgacgacgtgtctccccctggttcgtcatgcggatgcgtgatggaagccggcaccgagtcctgcgtctgcgacggacaggtagcagacggcgcgctgcgcggaggtgactggagcgcagaaccaccctcggggtgagcaccatgcacgtcggagccatgctgcataaaatgacgactgtttgcagccgtttctgcaccatcagcaccagcgttttcaccaggatttgcaccattttctcctgcagaaattcctgcatgcagctcagcagtctcgtcagtatggttagggatattaatcagaggttggttgcacagttcagtacccccgaacgaatggacaagatgtgaaggcaacaacaagacttcagcccgcaggcgagccccggcattaggacgaagctgagcgaaagggaatatattttcatcaaacacgacatcccgtgagatatacacccggccagaattcacttcgagacacttaaaacctttatgcaaaggactgtaaccgagaaagacacattgtttggagcggaaggccaatttatgggtgttgtaagggcgaaggttaggccaacacgcgcaaccaaaagtgcgaagagcattataatccggttgttcctcaaacaaatatgcaggtgtatcataatggatgattttcatgggagtacgattgatgagatatgtggcggtgagaaaagcttcatcccaaaatttaagcggcattgatgcatgagccagcagagagagaccaacctcaacgatgtggcggtgcttgcgttcagcagagccattctgctgatgggcatgagggcaggagacatggtgagagataccaatgcgctgaaaaaaggaatttagacgttggtactcgccaccccaatcggtttgaaccgatttgattttgcgatcaaggagtcgttcagccatgttttgaaaatctttaaatttctcaaaaacttcgaatttatgtttcaacaaataaatccaagtgaacttgctatagtcatcaataaaactaacataataagatttattgccaactgaagagggggcaggaccccatacatctgaaaaaataaggtccaaaggagctaaagacaaactgaaagacttggggtagggtaattggtgacttttgccctgctgacacgcatcacatacagaccctacattggaatccctaacaacagggagattattttggctgacgactcgatcaacaatagaaaacgacgggtgacccaagcggctatgccaccttgtcatggacggcttgatgacggcgacatgagcttgtttattggaagactcaaaggaagcagcagttggcaacgggtacaggccgcgtctacaccgacctcgaaggagaagcttcttcgtttcctaatccttgagcaagaagaagaaaggatgaacttccatgaatgcatggttatctttagtaagatgatgtgcagaaacaagactcttttgggcatcaggaacatgtaaaacatttcgcaaaacaacatcacgaacaggggtacgaataacagtgcgcccaacatgatcaattcccatacctgtgccgcttgccgtgtggacttgatctccaccggtgtatttgtcccgcaccgtcagcttctctagctctcctgtgatgtggtcggtggcgcccgtgtcgatgtaccagttggtgtcgacgccgtaggagtttgttgccgcagccacgctcttctcttcaccggagtacgaggtgtcaaacctcttccagcacttcaccacagtgtgcccgatcttgccgcaaagctggcagatgggcttcagcttgccatcgccacggccgcctccgccgcggccaaaaccgccacggccgcgatttccgctgttgggaccgccatgtcctcctccgcctccgcctccgccgcgccctcctcgtgacgcagagtttgcagaggactgggcagccccttgaagcagctccatgcgcgactcaaaccctgtcaattgagcatgaagctcgctgacagagattggttcagcccggtttgccacagatgagaccaccgagttgtagtcgaagtccagcccggcgaggatgtaggttaccagctcctcgtcatccataggctttcctgcagaagacatttcatctgcaagcgatttcatcttaccgacatagtcagatatgctgagatttcctttcttggttgttgacagcgccagacgagtgttgatcacacgcgcgcgcgactgagaggcatagatcccctcgatggcagaccagacctccgatgctcggggtgagcgtcgccacctgcgtgagtacctcccgtgacagagacatcaggagataactcagcacttgttgctcctgcgccacccattgggtgtacgccgcattgacaaccttttcaccagtgttgccgtccttgtcctgcagcaccaccatcttggaaggaggcttgatggagttgtctaggaagcccgccagttgggctcccctcaacgccgcaaggacttgagctttccagaggacgaagtttgtcttcgtcagcttctcggtgaccacctgccctaggatagcaggtgccgcagcagtggaagatgacgccatctaatctagatcaaattgagatgagtttggtggagggagacggctctgataccatgtaaaatgaatgggagaagcgatacctttgtctcgggttcgcatgtatttatataggtagaaagagcctctaccgtggctgttacaagagattgaatcacagaagtttatcctgtgagtttacaacaaaccaaccttatctatctatcttaacaaactacagatgaatatacatgagataacaactcttatcttaacaatcagcaggtaggcaggcacagcttggtgcagctagcaactgtcatggccatgcgtgtagtcctagtattgatcgatcgatgcagagagaggtcagatgcatgcgtagcttctgatttgacttcaagtaatacagacagccgtcgcatatatgcgtgcatcagcgcttacatattattttcttctccccgaatatatgataatgataggatcctctcgtttcttaatttcattaattaaccccttcatgattgctcatttgctcttgcgcatgcatgctacctgaatccctctgtctctgccgctgtagcgccgatgaacaatgacagattatgatttatgcaacgaaaacctgaatcactgaatgtgctagaagatgagttaattaatttcacggctttaattgatcactatgaatacttggcttgttgtcattatgtatgtacgtacattgccatctagctagaatttaactcatcaataatcatggcttcattattcgccgattgcaaaaagagaaacatatatcagcctcatgtggcatgaggtgcctaaaatatctcacacgcgcacatactgaagcggccggcaagcttgatgcatgctgctatggtgctgactagctagcaaccagcatggatgcacaaagaagcaacttcatggatccatggctatataatatcactggatgtgtgtcttgcctacccatccggtctctgaacatcgatcgagttgaccactgtcgttttagtttcaatcggtatctgaactttattgtgtgctctgagtgtagtgcatagctgtatacttaacctgactatcacaactaatctgcttgacttttcaggtcagctagctactgcaaatagtcaatgagtgaggaggcgccgccatcatcgccggtgatgagggcggtgttctatgatggctgccccggctgcgccatggaacggaagctggagagcagccaaggcatcccctacaaggagttcttctttgttgggatcaccaccattgcctcttgtatgttcttcttaattaactaatgaactaactacggttatgatgtcttgaaatttttactatgagcccatacatgcatggtatacttgttttgatgatacaactagcttgcaatccatatgttgataatcttattttctgatgattggttgtattgttttccttttcagctttaccaatatcctcgttgttcccattcctctacctcatggtactacgttaatctcaatgggatctaatccatgtcatatatcttctctataggagcaaaaacgcatgccatgtttcactaagtcatattttataatcctacaattattttatcttcacactagatagaagacctacatgtggcaaaaaaggaacaagatattggattatacgctggatttcttggtaagaatcatgaaagttatgattttcaatcagcgtagcccactttaaattccaaagttccttctctttcctatttcataaaaattatatgctcatgcagaagtagaatgtgacaatatttatgttttgtaggtgcatcatatatgatcggtagatgtttgcctcactcttttggggtgtagttgcagatcgtatagggaggaaacctatcattgaattttctattttatcagtgtgagtatttattgtctcaaaatgttcacttttacatgaaaaatttgaaaagctcaatatatgatcctctgtttttaagggtcatattcaacactctgttcggattaagtgtaaagtattggatggcaattgccacaagattccttcttggtgctctaaatggcatgctggccccaataaaggtatgctacaaagcata

SEQ ID NO: 18270 - DNA, 2280 bp, Oryza sativa
gctctaggattatcaatagtaaataaatttatactcatctcatcacaagtacaaaattcagataattgtatctctaatgcacttcaatacttatatataggtaagcactggttggggcatagggcttgttgtgggtccagccattggaggctactttgcacaggtagttgttttgttataaattgtaaccatttttttcacagaatattacaacagtattataacttactttgtctctcatttctctcagcctgctaagcaatatccaaatgtattttctgagaagtcaatatttgggaggtatacacaaatggtttgtctcaagatatatttcataaatagttttatcatttattaaaaaagtatatgtgtattttttataggttcccatacttcttgccatgcatttgtatctcactcattgctcttgttgttcttataagctgcatatggctaccggtgagtgatactccatgtatatactacttttatgtgttttacaagactctacttaaaatcactatcaagtttctcacctcttaggctagctcccatatagctctgttaactctttcaatgctatgcataactttacccaaccatgaataggaatgatatatgtcaattggtcacatagttatatttgaagcatgaacatatggagtgtaaattcaatagttgacaacttggaggttttaaataagcatatgatacaatttttaagaacatgaaacacttccactgatttaaaatttattttcttggtttccattatgtctaaaagagaatatgattagtgatgaacaaactaatttgtatttattcttgtactcaattgttgcatgactactgcccaaaaactgtgacttgtgtacttgaagcttttaagtgatattataattattaagacatgaccgcaaggaacaatattaatcaaattgacaatcttaattaccaggagacacttcataagcataaaaatactgaaggtgaaattgaaatgattgacaactcaagaagtacacttgaagaagattcacataaacagaagagcctctacaagaactggccattgatatcctctattattgcatactgtgttttcacccttcatgatacagcatatagtgaggtaatgattttaactgtatccctattcattagaatatgcagattggttaatatataaaagaaatatgtttttcatatatataaaggactaattgattttttatatgtatactagatattttccttatgggctgtaagtgacaaaagatatggtggattaagtttttcgtctaaagaagttggtcaagttcttgcagttgcaggtactccattaactgttgtggagcaacttattatgaccatcatttccacctctcataaatcgtatgtagcactttattcatttgggggtaactattcattcaaagtcggtatatacagatgttcgcacactagatatattgttatactacatgtatatatttcttcctcgacatctagtcaacactccacaatatcaagatgagattctctaaaattttcagaattctataatgttttctcttttggaattaatgtacgaagtaaatacgaaacaatttaccaataagggaatatggtactagaaggaatgtgtaatgctcatctcaactagtgtatatgattgttacggttgttgtattgaaaggcataagtcctaactcctgtatttcttattttaccaaaatttattgagtagtataattatgcaaaccccaaaaatattaatcctatatatgcgccattttaggtgctggtctacttgtgtatcagcttttcatctatagatcggtccataaatttcttggatccatcaattcatctcgtattgcatcagtgagtatttaaaccatatgctcaaaacacatatacatgtttcttagccaagccaaatatcttatacaaattttgtgtgtatattacaggctttatccataccaattcttgctgcttatccctttatgacacacttgtcagggcttagacttggaatagctctttaccttggaaccattttaaagggtgttttatcagtaagtttcaaatattgtttgtcacattccaaacaacatgattcaaggaaaaattagatatgatgtacttatcatataagacataatagcataatatacactatgaaaataattttcattttatattacaagacaaagaatatattttttcttctaaaattcgcaattgtttgatcactcatcttattgtgcatat

SEQ ID NO: 18271 - DNA, 713 bp, Oryza sativa
  unsure (1)..(713): unsure at all n locations
ctgcagccctgtcgatataaaatcatgctgaacatcgcacgttgtctgctgaaatgcatattatttctagtgattaactgagtgtaaaccacatgagctaacaatttatatgcaaagcagtagcaaaccatccatagataatagcaagaacaatatacctctgtataagccatatcatgaaaggagaagacacaatagagaattatggaggacatcaagggccaatttctcaataagctcttcttgcagtccaaactaccattttggtcagccttttcttttggatcaatcaaatggctctccaaagcttcaacagtttgggatctacttgcatcagctttatgcttgtgtaatgtctcctaaaatacatttcaagttactttacaactatacaaaaagaattaatacaaggtaccgaagaattatcctttctcactatgagtcatgctaaatattgatacttctgctaatgcacaagtttttaagagaggaaatataaatttgacttcaaaaagtaacaaaagagactattaattcctgatgaagtggaacaaccacattaggataaaatgcagattatctccgttataattaccagtaactgattttggttgctaagcatgcagcaaaacttttgatttcttttttcagatccatgtcataagatcttccacagtgcanatatatcanatacaactaaatatatgacaaat

SEQ ID NO: 18272 - DNA, 657 bp, Oryza sativa
agtatatgaactccattttgcatcgataccaacagcagcaacatcaatatttttctataatatagtgaacaaatgaccgtgaaaactcgaatcatgagtagaatgcaccaatgctcaaatggtacaccataggcagcataagtaactgaaaatttgagtagcagcactagaaggagacctcaaaagcttgcttgagattctcaagctccttgtctaaatcattgattgcctgtgtgtacgcttgagtaggggtggactggtttgcagtatggacctgccaacatattaaaacaatgagactaaataaaccccaacctgacacaatatatagagtaagcaaaaccttaatcctaccctgacaaggatcttgtactgaaggggatgagggagcttataaccagcaaagaggacgtttgggtccctgtggagctgcctgcaaaatctcataggtacagaacattcaaaagtagcaaaaaataagcaggagcaaattagtcataaaactcttttgcacatacatgcggaggatgttgccaatggtgtggtcctcacgctcaattgtgaatgacccagcattcacaatctttgtatcccgctcatatgataccctgcacaatcataagtttcagagccatatctgcaggactgcaaatacta

SEQ ID NO: 18273 - DNA, 2396 bp, Oryza sativa
gtcctccctctccagtcactgcaaccgcaaaacatccacggaaacaaaattaaaaacaagcttcagagattgctcccttgatccctaaacctcatgtccgtacggtgaacaaagaaccctagactaacataacagatgagacgggaatcaatcaaatcgagagagcaaccaaaaacagcagcagagagaaggaatcaagaaacacagagagagccttgccgtgcgatgatgctccagctccctccccgccgctcgcggagtcgccggccgagctaccctggtcgtcgaggcgcggaggcggaagccggaaggggaagagagagagagagagcgagagaggaggaggaggaagaggagtgggccgggttagggtagtagtagggtttcggaggctaagtaggccgtattattgggcttccacggcctagtgggcctctcatatcttcctccatccttcccactcttctctcttcctcgtatctccccacccaattttgctatatatttgaacttgcaccaatcgtttcattgctcatggttaatagtatgccccaagtttactgcgagcataaatgtatgtgagcatttgcaaatttgccgctagtttttttattttacaaaaatgccatttgaatgactgttctagtggcaattttgtaatattctagcggaagttttacaagatttaaaacagtggcaattttacaattgcctcaaatgtataacttctgaaattcttgcatagttcacacgcggtgaattaatttacggtcgctacaagcatcgtacgacgcaggcccatgacgatgaggggaggggtagaggtggaggggcctctgatggtggatgatgagttgaagcacaagaagcaaaagcaggttaccagagtaatgacatcaagatcaaccgaacctcaattttcagagaatatttacactgctagaagaatgtgcagccaaaaacaatgctggctgagtatgaagtatgatgacagccacagttctctgaaggaaatcatagtgatgtacaaaaaaccttaatacaaggatatcatttcttctatactttctaaatcaatttactacagagagggtgtacaaagatgtcaaaattggtacccagtttctatcctctacaagagcatttccctccacagaaaatatgaaacccagccgagtccctgaccaagatctctttaccggtagctgcagaagtatactccaggaatgagtggcaatcaccacacatgcggacgttcttcacgacgcggatggtttcaccatgtcctgacattagaaggccatacatggcagctagcttcacgctatggtacatcaggaagtgcctcttctggtattcctcgacgtcgtgtagcacgaaggtggtgtccggttcatacccagccttcatgcactcaaggattagcacgtcgaggccagcgtagatgtccttggactggggatgtgacctatcccgtgcgaaaaatgagtgaatagagttgccatgaaatgtccagctccttgctggaatcttacgcatacccttttcacgcatcttcagccttgtgctctcagagcattgccatcttgctgattctgagtagagatttgatgccaggacatatgtggatggatcctgtggttccagtgcgagtagatgcctcattgctagcctccgcatggtcatgttgggctgcctgttacagctgtctagacaagatcgccaaaccaatgcactaggcttgaacggcattttaccgataagctgctctgcctcctcaaaatgaccccagcatccaaggacatgaacaaatgctgcgtagtgttccacagctggttcaatgccatatatgcttgacatagaaaggaatagctccctacatttatcagcagaatttgagcttgtgtagctgcaagatgatatgaccaggagaaaggtaacagaatcaggtttgatgggcaatctctccatctgagaccacaggtccagtatctcatctccctggcgatgaagaagatgagaagtgatcagagcattccatgaaaccaagtctctacaaagcattcgcttaaagacattgactgcagtttccaatgccccacacttgccatacatactaatgatcgcattaccaactccctgagcactcagaagcccagattttgcagcaaagcaatgcatttgctttccgaattcagcaaaacctaaggctccacatgctccaagaacagtagtcaagatgaattcatcaatgaactgaacatcattgcttctaaacatcttaaggaaagtggaaagtgctttctcatactccccatctctgaaacttgcagccagcaaagaattccaagcaatgtgaaaactctcctcgtggcgccatttctcaaacagaagat

SEQ ID NO: 18274 - DNA, 823 bp, Oryza sativa
ctgcaactagaaaattgtaaaaatactactaaaactgtaatttgagttgcattccttgcaaaattggaaaaaaaaagtggtaaatttgcaaatgccccgatgttatcatacacatatctgccattgttgtttcaagagccagctgcctagttttatctttgtgcgtaacatactatttgggataaatttataagcacaatcacaatatatttccttaacatttggttgcttgaatttacaaagtgtatctccatcgactggttacagtaagagggaagactgaaaccgttctgcagaatctcaccaagaatagctaaaactactggtgtgtgaagtgtgaactaatggcagggagaaaaattgaaccgtgtttgccaagtgctatatagcctagcaaagcttcagaagtgttcaactgcagctggagaaaagatgcaatatctcctaccaccatgaccagttcagtgctcatttcttgttgaatccaaacaaggatttgatggcgttgatagcattctcattgatgaacgattcgtcgtacttgttcagcaggacgttgaattcctcagttttcctcaagttttctagatccgggtcggtgcgaattctcttcatgaaatcaagcaaaatgtgtcactagtcatgaagaatgcttatctgtactgcaaaagagttgttgtctggttaccttgaagtcttcataacctgctttcagggcatcttccagtgcagaaataccagcttgtatctgcagaaagaaacatccacatgagttcatggacattcagtggcagatttgcttttcatattgagagaaatatcg

SEQ ID NO: 18275 - DNA, 666 bp, Oryza sativa
attttggctggcgctgaggtcccagccagcaagccatccagaaggcttgctgggctgggccacggccgaaacggccaagtgccacctcagcgccaggttgactggcgctgagtttcccaaggtcagcgccattttggctggcgctgaggtcccagcccgcaagccatccagaaggcttgcttggctgggccaaggccgaaacggccaagtcccacctcagcgccaggttggctggcgctgagtttcccacagtcagcgccattttggctggcgctgaggtcccagcccgcaagccatccagaaggcttgctggtctgggccttggggttgcggccaagtcccacctcagcgccagtccggttggcgctgagatagctgccacgtcagctggggatcggccccggccgccacggtggcacaatgtcagcgccagtcccgttggcgctaacacggccaacgtcagcgccaatgtgtttggcgctgaggcgacgacctatttttggttgaagtttttggcaggggttagtttcgaaataagtttttgaaaagggtcaatttgtcaaaaaaacggcccgaaggacgtgtctacgacgacgcgcacgcgtacgtacggtctcgatatatatacacacacatgacacacagcacgcgcgcggtggatcgata

SEQ ID NO: 18276 - DNA, 687 bp, Oryza sativa
acagaccgatcagatcgtgggttaggtggcgacaggcggtctgacgcacgcctcgccccatcccgtcaggacgagagcctccaagcactcgtccctagccggagccggcgtgttagctcctggagatggcacgttggttccggtcagatatatgccaggcttcatcctaaccattacaggcaagatattgtatgaagaagggcgaacaggcagattgttaaactgacacgtggtggacaagaatgaccgatttgtgaccggtctgataatggtcatgtcgtcagcagacagccatattcccacgtcgcgcctgcttccggtggaagtggaggtaggtatgggccgtcccatcagaaggtcattcggacggcagccatgcaaatctccgtccattaatgaagagaagtcaagttggagggaagagaggatgagtccccacacaaaagaaagagagggagagatggtgcatgtggtatccccttgagatataaaaggaggaccttgcccacttagagaaaaaggaaaaaaaacgatcccagaacgatcgggggctggctcgcactttgtagcttcttcatacacagatccaccaaaacacaggagtagggcattacgcttctcagcggcccgaacctgtatacatcgcccgtgtcttgtgtgtttccactctcgcgaacgggctgcagg

SEQ ID NO: 18277 - DNA, 675 bp, Oryza sativa
agatcactatgacaatattaaagttgttgcagggcctactataattatttattacccattagcataaactaagatgtgctaacattgtcttggatttttatatgttctcattgaaattctgtgatatactattgcaggtcagatttcaatcgtttaaattttagtaagttctatacatttattctggagcggggtgatgaagttatatctgcagcagctgtcaggtaaattttatattcatatgctctatgctccaacactttgaagctgttggcattggtcgcaggcatcgccacctcacgatctgttgtgctcatgattaatcaacctagcatttggctgcaacatatctatgcattgaaatttgtttaggataagcagttagtcatctcttttttttgttcaagtttggcttccaacagaactgttgtttcgaaaagagattatatttgcccctcactctttaaccaactgcaactccatccatgatgacatattgtgcagctggcatacttagccttcacttgttattttgcaaattccaatgataaaatgcttattttttctctgtgtgaatcaggattcatggaactgacttagcagaaatgccattcataggaacaaggggcatatataggcgccaagggatgtgccatcggctactcaatgcaattg

SEQ ID NO: 18278 - DNA, 1153 bp, Oryza sativa
tgggttgaaaatgatctctcttgatggtttaccgcgaaatactggcagtcaacaacgaaaagctgaaggcctcctcaagatgaacaattaccactagttctcaagagatcgctcagaattgaaaagaagcacatatgagttttcttcatgtatgactttgactgtttagcgtgaaaatctcgctagcaactacacagtaagagttaaatgctccctcaatttccccaaggatataagtaattaacatgcaaaaatatatatttaaaaagtcatgaacatcgatttcttccatatttcatgttataattataatttccaccaaaactctttaaaaattttatgtaccacatagccctaacctggtaatcgaaatcaaaaaattttcccttgacctaagggtcaagaaaaatccccaaattataataggcaaaaagtatggcccacttgtcaaagtgtcctctcttattaatcctcattaatcaaaccctactaatcttaatcttggcatccaaaatttcctaaatctatggtgactttatcaattttttcatgatttgtcggtccagtcttcgaacatgctcatagggataggatttgcgtgcacgtattcatatgggtaagtgcacgtgtgttgtgattgtctgcattatactgtataattgaaaaaaaatcccaaatccttttctcctctcataaataagcaaaattaaaacaaaaaaaattaaagcatcactaccatcaccaccaccaccgcgcttgctcttcttcctcccccgttttccccaaggcgcaaaccaccacgaaagcccccgaatccgcagcgcgaatttcaaagcagcctcccccccaacctccgatctcccgctccctcgctctctctctctctctctcgcgcgcgcgcgcgccatctagggttagggtttcgagaggatcccgctgcttgcgagtcccgaccatgagggtgcacccggcgccgcggaagcgcaccatcgccgtgcagcggcggtgcggggtggccgcggcggcggcggggatggccggcgggaagaagctgaggcggctcccgcacatcttcgccaaggtgctcgagctcccgttcgccgcggacgccgacgtctccgtggaggaggacgccgcggcgctccggttcgtg

SEQ ID NO: 18279 - DNA, 1466 bp, Oryza sativa
tactatatagtactaaatgtgcttcaatgtgttttatttttgttgctgcaggtagtgtggatgccatatcaggcacaggaagtgctcgagctagaactgaatcccatgtgccatatagaggatgcgttgaagaccctacggtgcccactgatctgcttctatgcagtggagttccagatgtgccaccgcgtgatgcggcaattcgggaggcttcaaacaatcccgcaccgtttctccacgagtatcgacctacacaagttagtaatttcacttaacaatttattttgcttgcccaatcagtcacttcaacatttactacatatttgagttggacattttgcatacgtgcagggtggaccgtcggaagaacaagaaggtgactgattgggcttactaccatcaggatcatatcacgcaatgggagaagttcgaggagaatggagtaccagaccagggtcagcacaacgggacggagttcgacttgtacttggcgtggctccacaggacctaccgtcttgtcctacgtccggcttggacactagccgacatagcggatgaccccgaggatgttgaggagcagaacgagtacgatactcgtacccgtctaggtaccacggtcgagacgggacctgttcgcgacagagtggttagtttctagcattaatgttgtatattatttcatttcaatgccatatatgttgtgacttacttcatttcaatcctacaggctcgagagctcttgcggaccgtcaacgacgcgggagtggcgctaggcacggctcctggctccgaaggagagggcggcaccctccgcaacgccctacaggtaatcgttggaaagagatgaaactacggtgttttcttccaaaagcgataacttaacatggattattttttatgcagagactacgacagcgatgtcggaagttggcagcaaggctcggctgcaggtcgactgatgtggtcgaacatgctcatgcccaccaagagggggatgaagaaggggaggtgggtgacgaggagggcgagcaagacaaagaggcggaggaaggagatgaggaggaagaaggggatgaggacagagaagaggaggcggatgagctcggtccctcgcagctagaggacgcaccagagtcgtcacagccggatatctcgcagcccggcccgtctcgaccacgacgccggcgggctccttcgcaggactggaggtacacccccgacgtgcctcgtcctcgcactagaggtaggaggaggtgagtgcatggttcaatggatggatggatagatggatggacttgatgcatggttcgatagatgtatggactggatgtatggactcgactggatgtatagccgaggatcgatgggatgtttttatttcttatatgtatggacttcatatatggatgtattgatggattctatggatgtatggaatgatgttgggattgatggatggatgtatg

SEQ ID NO: 18280 - DNA, 4833 bp, Oryza sativa
catatgggtccggagatcatcagaccacatgtcagcgtctttatcactaacatataggttcggagatcatcgggctcacatgttagtgataaaggcatggtgtagtgactgcagaggatttggccaatgcatggcaccatgccattaatcatactttaacatataacgtatacactgttggattttaaaccattcatcttattaaaataacaaaaaatagtataattatattgaagtataatttttacttagaatttttttaatgattaaattacagcagaataaaaaggacatttgacgaatgcctacggtcaacaagtgttaaaaagtgaacgacgtcatctatttaaaaatataggagttagtattgattaaggattttaatcttattattaccaataacaccagcgttttcttaatgcttattaactaattcttaattatttgcatattgcagtggttcttcaacaccgttagtctcgtgctgtttgggatcgtcgttgtgaaggtagttccacactgcaagaccatggaggaggtgtttgcatgcattctcgctatactcaccgtccttgggatactaatcatgggttattgcatgataaaaaacactaaagaggatataaaggccatggagggaagcccgtgagattccaatgtatcatcagcttgactctatctactttctcttttgttattttttcaagttggtacttggatccacttagagcatgtatatatcagttaattaattagcccaatgcgacatatagacagtccataataagggatgaaaacggttgaaaatgttcggaaactgtattgtttttctattattttatggaaacggttgaaaatggttgggaaattttaatttttatgaattaaactgaatttcaatgttaactgcaatgccgcacacataaattagaaaaacggtaacatttggtgaagtcaatattattatattagttttacgaatatcactatgatcgaaaaatttccctactccacatcaccaagagtctgtactgatgaaatagtcatctagcttaaccctttaatttttaatcgctaatcgcccctcgagctcccttctaagatgattatgtgatgaggtggaggaaaaaagttaggagaaagaggatgagatatcccttatatatgtaaatataaggggcaatctccacacaatcttcaagaaaagtttaaaaaaaatagtgtgagagtgaactaataaaaaacattattagggtttgtattagagatggtatgttgtacttgttacctcttaattaattagtagatgatatggctcaaattagaggtaacattcaccttcattataaaacttgctctaacgcttcttttgcatcgtattcctcgtagaattttcatctcagagcaagtttaatagtaggctataagcctattataagattacgcggtggagagaaaatttgaaaaaaaagaagaaggctggctcacatgcaactgttagctattcatatactccaaaataaaaacattaaatgcataggtgaaagatagagaaaggagaaaaaaatagagataagggcacgcacaaattaaggtctctattagtaggctctctcaattaccacgtaagcaaatttaatgacttggaagagagagataaagcaagatgaaaatatcgttgtttgctgtgacatcggcgtaacaacgccctggagtgagcaaaacgcggagacgagaaggaggaggaggagtcggcggtcgtcatggcgacgagcgacgggcggcgtagggaatcgagaagctaataccatgtttgacggatagactcaacgtgaattgtattatcacagagcaatacagatataggcatcataggccatatgctctcaaccgattcatggcaataaaatttgggagaacaaggaaggagagccaatcacatgatacatgccatatatagtctaacatgtgcctcgttgcacaacgcggtgtggggcatagagtttccagggtgttttatctagtacactctgattgtttttaaaagaatttaaacttatgtaatcgagatagaagtgtattgtgctgcatctgatagaagtacactctgaaagcacttttaataatttaactatgttatcaatatagaaatgtaatttgctgcatctgatagagtgcctaatggacaacatttacacaaccattgcttgttcacttaaattattctgcatattttcttgtactttgctctcttaccaatgggtctgttgtgtattagggctgcattgccctaagacaatgttagtactacagctgcattaaaaacttataaaactctttccagtgtgaaaatacagagtttccagctctttgagaatcatattgctgtatatgaaacgtcaaaatggtctaccgaaagttaccgcgtatcgcttaccagccactggagagccaattgggcaacttgagggaggtcgggagattgattttgttgatccagcatatgacgtggaacctgagcaatcacaatttggttcatctgttgttcggttccattatagctcaatgaggaccccaccctcggttttcgactatgacatggattcaggagtgtctgtgctgaaggttgtctttggatccaaactaataatttttttcatcacatcaacctgtcatatacacacaactttttagtcacatcgtaccaatttcaacccaaacttccaactttagaaggaactaaacacaaccgaagaagtatgatatcagtcgcactgctttaaatagctttctgttattttgaacaaactaattaatatgttggcattgtttaataacaaggtatatatgttcctgaaaacaggttagtcatgttaggcatgtattgtgcacctgtttcttaaattccactctgtttgtcaccgttgcttaaagcacaatgaacatcgattacttctaacagtatagttgatgatgatctgtagtacactaacagtatatgttttagcaaacctaatgctcgtaaaaattatgaaagaaataactaatttactgatacgatttttcatgttcagaatgaggtgctgatcataagaggttgtcatcagtgtttttttgtttttattaacatgaactataatttgcacagttatcacatgtgcaagcactattttatgtgcagtaacacctgtattagggatggcaatgggactgtccctagcagggggcacagctcccacctctgtcccctgacacctaaaaatgccctgttccccagcaccagccaggatctggttatgttcagaatgaggtgctgatcataagaggttgtcatcagtgtttttttgtttttattaacatgaactataatttgcacagttatcacgtgtgcaagcactattttatgtgcagtaacacctgtattagggatggcaatgggactgtccctggcagggggcacagctcccacctctgtcccctgacacctaaaaatgccctgttccccagcaccagccaggatctggttagttaagggacctccggtatctggttttacggttgggggacgattttgtaactcgatgacaagttgagggacctttggtgtacttttcccatgtataatcgacttttttttatctcgatttgttcaatgtatcgtttgctgcggcaccttggacattccagcgtatttttggcacctaaaagggtctaattctaactgaataaggtcagctacaactagttttcagagattttgactttgccacggacattgttggcagctgaataaacacatcgtgtagatttgattctttgagaaagttaatataagccaaaactatactttctacgggaagctgaatttatgtagtatgtagaactcatataagatgaaacagttccagtttgtacatatgattcttgcgttccatgggtcccttgaatatactcaaatatatgtatggcaattctcgggatcttgatttttagttatcgcaccatgtcgtaatttgctgccatgaaacatttcaatttccatgtactccagttgcgagccaccagccagacagaaacaccaatcgcattgcaagttttaacaccaaatctccagtgctaattaagtgctaacctaccaggaataatcatggtctatctatgcttgctcactgctatctttgactcgccggtgttcttttctttctaccttcctcgctgagccacctgcaattatgaacgaaaatgaactgtaatctcacatacatatcacattgacaagaaaccaagaatagtactggtctgtagatttatataaattaaaggaccaagtatcaactgaaaaatggatgggtatcatcggagggaggatgctaaatctaacttggactgattaggggcaaagctatcgagcgcaggttggggtctgtaacacaaaaacgcatgctagggtgatgctcttcagactcagagtcactcgcaatgctgggaaaatgcgcatcagaatcacttaagagagccagccagtctatcaaaaccgcttggatcaattgaggtttccttaagtcgttctttcaaagtttccagcaaaacaatccctggaaattaaatcagacaatcgacccaacatggatcagctagcaatgcgagatagataaagaggataaacgagaataagaaataccaagagcacgcccaagcacagcgaggctggcattttccgtgcatatataccatggccaaatccttcaagctgatgagcaaatcctgcattgagcagcccctcaatcggagatgagaaaccggaaaaggaatgaaaggcagtggcgaaagaga

SEQ ID NO: 18281 - DNA, 2282 bp, Oryza sativa
caattgcccacaatcttgcatccttcactcttcatcaccgagtgctacattcctttcaacttcagctgcacatcactcagcccagtcttcatcgctatcatcgtccacattgttatcctgtcatatgctgttaggattagctgggaggaaggcacaacctcataacaacaacaacaacaacaagaacaatggccataatgtaccaatctactacactgtagctatcagaaaaacaatcacctgggaggaacttgagagcacttcaatttcgtcatcttctacctgtgacagaaaaatgagggcaaaggcaatcagcaaagtaaacaatgggcgacattcaaattaaaatccctgatcattgttgctaagtaaagtacctgtgtttttctctttttctgacttctgccagctacatccatgtaaatacaattgtcagcttcatatgaagaacactaacatgtactgatgtactcagttaaagaaaagctgatagatcgttgcacattgcactaagagccactaaaatgcatttgtttccccccatgcatcacagcttttacccagcaatatcaagtcttgtaaaattcaaatagcatatttagtatagagccaccacaatagatgttaattccatcatttattccgattcgacaggcttgagatggtcctaaagcttcatgaaatggattaatattttaaatgccccttacatagacaaaagctgaaagcttctcaagtaagcctcccaaagcctttggattattttagaacaagtcttctccattgaagaaggccttcagaggcttaaaacaaatgtaatcgcaccaaggtctattagatgcttctaacaacagacttgctactgcacttaccactcttcttccctgttggatgtttttcctctggacttgctcgctgcttcttagcagcaggtcctgtagaacaatgccaatcacaagtccaatcaaaaggaattttcgttgtgtaataaaggaaaacacaagaaacctagaattgcgtaaatatgaagaaccttttgttgctggagatcctttcgggcttctagtacatctctgaaatagaaatccttttgtcagatgcttaactaatttatttgtaccaggcatgaaaacagataatgttcaaaacacacatacgaaaaaagaggtatgttgtgaagttggttcaattaatgcatcaagcaaacattatatcgaagttaagggtataactgcccactatcacaaggagagaaactattataataacaggtatgaatttccacctttttttcttctgcttttttaaacatgctagacagagtagcctgaacgagtggctccttcttagctgagataggctgcgcagatgaatctgcaggtttaatgtcttcactttgggattcattcttaactgccggactcttcacctgcttcaaacgaagaaagcaaataaacacaataaaattatttacaaaagataaaagcttgatagacattgattcatatatttgaatcttataaaattgagtaaatttcagaaaactgcaactttagtgacaaaactatcagtttgctgcaacataagcgacatgtttcagtttcctgcaacaatagcgtgggaaattttcacaaaactgcaacttttacattatatgctgctacttttacgttatatgcaacaaaagcgtgggaaattaaattcggtatcactaccttctcatccatgtcctcagggacatcaatctcatcgtcattatcagatgaatcgtctccagaggatatctcagtatacctgcataaagagcgagggatctatcaagtatacctttttattctttgcctttttttgggtgggtgggagatgaatatatttgtttttagaaacattagccgttaagccaaataaatacaggtagtaggcaatctttcagctgctaagcaacaactagagtccgtgtgcttttctgtttatccgagagagcaacagaaaagggtgaaactgacttacttcaaggctttcccagcagttctagcagactgcctaactgaaggtgcttgactagtgctttgtgtgttatcctcgtccttaaggtctgaatcctcggaagaatcaatgtcagattcaatctttggggaaagggatcctgtggtggtttcctttggcggtttattgatggtaacagcttcatcacaggaagcacctgctccacctttaaaatcagaatctgcaacagccccatcctaccagtttgaaatgaagaagcacatgagatgagaggc

SEQ ID NO: 18282 - DNA, 2677 bp, Oryza sativa
tcgtcagtcagagttgaggacaacaatttatcatcccctgcacccatagcaaaagaaaaacatgcaattagtgtgatacacaagaagtactactcttgcaagtaaaaacagtaaaagtaattctaagttaaagatgttgaatttcacactaaactgagaagcaaacattaaaactgtatgccagcatcggctgaactgaaaatttactctacgtttctaaccaacacactaatcttttgtccaattcattgagcctgtaagaaattcagcacagaaaagatccgctaaatcatgggtcgccttcgtcggcgacaaaatgcacaacatttggataaatcctactgccaagaaacatatattatacccaaagtgcatacattttttttctggtgttgcctagcacgaaaattcgtcagttaagtgcatatatatttaacttctgatgtcctacaatattctttagagaattcctaactcaacatgcaaagacaggactggattttccacaaattcaaacaaacaaacaaaaaaggacttgtgttatttactgatctcacaatatacagtgctgaatactacacataactgaatactgcatcgtcgcaaaaaaaaaaaagcattactgaatactgcaaaatatacagtgctgaactagcaaaaaggactcgtgttctttactgatctcacaattggtttaggcctttagggtggtcactggaacaagtaaaaaacaccagtaactaacatagcatgtcacatctgcaaattggcagcttcataattcccaaatagaaagtcagaggcatgtcgtgaatgcttcagaatgttcagttactgtcaacactaatcagaattaggttgtcatagaccagtgttaacataccattcagctaccactggtcctgtctatctacaatattcagatgatcatctaaaaatttcgcgacaatcagataaaaatatcgtcaagaaacacaaaatatacccaaagtgaacacaaatttttggtgttgcctaacaataaatttgtcagataagttcagatacatttcacttttgattccctacaacattcttcaaacaagtcctaactcagcattaaacatatgacttgcatttttccacaaattcaacacggacaaaaaagataatacacattgctgaaaactatggtgctgaaaaacagaaacatgtgcattgcccactggattgttaataatctctagtcaatttctagtgatgcatgtcatatgttctttttgcagcaaaattcaagagtacataaacaatattcagcaacatgcatataattgcttaattgaacagtactgaacaatttatggtactgtaaactacaaaatctacattattgaaaggacaaaagggacccgaaaagcagaacattgctcacaggattgtcaatattctagcaaacatggccacaaaaaaatgtcaagcagtcttcatttagtgaactacccaagactcattgatgtagtttaaaatttcaagaactcacttgtgttctaactggtgtaacaattggtcatccgaacaagtaaaatacctctaactaactagattccacatctacaaactgggcagcgtcaaaattccccaataaaaagacagagacaccctaaatgcttcaggaaattcagtcactgtcatcccctatcagaaattcagaattcagaacatctacggcattatcaataatctcaagttacgcaggacatttagaaacaatattcagagtattcagcagcaacatgcatatcaaattagtctgattattacctgtggtgttggtcctaataaggacgatatgtagggtctcctgactgcgaggcaggttgatgagcagaggggtgagccgcccatggaggccggtgcggacgcacagcataaactcatcgtagcccacaatgcccgcaagcttctctctcaggagctgcactgacctcccggcgaactgacatgactcctagtgtacttggccagcgtcagcggctgcggcgtcttcggccgtcacgaaccggatctcccgatacagcgagcacgagctagtcaagttgcactgcacagtagcggaatgaatttgattagttcacatatgattagttctcgcaagaaatctaagattaatctccgacccaatcagcatttgcaacagagaacaaacacaaaaattacgaggggatgaggagacgaagctcacgtacatcggccatgatcggtagctccagcctgtcgacgggcaccacctcccaccgcaacacgttgtttccttgtcaacgttgtcgtcgacggatacgctgcggcggcgagccagaaagtttttgttgccgcgcagatagcgcccggacctgtccagcagaagaacgacgcccgcgggcaccgtgactcacgacgctagagcagccggtggcccgccacatgatggcgccgacctccagctggcaccgcgctcacggtcgccggggtcgagagtcccgaggtagcggccgtaggcaccgcggaggagaacgtaccgcgtgggcggctccccgacgacgagctcgtcaaacggcccacacagcgttgtgctgcaacgcgacgccgccgccgcagccgccgagccggcggtggtagacggaccgcccgtcctcgtcggcgtggaggtacgagtcgcact

SEQ ID NO: 18283 - DNA, 3084 bp, Oryza sativa
cagagagaattttgaaagatacaaaggtcaacatgttcttcctgtgttagcttcttttatggaaaagaaacatcgggagaacgtatgataaaaatgcagagatatcgatttcaacatgcaagaatgtgttagcttcttttatggaaaaaggcccacaaggccggcatccggtaatacaacatttctttacagttgcaaaataccgaaacttctaatgctccctagcccaatgatcatgcgaatcctcttccatctccagatctcctcatctctcgaatggcaatcgcttcaacttcaatggaaggcagccagccagccacaccgtcaacagacggttcgcccgaagcagatcgatgctatgtacagatttttcgcccatttatcctgcgaacagcacaccggctatgttactgaactccgaaacgcgagaaattatgtttgttttttacaagacacggccggatttcaatgagctgcgataatgtatataccttgacatgattactggggaaggcagaggtccggagagtttcttgtgtctcgtctactggcttccgtttcggtatgctcaagataaaagcagcctggtcatttgttgctgctattgaggttattctgtaaccagtctcccatcgccgatggatgccttcacttggatataggaaatccaattctacaacctaaaaagggcatgagaaaaaggttagcttcataagtagatatattctacagtaaataatggaatgctcacaggaatataaattgccaaatttgtggactgaatatgaactaggtcaagcaattattctaacctgttcagagtaacctgagttccttgacataactacaccccagcgatttccagcggtggccatagatgtcacatgaaaaccttctttccactttttattgatccacttgaaggggaatgactcactaaccttgtatgactgttgggagtaaggtgttcctgcaataatggacatatcaaactataggtgatcacaactaagccaggttaactcatggggagcaacaaaatgattaagtccatatgaaacatatggataattcatcgtcaaagaagaatggtcgggatataaaatgactaataagaaacacatcccagacctttggacatcacaactaaagaacttccgttagctgatccagctattgctgttatgtagaaattcttctcccactgatccattatccagtcctatgtataattgaaacagagttaggactctcagcaaacaaataatccaagtactaattatcacacctcaacagattgtactttaccttatgcagaaaaactggtgagagctcatgaacttgagaaaggaaaccagttcctgcatccattatgagggcccaaagatttgctgaagacgccacacaactaatgtatagaccatcttcattacccttctctatatgctgctgaagcctgttgtcagccacgttatagtggtacctaacaaagaagtagcataacttggtattaatttccttgtagcaacaatattgtcacaccataaaagagtgataatgattcatcaaccaaatttcaagacctgttcaagagaaaggcatgcacagagaatcacaacaagatgacattgtaaattttgaaagaaaaaagaaacaagcgcaaactaaaacccatgatcactagcacttacaagctgtattaatatcaggcacgtgctgtctagttagtgaagagttatttagctttttagatttacaactatatatgctgcactcaaatgattccaggactcaggtcacttttagaatgttctaatcagcgcaccagagttaaatgtatcatgctaggttttgggctatcaaaattcagatgtgacaattaataaatagttagtagcaatcaagatcatctgtattgggcctgaaacggtgcatgtttaaaaagtagtttgtctggactcatggagcaggagtaacatgacatgtgatccaaatttaacatgaacaatgtgcaatggattattatcttgaattaaaattaaatggtctgtcaggtacccaaaactgtctttttaagaaaatgtcgagtttgatttgacaattcaaaaaaaattaaatgaaatatttaatttatcacagacaaggcagtaacttgtgttttcaaattactattgtttgcatccaagaaaagcaagtacctagactaaacaaatgcaggtcgatcatgctttatatcatctagttctttgatgtaattacctttgcttcatggcccgcctggcgttataaacagaaatccattgagctgctgggctacctaatctaactttcttcttgggttgctcatcttcttcatggtttcttccacgtttctgcccaacctataatttaagagaagggttcatggacagatatggagcagacctaaacaaaatatggaagtgagtaaaatggtgggtggtacagaccttaagagcgccatcaattctgataggtcttgaggcaggtacccaatcaaactatcaaagagagaaatcagtttggcgtaatttggctcttcatcaaatttcatatttgtgacaacttcaagaaactgtttgaatggaggtggacagaaacagcttagcatctccggagaagtagccattttcttcttgcaaacaaggaaactcttggtatcaccctgcataattaagcaagcaacattagaattggctaatctgaactgaagttggtatcatgaagttaataggcatattaaaatatacctggtaaccttgccaaggcaatcttcctcttattagaaatataagggtgtacgccaatgactctaaatcatccctcctactaccagtacggcctaaatgggcatggacactggcatatctaattgtacccctgaaaaaaaacgaagataaaaataagtaaaaagcactatatgagagacagatagcaggtacagagagaatattgccaacctaaagatatcaggcctttggtcataatcaacatgttgccctgatgactccctccatttcgatgctgtacaatttggacaatgccatatcatacaaaaaatacttg

SEQ ID NO: 18284 - DNA, 680 bp, Oryza sativa
gtacagaatagacaagtattaaagttccatatgtttgggctaaatctagaacaaaatggaatactgagagtacaaatgcaaggagaaggctacaagcaatggatttgatttaattgaatgaacttcaaaacctatcaagagctaacaaatgtaaatggaactggcaattcgtgaagagattttaagaaatactggagagatgtcattactcataccctctcagggacaggtagtgatgattcatcgtcagccgcaacaagcttctctgcgctttccccatccattcgcaaacccttattggcgacaacctcaggtgccttaacgttctttgcttcaccaacaactgcctgtccaacaacaggtttaggggaatctccacgaccctggccagcctccaaatcaacaacctcaaccgcctttcttctaccccttggtgctgctccccctcttctcccagcagcaccctttctgcccctgatagcagggggaggaacacgctttcctgctctctgtggagcaggcaacgctggtttcgcagcctgttccgctggcttctggtcgtcaggcttcctagacctcagacgtgcttggcgagtactgcttcgcagctctggcatcctctccccatgcaactcaggtcacctctccagccctctgggatccttccaatctccacatgc

SEQ ID NO: 18285 - DNA, 688 bp, Oryza sativa
atgcactttataacagccctcagcacggattgctcttgcttgtttgcattgctctgcaaggtaactagcattagattctatcaagcgaacaaaaaaagtctattaagtatgaaagtttaggcatgactgcaattcccaggttgcagggagagaatcttgccattattaacagcagaagtttgtgatgatttgctaatttgaattcactagcacaaggggttaaaaaagatagtgtgggattgataatggacgtaccccagattgaccactgctggtgcttgaattatctgaaacggtgcatgaagtcttcttcgagtccgccaggtaggacttcaagagaggaactggggggaacttctcctgaagaccagcctcgtacgcaaaattcacagcatcaagctgctgccccttagcaattagttcctcgataatatctgcaaaaaaatgtaattactagtctacttaactctggacttgatcatgattgattacttgttttcaagaaacattccaacatttcacccaagaaatggaaaatagtactgtacatatagaagcattaggtatgtatgatgtatcagcaaggtacccacaaggccacaaggacaaaaaagaaacccacaaccatagataccatgaatttggaagcaaggacaagaaatattagaactaattagatacagctaag

SEQ ID NO: 18286 - DNA, 1280 bp, Oryza sativa
tggcaaaaggagattggggactgttgtgacttgtgagtctagtttccaatatgttccttcttattaacgttatgcgtttacttggttgaggacccaatgattgaggatactagctgatgaccccgctctataacaagtatttttttttctgcaaagctttatatttggtaccacattattgtgtgtattgggttaactgcattttatctcacttctcacaaggaattaaatgcttttgccttttatttcacatcctctctcccattcttttctattggcatcatttttcccattatatacttatgttgcaaaatggtatcatcgaaatggaaggttatgatgattcatataggaaaaatcataaagtgactggtaaatggtttctcatcagtttgcgcttcgcattctatagtagtgtgaactcacttctgctttgccatgtttgaattatattgaacagatacagcttatttctatattccagagttgaaattttgcaatcatcacagcatacaaagttgcatgtagttccattcagtcgctatatttttattcatgtgctatataatgtaaaaaggatatccttatgcatttgatcttcctaataaattttatatttgctcaccctctttcaagattatctcaaagtactcattactatcatggattcatggtatctattgtaggattcattcctagatatcaggtgggctcaagtaaagttgacacaagtgaaagatactttgatgagtggcaaaagaagctgcccaatacagatgaaatccgcaagagcaagcctagatcaagatatttcacaatatctggggtggaactatccccagataatatggcagttgcaactgtgtattttgtgcaaggggttttaggccttgctcgacttgctgtgagtttttacttaaaagatgatcttcatcttgatcctgcagaggtctgtgttcccctctaaatgctatcttttttgttttggtattggtatttatttatgtaatctcattccacccatacagtaagttgattcctatataggtcttgataagtgatcaatatgttttctcccatgtagactgcagttatatctggcttctcatccttgccatggttgatcaagcccctgtatggctttatcaggtcttacaaaagctcctgcctacagttctttctgctatctgtacagtggtgtaactagaattctgctgttctttgcctttcagtgattccatcccactctttggatatcgacgaaggtcataccttattct

SEQ ID NO: 18287 - DNA, 4211 bp, Oryza sativa
  unsure (1)..(4211): unsure at all n locations
ccactaaagagcagttttggaacgacatctctcttcttcatctaaaaaacaagtataagcaacacatgcagcatcaagatattatcttttaatatgtatgatacttaaaacattatgttttaaggatacctcacatttttctaaacaaaactgtaccgcatttgtcacatataaaaataaaggaaaatgctacacacacgactacggcgtccgactgtcgtacgaccacagcgtatgcgacgtaagtgacgtgatctatttgggctccgttgtgattctccatctcattgggccttcgaaaagcccaagtcgaagctaagcagctaaataaacgttttctttgcatatcttgtgaaacagtgatcaaacttggttgtagtcttgtgatttcattcggtgaactaaacagaacatttgcatgttttatttttatttaagaattagaaactatgcctgtggtggacatcattgcatttatattttgtttaatgcaacttgttatagccataaaaatagaacttgaaactgtggtatatactctctccgtttcatattatagtcgtttgatattgatcaaagttaaactactttaaatttaactaagtttataggtaaatatagtaatatttacaatatcttgggttaaaaatgttactacttttttctataaacttaggttgaaaatgttactacttttttctacaaacttgatcagacttcaagctgtttaactttgatcaaagtcaaagatacttataagctgaaacggaggagtatattaagtgggtaaaaaaaacttgtctggaaaatgagcatttgtagctgtgaaaacattacaagagaatgttagagatcgaagttagcaggcagtgattcagatcgaccaaaactccagcagaactgtcatggagccatgtccgccatgttaatgctgtcttcctgagtttgggcttagagtctagacttgtatatggccttgcatggcattggaccgattcatgtatagagaacgccgtcacgttgttcgttgttgccgtttcagtcgtacggtagtcggatgatttgcgtcggacgtatagcagggttgaaaaataaaacaaatcacattataatttaaaaggtatactttactatctcaaactatttatttaggtattccactttgatcctaaataatttataggctcaattgaccatctaaactattaataatggtttacttaacccttaacccaatttcgctaggttgttttcgtcaacatggcaattttgatcaaacatgctgctagatcatgccaacgccaatgaactatttggcgatgaattctcttacttcttatgttacgcaagccatgattctatgagatcactacacacgtgtgcatggttatgacctgcattgatcttagcagcatgcttcattagcacagtcgctcatgacttatgagtagacgatttcgttataaatagccaacaagagagcgagcaggctangcacccgaaggcaaacatatgtttggcatggtcatcattgagaatagcggtgagattgctaatggatgggcactatattagagtgagaaggtaagggaccttgcataagcgatgaagcgttgaacatcacaccaagatagacgtggcgagtattgtctttcttggcctatatggctgaaattgggttgtgggtgacatgtgcaacccatgtgctatgacttggtagtgaacctcgccagctcattgatctgtttatctgtttgattaaaaccagtgccacacgggcaaatggcctagcaaaattaggtagagatccagtaaaccaatattaatagttttagggttggttgagcctttttttcttccataaagtggattacctcaaactaaggcactgtttaattcagcttaggatgattataatctggactattagaagtaagctgaaacaaacagatagcttattatgatagattattataatttataagctagattactataatatggtaatccactctaaagatgctctttttaagattactgggtggctaagagctaacaaacaattaataatctagggaaataaacggctaacaacttatactacgtccgcttattataatccagattatgattatagtaatctagctcaataatctagattccaataatcttaaactgaaataaacagggcctaaatgaggtaataaagtagacttcttttttcttataattaaggattagagactaacatatgtaagcaagggtgattcattatcttaagaaaaaaacaagggtgattgagtcaactgagcgtcatcctcctcactatcaatagataaaaatataaaatgtgttggagatatacaatattgataataatctaataatctataattttatactatagttattttagttagtgagggataattatgttgtcaatgttttttattctgaccgtggacatataagactaacctatcagcgttagggatgatcactcctcttttttaattggctattgttaattatatggtcaaatgtactaatttttgaattttccttttgtctctctatacataaatatctaatttatatacattgaccgtcatgaaaacgatagcacatcaacccgatcaacggacaccttccaataaaaaatatagtaaacagttgtgagagatactcacaattatttcaacgttagatagatcgacaatatactcattggcacgtggttagatcgttgcctcttgacatagagagtgatcacaagcgaaatatttattcggaattttggtatattctgaattgaaattgttccaaatacagtgctaaaggctaacattaaccacttccatattatcagggaagaattataaacggagatttccaaatgttgccaaaactaacactaaaaaccgtaatcaaattaggtaaaagggcaaatatctaatttcccattatttgtttgttctattcccagacggccgcaacccctcctctctctctccgccttctcgactccatcgattccaccccctactctcccatctcctctgcttccgatctgcgccgccgcggcgggagggtctccggcgaggtcaaggccccccccgtctccggcgagatcgtcgcccggaccctccacctctctcggtcggttcggggaggaggcgacgcggcccggccgacctcctagtcggatcggatcgaatcgaaggtatccggattggattggtggtcgtagattagattgggaatccgtccttgcctggattggtttccttctcgattattaataactcgtgtagtagtttttctttttttttcttcttttttggattgattgatgcgtggatgtggtgctaatagcggcggtttttgcgtttgcagtggagaagattgggggtttaggtgaaatcccatgccaccggttgcgtccggctccggccggaagaggcagctggtgctggagtccagcgattcggaggcggatgagttctttgtctcgacgcggcgcaaggaggatgatgatgatgatgccggaaatgccggcggcggaagcggaggaggtggtgatcagggtggggaaaaggtggtgactgttagtcctgagaaggtttctggtgccaagtctactgatgaaggaggtggttcagacaagagcaagggaagtgaggtgggtaagagtgttttgcaacctgatgtgaagaggatcagaactgaggctgcccatggtggcggcagcggaagcggtgggagtgtatcgaaggatggaaccggcgggaaaatgctgcgcccggggttccccaagtggcgatttgagaagccggaggtaagggcagggcgggttcttgatgagaaaggtggggtcgagacgaaggtaagcagttcccaaaaggttaaggaccatgcatcgagttcggtttatgagagaagacggccagagccactgaaacctgagaaatcgacgccatcgaagactaaccaagaggttataagggtacaagggaaaagcggtgtcttaaagatccgtccgaagaacaataaggtggctagtgaaactggtgatggcaagaacctgccgaagaatgctaaggtggatggggatactggtgatggcaaagttctgccaaagaagactacagtggaggaaaatggtgatggaaagattttgaccaagagtggtgttttaaagctcctcccaa

SEQ ID NO: 18288 - DNA, 667 bp, Oryza sativa
agcataagtagttaccaataacaccccagagaaaagggacgagcatagcagcaattctgcggatgcaagttccacttccaagatagatacagggcaggcagagcaaagatgtgaagtttgaagtaaccaggctctcgaagacgtcctcgcagacaacgcccttggtggacctgctcatctgcagtgtcagatacttgttcttggggtacacatgcgtccccaacagcttcatcctcccctgaaacattcattacccacccacaacatacatatcataccatctcacctacctgacggaatagatagatagatagatagatataggatacctgtgggaagtcgaggtagagcagaggatttttggtgccaagatcagcgagctcgccgacgcggccgcccgaggcagcagccgcgggcgcgaggaggccggggaatgagaagaggaagcggctcttgcgctgcccgccgcggcgcacgatgtcgcggccctgcagccgcgacacggcagtggagggcgcgagcgccgagcgcggcgccgccggctccccgcgctggagtaagccattagagaaggcgagggagcggaggcggcgccgctcgtcggcctccgcatcgccggcctccttcttcttcaccatccctcctccctcctccttcttgcccttct

SEQ ID NO: 18289 - DNA, 553 bp, Oryza sativa
gagcatataccagccatgtcttcttcaaggccgagggtgagcgcgaggcggggcatttgtcggcgccacgagaagctgaccacaatcctgcggtaaatcccccggtcctccctctccgccacggcgaacgtcgccacgtgctgcaggaaggcgtgcgcgtcgggcggcttggtccactccaccccgcccttgcgctccgccgcctccttccactccctcgccatcccccgcgcgcgctcgcgcgccgcacgcggcaccagtagccttgccgccccaatctccgggtcaggatcggccagcgccggcaccgccgcctccaggatgagcacgcacgcccaggccaggtcggtggggttcttcgcctcgcggcggtccacggggaacacgtcggcgaccgcgtccatgacgaatttggctggatccacgcagcacttgagcgcgggcggcatctcggcgcgcagcgcgtccacctccttccgccgcgcgaccacgaacccgaagaaccccgcggagtccatcctggcgcacatcgccctcaggctctcggccaccc

SEQ ID NO: 18290 - DNA, 866 bp, Oryza sativa
actagtggatcccccccttgggggatgaggaatgcctccacggagctgagattcaacacccgttggatcactatcttgaagtcctcagggtcccagtcccatttgcgcccatggtgggtcctcatgatgtcctcgggcccggtgtactcccaggcgccccgggcgcaccgctggggtggcgcgatccggtgacgaaggtaatcgccgtacaccatggcccccgtaagcccctgggatcgcagaccagccaggcggtcaagaacggcgtcgtagccgtctcccagatctaccggcgcccgccagctggaggcctgcgccgggggctggctcggaagtcggaggcgcgcttcgtcggcgagaggggtgttgaaccagtcgctcttccagtcgtcccacttcttgtgaaggacgcagggaatgtagcggttcagcaccggcccccgcggctggaagtagcagccaccaactaccgacggtggcgacaccggctgtacggtgaagaaccaccggaactgccgaagagatgggcgcaccccgatgaacatctcgcacaggtgcgcgaagatggccaatgtcattaccacgttgggggtgaggtccgccatctggagatcataaagctccagaacatccatgaagaaagaagagaatggcgggaccagccctgccattgcgaaagagaggaagaagacggaccgccccgggtagtgtggcgccgggcgtccctcgcccagcgcgaccacctcccggccggtggcagattccggcatgaatcggcgcggcagcccggcctgcctctcgctcacgatgcgagaaggcggcagcacgctaccatcgagcggtgcggagccccgtgccatgacgcc

SEQ ID NO: 18291 - DNA, 839 bp, Oryza sativa
  unsure (1)..(839): unsure at all n locations
ccagaccacacgaatcggtggtcttctgnacggcaaataggaagacgcggtcgtctccttcctgcgggcaaacgcngacgtcttcgcctggagaccggctgacatgcccggggtccccagagaggtgattgagcaccgtctcgccgtgcggccgggcgcaaggccggtccggcagaaagtgcggcggcaggccccggaacgtcaagccttcatccgcgaggaggtggcgcgacttctggaggccggattcatccgtgaggtcctccatccggagtggctggcgaacccggtcgtcgttcctaaggcgaacggcaagcttcggatgtgcatcgactacaccgaccttaacaaggcatgtcctaaggacccttaccccctgccacgcatagatcagattgtcgactccatcgcggggtgcgaccatttgtgttttctagatgcatactctggttatcatcagattcgcatggctagggaggataaggaaaaaactgcattcattacccccataggaacttattgttatacgacaatgcctttcgggttaaagaatgcaggtcctacttttcagcgtactactcgaatttctttgggtagccaaataggacgtaatgttgaggcctatgttgatgacttggttgtgaaaacgcgcaaccaagagaccttactctcggatctagcggaaactttcgaaagtctccgctccgcccgcataaagctgaacctcgataagtgcgtgttcggcgtgcctgcgggcaagcttctcgggttcttggtctctgcccgaggcatcgaggccaaccccgagaagatacgagctatagagcggatgcgccccc

SEQ ID NO: 18292 - DNA, 801 bp, Oryza sativa
aaacaacaactactccgtagtagtgtactactccacaagcgattgaaagccaaaaaaaagatactactaattgattgattggttgattgattgattaaggggatatatgtgaatgaagaatcaggcccagactctcttcttggggataaggtcgaccgtcttgaccttgtctatgcgagccgcgacgatgaagtcattgacggtgaggccgccggcggagggcgtctgcagctcggccctgacctggttgggggcctcgaagacgacggtggccggggcgccgtcaaccgcggcgttgatcctggcgacgagctcgtggccgcaggcttcgtccctgaccttccagacgcactgcagacgcatgccgtcggcgtcgtcgaggaggcgccagccaaccaccttgtggaggaggcggcgggcgtcggcagcgtcgacgggcgcggggttaggctcgagggggaggcgcgcgatggagagcacggagagcgtggggatgaggatgttgtggagggtgtcgacgttgcccagcaccctctcgccgaagttgctctcgatctcctccgggaaggggtcgcgcgcgccaaagtcgcccagcaggtcggccatggccaccaccacgctcttttgcttcctccgcacggcgagctgatgaggcggcggcagaggaacccgccgtccgaagcagcagctgctgcggctgccggcgcgaggatgtggttggtgagcgccattggattggattggaatggcgatgaggaacagctgcagccaccagtccaccactccactccagcagcgagc

SEQ ID NO: 18293 - DNA, 652 bp, Oryza sativa
cgtgggtgatcataggtgcaagaatattatctgtctgccataataaatagagcaacataataatttaattatttgtttctattattgatcgacccgtgaagttcaatacacatgggacatgggatgaagaggttatacctggatccactcaaagccaaggtagaaagccaagattccttcaagaagaggggaatatatcttcctcatttgccgcctttcataccatgctgaaaaatccaaagctggagagttcagtaatatatctctgtagtgatgagcatatgactgctactagtacgattttgctactgcgactgcactagctagaacaagactatatatacacctgcaaatagtttcttgagattctctcgcccagtatttgaacgcattgctggtgtcaccacataagtaggatctgcaatcatacaaatatatcacaacatgtatatatatatgtcacacttggtttcaagaatcaatgccacttccttccaaacagaaaagcatgcaaattagagtcacctttcggggcagtagccacataatagagtgatcctgtgagagccgcagtgatggctgctgcaaacgtttgagcaaatggaacaaatggaggcaccatgccactctacacatatcaatcagcacagtt

SEQ ID NO: 18294 - DNA, 1068 bp, Oryza sativa
cgagcagcgcacactacacgggctgcagtctgctgcaagccgggagaaagctgcatcaacggagctcaaccaaatggctgaagaggccagacggcgtgctgagattacaaggtcagttaagtcgttatatatatatatatatgtgtgtgtgtgtatgtatgtatgggagtctttcttcaattgcatatgctcgatctgctgctcacgaaatgaccgacatctctttcaaaacaaaaataaaattgagtgacatttgtttccacaggttgagggaattgcacactctgaaaggaaaggtggaatctgtggctaaactgaaaggaatcgacttggaggatgtcaacaatcaacactacactgtttaacctacaacacgacaatgcattatgcattatgccatctctgaacatcgatctgactccctagacagtagtattgtttagtattttcctttcccatcccatttggtttattgcatgtggatcgaacatttactctcctcgtaataaagttggatttattgtacctcactcagatctttgcatgtactactatactactagtagtagtccatgagaccatgaggcaggtaacgttgacacctaatatagagtataatggtattcttaagtttttggaccatcagttcctccttttgtttttggatgatccatcagtcagtggtctttgctgtagctagcctagccataccatagtggggtacaagtacaccacattaataaacaaacctagctcctgttgtttctctctgtatgagtctgcaggttgcttaggttagtataatgcgggtacgcatactcttgtagtagtgatgcgtagtgcctgtccacgccatttttcaatgtcaacctgtactttgaggtagacctaacacacactttgatcaatttaatcatatacagtaagtagttgttgccatgctagtaaactttatctattgaaccagctaatataagtactactccctctatttcagaatataagaaaccagatattttttattactacgaatctgaatatgtattagcagtttaatgtgtccgctca

SEQ ID NO: 18295 - DNA, 6288 bp, Oryza sativa
tttttttggcaacaaagtgaacagtcccaaacacattcttgccattgctaccataccaaatttagaaaatccggaatctaaactctattgatatccgtaagactttaaactaaacgtgtttaatagtactaaaaaattgttatatttttagactaaagtagtagttaattatgaaacgtttagaaaatatatttataagagtggattgtatgtacatggaggcatatagagacaggtatttggtactagtggtactagtggcataaagagaagttatgtttggatgaggtgatgaaggggttgggttgccggcgagcgacgaaagaaagaaagaagcagcagcagcgggtctcgtctggtctggtagtaactaggagtagtagacgggcaccggcggcagcagagtcaccttcctttcatttcctttctcttttctctttctttctctctctttcttggtgttggaaggcgaaggcaacccagggggggaagcaccggaggagccgcagatcccgccatgcgggtgctcccggcgtcgtggtcctccgccgcctcctcctccgcctccgcctccgcggaccgcctcaactcccccaccccggcgccgccgccgccggcccctcctcctcctgctccaaaaagcagcagcagcagcagcgcggagctgtacctcaacatctacgacatctccccaatcaaccactacctctactggttcggcctcggcatcttccactccggcatcgaaggtctatatcactctatctccttcccccttccttgtgcgtagatttaccttctctacgccacgccacgccccgccagggaccctacctctaacctggtagtatagtaggcgtactccagataggtcaggatcgaggtaccaccacacctacatgccttgccgtatgccgtatgctgcttgcttccttcgggacctgctttgctcttctactctggagtactaccttactagtaccattttcccccttttcttttctttctcttgtattattattaatcccaaccaacaattctcatgctctacaattcaccacatcctataagccccccccccccccctacacggcacacgccaccaattcttgtgtgtgcctaccgttacttctaattagaaacaacatgtgcaacttaccctaacaccctgtcaatgccccaagtccgactctctaccaggcaaggttcacattacttgttgaccaccggatttatcacgctttgggacaaaattctgcctgcattttgatcaagtttactgtttaccatttgaatttgtcaaaaccaccaaatattccaaccgaaaattgatttccatccgcatcgaaacattgaaaacccgcgaaaaccaatcggctttcattggctctgcgaaccctgctctctacgcgcagcctgtatgtgagctcagctgttcaatcgcctcatcgagacttcatttggtctccaaatggagtacaaacggcacaaacctaagcagtattgctttgctatatccaacttttaccccccccccctttttttcttttgctacacacgtatctagcacatttgctatatattacttgtgggctggaccaactgttatttgttctaaggtcttcagtctgctgatgccttagctgctcatagaattcccatgtttgctttgcaaccattactttttttttggtttgacatccagggatcagcacctaacaactccaataccatttgcagtgcatggcatggagtatgggtttggagcccatgaatacccaaccagcggagtcttccaagtagagcccaaaagctgtcctggctttatcttcagacgctccgtgtgcgtgggttccactgatatgtctcgttcggaagtccgcagtttcatagaggatcttgcagaggattatcacggggacacttatcatttgattgcaaagaattgtaatcattttacagcagacatctgcaagcgtctgactggaaagccaattcctggatgggtcaatcgacttgccagattaggtttgcttctgcaacacaaactcataacctattgttcctcgattttgatgattctaaactattgctgggatcgcaggttctttctgcaactgtgtactgcctgaaagcatcaaggtttccgctgtcaaagatgtaaccgatccccccgagtttcctggtaaactctctctctctccctcccccagttagtgcgtatggatggattcaattgtttattttcctgcacacatccatttttgggttggactgcttatataaattaattacctaagatgtttctaccagtccaagcacatgatttgatgttgacctttctaggttgtactgcctgggtaaattattggcatatgcttccttcctccttttgttcttctagttggctctatcaacattgcattagctggtcatactcaaatcatttatttataccacatttcctcccaacgtgatgttgaattagtggagatattttcccgaggtttgatgtaatctagctgcatcctaatattcgagcgttaggtttcttatatgcttgagtttaacatctcaaaagttatgcaattaacgttagtgaagtgccatgctatgactgactaacagtatagttactcttgtagtcttttgtttatattccatatataatccaataatcgatcttagttataatgattaaccgaattaatcaaaacattctgctaatacattcaaatcgttaaccgtttcacaagtagtgaactaaatttcttattattagagccaataatttctacaagtttggaaccatttaatatatcctaccggtattttctatgaatggttagacatcatggaagatcttggtaaacctagcatggccgtgagtttaattgccattttcatattctgttttccatatgaacatatgatgtgaattatacacactgtaacttgtcatttgtaattggtaagattctgttgctacagatgatgatatggagtctaatgcatccattgttgacggaagtgatgcggatgatttagaccatcttctaataaccccaagtagcgatgttgtatcttcaaaagataagatattaactcctggcagggatagcttgtaattgcatgtattctccattgatatagttcaagtattacttgtggggttgttttctgaggatcaatctgatgatttcttgctgagtggcgatgtggctggaggaggggtatgctgtgggcagtcaaccttgaatagttgaatgtataatccatgaatggtaattctgtgtgtcttacactagaggtagtgaatgtgattgtctaactgtggcgaagggccatgtttccattataagtatatgctgttttgagagaggggaggggaggggaggagtgcgttgacagtgtggtatgtatatgctgtaactagttggagaatgattgacttcatttgagttacctaggtgggcttcctgttttgttttgttgtgtgtaactgatttgtttgtacaaatgaatgatttgcagttgtggaagttgaatagatgttcggtccgtctctctgttgttgttctgcctgctactctctctctctctctctctctctctattgtttgagagggctgatgctttactggagtaatgtagccgtcttaattgttggcgaaccaaacagatcgcttgctatgctttgattcaacaagaagtgttgggcgcatacattatcctgcctattgtcttttgtctcttcttttatcttcttttttcctttatggcaagtgcgttcttatcccgtctttaactttaggaaaaagtacgaattatcctccgaattattgaggtcgatcgaattatactctcgaactcaaaatccagacattctacaccctcaactattgaaaccggacaaataatccctctaattcaattcggggtggttttggattcacgtggcagtccagtcagtatttttttaaaaaaaaatcagtggaccccacctgtcagttcttcacccctctctatctctctactctatcccaatgtctccctctctacgtcagtggaccccaccaatgtggcggccacgcgagggcgggagccgacggcggagggcgccgggaagcgtcgaggcgggagttgagcgtgcagatgatggcgccggccattgggatgccgaagtggagctcgcacatcactggaatattctacgcgaacaccgcgacctgcacacagagacaaccaaccaggcaacgatttcttctgaaaatacgaatcactcagctgctaattcggaaccaaattagaagattcaacaagtaaattctaagcgatttggttttttttagcatgaaaaattgaagaagggggagatttgggagaaaaatccaattactgtattgattggcggcggcgaacggaggtcaatcttaccacgtggtggcggtggacgtcgagggcggcgagggaggcggcgaggcggaggcagcggtctcgcgtctcccgccaggtgcgcgtgagtccggaggaggaggcgacgatggcggggtggtcggggtagacgagggcggcgcggtcgaggaaggtgatgggggtgagcgacgcgtggttggcggcgcagagcacggcgccctccatcgccgccgtggtggacgtgggcgtgtccggtgaactcgggacgacgagatcaaagtcagagagacgagctgaggtgaggtgaacaagggcaggcgaggccacgcaaaaggtgagggaagagaagcttgttttatgacgacaaggcagcagcacaccacgacgacgctcctcagccgcctcaacctgcacggcaacctacgcgggcgagctctgcctcccgctgctggccgcttgctccgcctccgtctcagccgcccggcgccctccaccgccggcagcgccgcctactcccgccctcgcgcggccgccgccatgctggtgagaagagagagagagagggagagattgggatagactagagagagatagagaggggtggagaactgacaagtggggcccactgatttttttaaaaaaaatacttattggactgccacgtggacccaaaaccaccccggattgagtagggggttatttgtccggtttcaatagttgatggtgtagaatgactagtttttaagttcaggggtgtaatttggtcgacctcgatagttcaggggtgggggtaattcgtactttttccttaactttaattgttattttacctccacattttcaagtaaaacttgtattttgcctctgttctgttaacaagacttaatcatgcttttaagtttaagaattcctgtaattgggttgacgaagccctaattttcttgctgaacgttctagtgaacgatgtaattatgtttgtagattaataaagcgcgccaaatggcttccttaaaaaaataagacttaatagtatttaagtttatgtcaaccttgtgctcgatccttttcttttttacattaaacatgtgaatgtcaaaacagatgtcaaattcatgtgaaaaatataaaatatttggtgtcaaaatcatcaattatttccaaagacgaataaacttaaaaaccaactcaaatatggatgacataccaaaatactggcaaaaacatcttcaatttttataatagtagagataggggttaggagtaaaataaaaaatctcagatttatactcctaaaactattagaaattttatctttttttgttacggctaaaatattttaaaattaaggtcaagattttatacataaatgtaatactattgaaagtttatatacatttttttctagagttttagatgatatttgttagtaggtgtacacgatgttacacataaagttttggtggttatgattggttaagacgattggttaagacgagggataagtgggagattatgaaacaaaaacctaaacattataaataattatatgttaggatggaggggttatatattttaaatattattaagtcttattaataatagagtaggggcagaataaacttggtttacaaaaaatattgaaaaaatgatgaagttggggtatcattttttgtttgaaaggttcctggtgggccaagggggagcgatcggatcaggggaccacctagagaataaggggcttcgtctccccacgcttcccattttctttcatttgggttggagaagttgggggttggggggttgggcgaggaggaggaagaggagtacaagaaagaaagaaagattagtagtagatggccgcttattccctcg

SEQ ID NO: 18296 - DNA, 741 bp, Oryza sativa
agaccagtgcgccaaccatggtgtcgccaagttcacccgccttctcgccgaatggtccgcctcccatggctactgcctgtactactacactacactacatctctctttctttctttttcagtttccttcccttctcaattagattaattaattaattaattaattacttgtgctactgcctgctaatgatggaaaacgcatagtgaaatcggaagtggaacatgggactcttggttaatgcctcttcagaaacaggtccactacttgacttcttcaatctagctagcctaggaatcttgtttacctactagtaccagtaataaaaacaactctttctatattctttccacatagtactaatttctccctcatgtctcaacaggctgatattgtttgcagtaaggtgattcaactttcccttttggataataccttcctacgctatgatgatgtatgtatcatcactggattgtacccttttcttttccaggtaaaagaaatgaaggaactctccaatggttacaatatagttggtctttcacaggtatactcttgcactgctgtctgtattgtttatggttcgcgccacttccttttaccaactgcaatgctatgcagctgttttttttccacctgctgtatattctctaagaacagagcactagttactcaaaacattacaggaagaaaaatgattccatatcaatcgttaatctaatttgctctctgtttttgtatgct

SEQ ID NO: 18297 - DNA, 2410 bp, Oryza sativa
  unsure (1)..(2410): unsure at all n locations
gggccgtttatctggacagaggaggctgagcgggccttcacttagttgaaggcgtacctcagttctcccccagtcctggtcaccccggagccagatgagccgctgctactttacctggcggcaaccccgcaggtggtcagcgcggcgttggttgtggagcgcgacgaggacaaccctcaccccgcgcatccccaccctgtgtcgactcgacccgggagagagcaggcaggagaggcccccgagtcgaacggcggcccgaggcccccgacggccggagttggccctccgcccgcttgtccgacggtgccaggcacccccgacccccaggatggccccggggccactgcgggaaggccgcgcctgtcaccctccgaccccgaggtcgtcggcacagaagccgagtgcgccccgcgcggcctctcggacgaagagcgccctagagatgcggcccctagcgaagaggatcggccccgccgaaaggtgcagcggcccgtctacttcgttagcgaggccctccgggacgctaagaccgataccctcaggcccagaagatgctttacgctattctgatggcttcgaggaagttgcaccattattttcaggcgcatcgagtcacggtggttacgtcttaccccctcggccaaatcttgcataatcgagagggtactggacgggtggtgaaatgggcaatcgaattctctgagttcgatttgcactttgaaccacgccacgcgatcaagagccaggccctcgccgactttgtggcagagtggaccccggcccctgagcccatctccgtccccgaggccagctcgggcccctcgcagctgcctcacaccgcctactgggtgatgcagttcgacggctccctatctcttcagggcgccggtgcgggggtcatgttgacctcgccaaacggagacgtcctcagatacctggtccgcctcgattttcgggcgaccaacaatatggcggagtacgagggactccttgcgggactcagagtggcagctggactggggatccgccgcctcctggtgttaggcgactcccagttggtcgtcaaccaggtctccaaggagtaccagtgctctgacccgcagatggacgcttacgtgcgccaggttcggcgtatggagcgccattttgacgggatagagcttcggcacgtgcccaggcgggataacgcggtcgccgacgaactctcaaggctcgcttcctcgcgagcccagaccccaccgggcgcctttgaagaaaggcttgcccagccgtcggcgcgacccgaccccctaggggagacggacacgcctgaacggcccccgaggcccgtcggagtccaggcctcgggacccgaggggagcgttcccggctcccctagattgattgcttggatcgctgaggtccaggcatacctcacagataagactctacccgaggaccgcgaagggagtgaacgcgtccagcgcatctccaagcgctacgtgctggtggaagggaccctctatcggcgcgcggctaacggagtcctcctgaagtgcattcctcgggaacaaggcgtcgagcttcttgccgatatccatgaaggcgagtgcggagcccactccgcctcacgcaccttggttggcaaggcctttcgccagggtttctattggccgacggctctcaacgatgcggttgacctggtccggcggtgcagggcgtgccagttccacgccaagcaaacccatcagccagcccaggccctgcagaccatacctctttcatggccgtttgctgtctgggggctcgatatcctgggtccgtttaggcgggccccgggcggtttcgagtatctgtatgtcgctgtcgacaagttcactaagtggcccgaggcttacccggtcatcaagatcgataagcactccgcgcttaaattcatcaggggcattactgctcggtttggggtgcctaatcgtatcattacggataacggcacccagttcactagtgaactcttcggtgactactgcgaagatatgggcatcaagctctgcttcgcctctcccgcccaccccagaagcaatggccaagtggagcgcgccaacgcagaaatcctcaagggcctcaaaaccaaaaccttcaatatcctcaatatggaggagttgccagcggtgctctgggcgaaccgaaccacgccaagccgagcaaccggggaaacgcctttcttcctcgtctacggcgcggaggcggttctcccatccgagctcaccctgaagtcccctcgggccaccatgtactgcgaggctgatcaagatcagcttcgcagagatgacctcgactacttagaagagcgaaggcgggcgcgcggnncctncgagccgcgcgctacagcagagcctgcggggctaccatcagcgccacgtncgggccc

SEQ ID NO: 18298 - DNA, 21054 bp, Oryza sativa
tcccggacctgcgcgcgcgcgccatcctcggttccagaagagaactcgtccagcgctgcccacggggagaagtcagggtccctggcctggtagcttgccagtacgagctccaccgccccccgggcgaggtccctcgaggatgacttgatcgtctcctcgagctcctcggggagccgctggagggtcccggccatctctgagaggcgctgggcgaggcccccctggttggcggcgtatttcgcggtacgcccgccccagaggcccgcctgccgcccggcacggtctagacgggagacggcgtcccgaagcatgctgggccctacctcgcccgtcaagcggagggcttcgacctccccggcggatgagtccagcgcgccctgcagctcggcgatggtgtgttcggcggctgcgaggcgggcggctaggttgccgtcgcccgcggccgccccgccgctgcgcgctctcgcgtccagctccttcgcccgcgcctcgaattcagcggcccgctgatctagtgcggccctctcggcgcgggcgccttccagattgaggcgcgcctgctcctcccgccgctgcgccgcggcctcggcctcctcgagagctcgctcccgctcagtgagctcgtcctcgcggaggcggagtgcggactcctcttcggcgcaggcggcctcgtgcgccgccagcgttgcctcccggatggcgacggcggcctcgcgacccgccagttccctctccttcgtgtccagggcgcgggcgcgctcctccagcaccgtggcgcgagcctcaagggcctcttcgcgttgccgggacgcgtcgagcttcttctctagctccgccgcccggctcccgtattggaggcagaggtcgtcccgcgccgcgttgaacatggcggtggcaatgagggcagtctcccgctcctcctccacctccctggcgatctccgccaggtccctacgacgggcctcgagctctgaggcgtgccggcggtgtgccttgcggcccgcctccaccatggcttccaccgagcgccgcccctcttcgacgcgtgcccacgccgcatcgacctccgcccgctatgcctgcaggacctccatctgggcgcttaacccgtccaacaccgtggtgttcgcagcggccaaggcctgcaggaggggctctgcgctcaatggggcagcggaaggcagaggggagagccgcctcggtgtgggcgctgcgcggctcggcccgccgatcgacgtgccgaactcgggggcgtcccccgaagcgggctcgtcccgaacgtcgccagaggggtcgggcccgagcggcgcgcccgcggcctcgtcgtgggtggcctcggaagtcgttgtcgcctcgggcggagtcgggtcgggggcttggcaggccgcccggcgtgcgcgcgccgcctccgtctcccggacggactcctcggcccggcggagtctggcctcctcccaaacggcttcctcagcctggcgagcccggacggcctcctgggcagcttctttggcttcccggaggcggtctgcggcttctcgccggtcagcttcccgcctccgggcctccgcggtcgccgtctcctcggcctcagaccggccggacttggaatggcgggaagggcgcgacgggatctcgctgaggcagaagaaaaaccagaagacgaaaaacgggtgagtgaaaacttgccttgggagatgggagaatgaatacggccgcagtgggcgcggggacgaacctgcgaggaggtcggctaaacgaccaccttgggggggagatgaggtttccccggcatggttcggtcccccccatcttgcggagccgcttcttttttcgctccccctcgggctgcgacgtcggcacagcaccctccgggcgcctgctgctggcacgcaccgccccgccccctcagggaggagatggggagggggtatcctcctgtttcctcttcccccgggcgtcggcagggcggctgccccccgggcccccgtcacggggcccagaatctcttcccctcccggggtagattgttcccccctacggctcccgcccgcgccatcgtggcctcgaggagcccgctcccctgacgccccgaccgcctgcatgatggtcaggatgttggcgcgctctggatcgctgcagagggggaggacaccttgggggatgaggaatgcctccacggagctgagattcagcacccgttggatcaccatcttgaagtcttcagggacccagtcccatttgaccccctggtgggtcctcatgtagtcctcggacccggtgtactcccaggcgccctgggcgcgccgctggagcggcgcgatccggcgacgaaggtaatcgccgtacaccatggccccgtgagcccctggaatcgcagaccagccaggcggtcaagaacggcgtcgtagccgtctcccagatctaccggcgcccgccagctggaggcctgcgccgggggctggctcggaagtcggaggcgcgcttcgtcggcgagaggggtgtagaaccagtcgctcttccagtcgtcccacttcttgcgaaggacgcagggaatgtagcggttcagcaccggcccccgcggctggaagtagcagccaccgactaccgacggtggcgacaccggctgtacggtgaagaaccaccggaacagccggagagatgggcacaccccgatgaacatctcgcacaggtgcgcgaagatggccaacgtcattaccgcgttgggggtgaggtgcgccatctggagatcataaagctccagaacatccatgaagaaagaagagaatggcgggaccagccctgccattgcgaaggaaaggaagaatacggaccgccccgggtagtgtggcgccgggcgtccctcacccagcgcgaccacctcccggccggtggcagattccggcatgaatcggcgcggcagcccggcctgcctctcgctcacgatgcgagaaggcggcagcacgctaccgtcgagcggtgcggagccccgtgccatgacgccggcggaggaagggcttgagagcgagtgagtgcggcgaggatagggcacaggaaacgagaagttagagcgcaagcggtgaaggcaaggggaataatggcgagaggaaggaaacgaatctcttcctcggcgtctttataccctcgccaacgctatgcccggctcctcgcttcccgcgccaactatctcgcccctcgtttctcgcgcccactcctccactaatcccgctcgcccgtttgcggcgcacgaggcggatgtgcggccgtggcagtcgagatgggacatatcgtgcgcgcgttaactacgctcgccgaccgatgcaccatcatcacatctccaggcgagacgaaccggctcgtcccgattcgcgcgctactcaagtaatgtagcggtcttgaagaaagccgctcattattgtcggtcgtttttcccttgccgatgcgcgcgatttgcgaccactggattcctgcctgcctgtagacaccggccccacctgtcaccaggcctaaggagtggcgtcacgcccgagcgctttcctcgaggagggcgatcgccctggcataacgccgggggctactgtcggtgacatgggaccgagggtatcttgactagaggtttgcggcagccgcggtcacccacgtggcctgaccccctcgggggggggggtcgggcccgagggtgatgtggccgcccctccctctgtctccccgaggggtcgggccgctcccgtttcggccccgagggctggggcgccccgaccccctgtgggtttggcgccacgtgtgtgggttaggtgagcacagcagcgctcacctaacctcgtttattgcgggttggacgagcgccccacgccgcatttaatgcagcgcagcacactcgttcggtccgtgacaggtcacagtgtgtggccggtcacagaccggtcatatcgcgggttaggtggcaacaggcggcctttcgcatgcctcgccccgtcccgtcggaatgatgagaagcctctaggcactcgtccctagccggagccggcgtgctaactcctggagttagcacgtcagtcccggctagattcataccaggcttcatcgcaaccattacaaggaagtcattttatgaagaagggctgacgtgtggcatgctaaactgacgcgtggtagacaagaatgaccggtttgtgactggtctgacgccggtcacgtcatcggcagacaaccgtgctcccacgttgcgcctgcttccggcggagtggaggtaggtatggcccatcccatcggagggtcattcggatagcagccatggcaaatctccgcccattaatgagggagtaacagggagatccccggtgtcaggcgagtgatgacgctgggcctcactcaaagacaagctgtgatttagcttcgaggcgaaggcgcaagccagttttttttttggaagatagggtgagtccccacccaaaagaagagtaggtagaagtggtgcatgtggtatccccttgagatataaaaggaggaccttgcccacttaagagaaaaaagaaaggggagaacacctgagctggtagaggagagaaagaggaagagggtctctagagtttgaactctcttgctctccagctctttgtaactccttcatacacagatccaccagaacacaggagtagggtattacgcttctcagcggcccgaacctgtctacatcgcccgtgtcttgtgcatttgctctctcgcgaaacattccacagatcgagggcttagaacctcacctagctcccccggccgaaccggcaaaggggggcccgcgcggtctcccggtgaggagccccacgctccgtcaccttgtcattcccctttaaatgaatggagactttttgcggtccatctcacgtggggggggctccagacgatgcattgatgggacggggcatacctgcccctactccgccgagcacagggcggaacgtgggggcaccaccgcccgtccgatcggacgtgaccggcgacaggccggtcacaatccggtcacgcccgattgatgtgggtcaatcgggcaacgccgcacgtccaacctcaccgcattaaatgcggtgagggacggttggggcgctgcgcattgatggtggttcagcctgggtctccgccccactgtaggatcaaggaggccgactagagggggggtgaataggcggttttaaaacttaatggcacttaaacaaaactaacctaagttactaggcaaggtgaggtgcaaggttaactaagcaactaagttaagttttgcaaacctaagtgatatgggctcaaatatgtctctatgaatgtaaatagcacaaatgtaaatgcaacaaataaatgagacaagagacaaggaatttttcaccgaggttcggaaactcgctggtttcctaatccccgttgaggcgagcccaactccaccgctcaaccacgaagccaccgcacgcccccttcgtcaaggggtgggcaaggcgggagccggcccatggagaggactacccaagcctcgatcactcggggtagttcttccttcactccgaaggtggtgaactccaaaccactcacaaacggtgccgggcctcctccacaatctcctcggagaggtcaccgggcaacacctccacaagccgtctaggaggcggcaacctccaagagtaacaagtctaggatgcttgccgagtatgatcaagtgccacactagctataacaatgaagcaacgcactttgacggagcgtggggctcctcaccgggagaccgcgcgggcccccctttgccggttcggccggggacgctaggtgagattctaagccctcgatctgtggaatgtttcgcgagagagcaaatgcacaagacacgggcgatgtagacaggttcgggccgctgagaagcgtaataccctactcctatgttctggtggatctgtgtatgaaggagttacaaagagctggagagcaagagagttcaaactctagagaccctctccctctctctctcctctatgagctccgctcttcctttcacgagctccccttttcttctcccttttctcttcctcccgttccccccgtcctggtaggcatggtcctccttttatatctcaaggggataccacatacaccatttctacctacccttcttttgggtggggacccatcctattttgaccaaaacttggctcgtaccttcgcctgacaccgggatatccctgtccttccttcattaatgggcggagatttgcaatggctgctgtccgaatgaccctccgatgggataggtcataccaacctccactccaccggaagcaggtgcaacgtgggagcacggttgtttgctgatgacgtgaccggcgtcagaccagtcacaaaccggtcattcttgtctaccacgcgtcagtttagcatgccacacgtcagtttagcatgtcacacgtcagcccttcttcataaaatgacttccttgtaatggttgcgatgaagcctggtatgaatctagccgggactgacgtgttaactccaggagttagcacgccggctccggttagggacgagtgcctagaggctctcatcattccgacgggatggggcgaggcgtgtgacaggccgcctgttgccacctaacccacgatctgaccggtctgtgaccggtcacacactgtgaccggttacggaccggataagcgagcgctgcgccgcattgaatgcggcgtggtgcgcttgtccaacccgctataaatgcggttaggtgagccccgctgtgctcacctaaccaatacacgtggcaccaaaaccacagggggtcggggcgtcccagccctcggggccgaaacgggagcggcccgacccctcggggagacagagggaggggcggccacatcaccctcgggcccgacccccccgagggggtcaggccacgtgggagaccgcggctgccccaaacctctagtcaagatacccccggcgttatgccagggcgatcgccctccttgaggaaaacgctcgggcgtgacgccactccttaggcctggtgacaagtggggccggtctctacaggcgggcaggaatccaatggtcgcaaatcgcgcgcatcggcaagggaaaaacgaccgacaataatgagcggctttcttcaagacggctacattacttgagtagcgcgcgaatcgggacgagtcggttcgtctcgcctggagatgtgatgatggtgcatcggtcggcgagcgtagttaacgcgcgcacgatatgtcccatctcgactgccacggccgcacatccgcctcgtgcgccgcaaacgggcgagcgggattagtggaggagtgggcgcgagaaacgagggggcgagatagtggaagcgggaagcgaggagccgggcatagcgttggcgagggtataaagacgccgaggaagagattcgtttccttcctctcgccattattccccttgccttcgccgcttgtgctctaacttctcgtttcctgtgccctaccctcgccgcactcactcgctctcaaatccctcctccgccggcgtcatggcacggggctccgcaccgctcgatggtagcgtgctgccgccttctcgcatcgtgagcgagaggcaggccgggctgccgcgccgattcatgccggaatctgccaccggccgggaggtggtcgcgctgggcgagggacgcccggcgccacactacccggggcggtccgtcttcttcctctctttcgcaatggcagggctggtcccgccattctcttctttcttcatggatgttctggagctttatgatctccagatggcggacctcacccccaacgtggtaatgacattggccatcttcgcgcacctgtgcgagatgttcatcggggtgcgcccatctctccggcagttccggtggttcttcaccgtacagccggtgtcgccaccgtcggtagtcggtggctgctacttccagccgcgggggccggtgctgaaccgctacattccctgcgtccttcgcaagaagtgggacgactggaagagcgactggttctacacccctctcgccgacgaagcgcgcctccgacttccgagccagcccccggcgcaggcctccagctggcgggcgccggtagatctgggagacggctacgacgccgttcttgaccgcctggctggtctgcgattccaggggctcacggggccatggtgtacggcgattaccttcgtcgccggatcgcgccgctccagcggcgcgcccagggcgcctgggagtacaccgggtccgaggactacatgaggacccaccagggggtcaaatgggactgggtccctgaagacttcaagatggtgatccaacgggtgctgaatctcagctccgtggaggcattcctcatcccccaaggtgtcctccccctctgcagcgatccagagcgcgccaacatcctgaccatcatgcaggcggtcggggcgtcaggggagcgggctcctcgaggccacgatggcgcgggcgggagccgcaggggggaacaatctaccccgggagggggtcgtgcttctgggccccgtgacgggggcccggggggcagccgccctgtcgacgcccgggggaagaggaaacaggaggataccccctccccatctcctccccgagggggcggggcggtgcgtgccagcagcaggcgcccggagggtgctgtgccgacgtcgcagcccgagggggagcgaaaaaagaagcggctccgcaagataggggggatcgaaccatgccggggaaagctcatctccccccaaggtggtcgtttagccgacctcctcgcaggttcgtccccgcgcccactgcggccgtattcattctcccatctcccaaggcaagttttcactcacccatttttcgtcttctggtttttcttctgcctcagcgagatcccatcgcgcccttcctgccattccaagtccggccggtctgaggccgaggagacggcgaccgcggaggcccggaggcgggaagctgaccggcgagaagccacaaaccacctccaggaagccgaagaagctgcccaggaggccgtccgggctcgccaggctgacgaagccgtttgggaggagaccagactccgccgggccgaggagtccgtccgggagacggaggcggcgcgcgcacgccaggcggcctgccaagcccccgacccgactccgcccgaggcgacgatgacttccgaggccacccacgatgaggccgctggcgcaccgctcgggcccgacccctcgggcgacgctcaggacgagccagcttcgggggacgtccccgagtccggcacgtcgatcggcgggccgagccgtgcggcatccttaccgaggcggctctcccccatgccttccgctgccccattgagcgcggagctccttctgcaggccttggccgccgcgaacaccacggtgttggacgggttaagtgcccagatggaggtcctacaggcagagcgggcggagctcgacgcggcgtgggcgcgtgtcgaagaggggagacgctgtcgcgaccgagaaaattgccttttcccgaacgctagtgtattgatccccgtcccaggaaaagccggggtacaccacacaaacatgatacaaaaggcacatctttattatatcgataatatttacattattacaaaggcacttaaggcctgacaatcaaaaataaacagcagcggactagcgggcctacggctccatcttcacaggcgctcaactagggtataagccaggactccacctaagacatcttctccaaagcttctcttactgaaggggggggaaaagattgagcaagaatgagtacaatcacagtactcagcaagccacaccggagatgcataattaatgcaagggggtacaaggggataataatataggggttaagttttgcagtaaacagcatttaaaagtcacttagttgcccaaagctattttgtaaacacgatcctagagctatacaatattattaatcaaggccgtggacccacacgaacctgccttaacccaaggcctacgatgattcagaccgaactggcaacccgaccctgggtcccagctcgtcccaagccaacccaggccaaccattccacattttagttgttaagcaggttttaagaattaaaacactaacttgggtacattgctcggcttgcccataaccgagggcgcggctattcgaatagattatactctgatcagaggtgtacatctttacccacaagacacatcttcctcatgtgtaaccacgtgccacataccaccacggtataaggacggaagacgtgacatagttcccaacccatcctagccataaacaagagtaccgacccaaccctacctacggccggaacccccgggacaagtaggcaggactgagcccccagcagcaggacaccggccctgtgccatgacatctcgactaccgggccgcagctcgtgtagccttcatttgtcctagagatgtccatcgacccccgacttcgtccatctccatccgtgtacttttgtttataaccagactgagccacaaactaagccttacccactagacatgtggaagtacggtagtgctttgcaacagaggcccgagcttaatccttatagtacccgaggtacgactaacaaaacccaaccacgcacctcgagcccagcctaaaaccattttgggggttttgaatagagggggaggtgtgtgtccaattccaacataagccaaccattccatagtgtccaaatgatatgagaattcccaaagtctaaagttataaaaccacctaatgttgcctaattaatcagcgaagcatctacctaaattcatactagtggaaccatgaatagagtacccactagttggggttttgtttatcctagggtgaacaaggtaataataacaataataataataaggtcataacaaaggtaaataggcatggctagataaaacagtgataacgcgggaatttaaataaagcgataatgcaataattttaaagcaacataattttataaactgggattcaatatgttcaaggatgatgtgacttgccttgctcgctttcccaaacgccggcttcaacttccacgaagagcggatcttccgaagctgcagcgtctacacgaccaacggaaaagaaaaggcttttactctaataaactccatataacaagcagaaacaaagcacaaaaatgggttcttgacttcttaaggaaaaattagagacttgaacggtccaattccgagttcaaatggccaagttatggccatttgaagtttatatgctctttaaatgaatatttgcgaatttcttcatttaaattttaatttaaaatagatttattgcgtcagccgaggggaggggcgcgcggaccgggtccacggggggtggggcccacgcggcagccccacggtccacggtggaccgggcgcacccgggctcgcaccggccggcgccgtgggtcccacgcgtcagccgcacctaagggcgcgggcggctgacagccgggccccacacggcagccgcggggcgcgcccgaaggcggccacgccggcacagccgacgggaggcggcgcgcccgcgtccctatggtcgccggcggcggccataggtacggcggagcggcggccgagagaggggagggaagggggaaacgaatcagcggtccacggctcaccccgggtcgacggcgacgacgggaacggcgaccggagcggaggaaggcggcggcgcggctcgggtggacggggtcgacggtgctccggcggtcggcgtgcgaaacggaggggtggacgaggtcgccggggatgcggtgaagccgaaggtggcgacgccgaggcgggaggtggtccggggcgacgacggcggcggaccggagctcggcggtgacggcggagagagagagcgacggcgcgagctcgattccgacggggagagagggcggcgagtggcggaaacggtggagggaggcacggggaaggtttatatagggttgggagggggagagagcggccggacgagggggaaacgggcgcggaagatccggtcgccattgatggcgccggcgaggttaggagagaggtttccaaatgaatccgagggagagagggagggaaaaatggggggaaagagggagggaatcacggggaatatttccccccctcttgattgcacgcggggcggacgggggcggcgggattcacggcggcggcggcggcgctagggcgcgggcggggcggcgggagcggcgggaggaaggggatgacgggtgggccctacccgtcagcgagggaggcgggcgggcccgcccgtcagcggcacgcgcgcggggaggaggccgaatgggccgcggggagaggagagggagggggagggagctgggccggaccggcccaagagggagagggggagggaaagggaacttttttagggtttttctttttataaaacctttttaactttgtttatttcttcttaattattatttgtgctctgaaaattcaagtaaaatttgagggctccttttagaccaaggagaatttaacaaaaattctccgggccacattcgaatttttctggtacgtattttagtgtttgccaatttcttttcgaattttaatttaattctattattccttttagggaatgatttttatttcgggatgaatttatcaggacgtgacagacgctcggtggaggccatggtagaggcgggccgcaaggcacaccgccggcacacttcagagctcgaggcccatcggagggagctggcggagatcgccagggaggtggaggaggagcgggagactgccctcatcgccaccgccgtgctgaacgaggcgcgggacgacctccgcctccaatacgggaaccgggcggcggagctagagaagaagctcgacgccgcccggggggtccttgacgccgccgctgcccgggaacggcgggcggcggagaacgaggcggcgtcccggcggcgcgaagaggcccttgaggctcgcgccgcggcgctggaagagcgcgcccgcgcgaaggagagagacctggcggaccgcgaggccgccgtcgctatccgggaggcaacactggcggcgcacgaggccgcctgtgccgaagaggagtccgcactccgcctccgcgaggatgcgctcaccgagcgggagcgagctctcgaggaggccgaggccgcggcgcaaaggctggtggacagcctgtccctccgcgaggcagcgcgggaggagcaggcgcgccacaatctggaaggtgcccgcgccgagagggccgcactggatcagcgggccgctaagctcgaggcgcgggcaagggagctggacgcgagggcgcgcagcggcggggcggccgcaggcgacggcgacctagccgcccgtctcgcagccgctgaacacaccatcgccgagctgcagggcgcgcttgactcgtccgccggggaggtcgaagccctccgcttggcgggcgaggtagggcccggcatgcttcgggacgccgtctcccgtctagaccgtgccgggcgacaggcgggcctctggggagggcggaccgcgaaatacgccgccaaccaggggggcctcgcccagcgcctctcagagatggccgggaccctccagcggctccccgaggagctcgaggagacgatcaagtcatcctcgagggacctcgcccgggggacggtggagctcgtactggcaagctaccaggccaaggaccctgacttctccccgtgggcagcgctggacgagttccctcctggaaccgaggatggtgcgcgcgcgcaggtccgggacgccgccgaccacatcgtccacagcttcgagggtacggctcctcggctcgtgttcgccctcgactccgacgaggagggcggtgacggtggtgcggacgacagcgacgatgaggccggcgacccgggcgcgtcggcgtgagcccccaggcccccgccaatcttaaatagctttttctttcttcttctgaggccttcgggcccccttcttgtataaactaattcaatctgcaatcaaataaagaagaaatttttgtgtcaactctgtttgttgagtgtatgagacgaggatggtctgtgccgcggtccttctttgtcttggattgaacgagggctcgtgcccaggtcccaacctcaagcggcgcgggtcggggctagtgcctagggagatccgcgtgtcgagactggccaggccgagaacgtggtgaccgagggttatggatgacccgattgtgggcctttgccgattcccccccggagttcaccacgccccggggcacggctcggttctgggccccgtttggcgattttagccggcccgggccaccgagggcagggtcgggcacgagcatgctacttcaagccaagattcttcaaaaggaaacgatggcacagacacagtcctcaggaaatcgaaaatgcttttattgaaatacggaagagaaaaaaagataaggatatgcatgtggtagcccccggccaaccctgcacgcccgggggggtgcggggttggcccgagcccgagacctgacacccgactcccactaggggtagaagcgacgaaggtgctcgatgttccacgggttaggcagctctgtgccgtcgcccgtggccagccgaacggagcccggccgggggacgccgatcactcgatacggaccctcccacattggtgagagtttgctcagtccagcacgcgtttggacgcggcgtaggacgaggtcgtcgacgcagagtgatcgggcccggacgtggcgctgatggtagcgccgcaggctctgctggtagcgcgcggctcggagggccgcgcgccgccttcgctcttgcaagtagtcgaggtcatctctgcgaagctgatcttgatcagcctcgcagtacatggtggcccgaggggacctcagggtgagctcggatgggagaaccgcctccgcgccgtagacgaggaagaaaggcgtttccccggttgctcgacttggcgtggttcggttcgcccagagcaccgctggcaactcctcgatccacgagtcgccgtgcttcttgaggatgttgaaggtcttggttttgaggcccttgaggatttccgcgttggcgcgctccagttggccattgcttctggggtgggcgggggaggcgaagcagagcttgatgcccatatcttcgcagtagtcgccgaagagctcactagtgaactgggtgccgttatccgtaatgatacggttaggcaccctaaaccgagcagtgatgcccctgatgaatttaagcgtagagtgcttatcgatcttgatgaccggataagcctcgggccacttagtgaacttgtcgacagcgacatacagatactcgaacctgcccggggcccgcctgaacggacccaggatatcgagcccccagacagcaaacggccacgaaagaggtatggtctgcagggcctgggccagctgatgggtttgcctggcgtggaactggcacgccctgcaccgccggaccaggtcgactgcatcgttgagagccgtcggccaatagaaaccctggcgaaaggccttgccaaccaaggtgcgtgaggtggagtgtgctccgcactcgccttcatggacatcggcgagaagctcgacgccttgttcccgaggaatgcacttcaggaggactccgttagccgcgcgccaatagacggtccctttcaccagcacgtagcgcttggagatgcgtcggacgcgttcactcccttcgcggtcctcgggtagagtcttatctgcgaggtacgcctggatctcagtgatccaagcaatcaatctaggggagccgggaacgctcccctcgggtcccgaggcctggactccgacgggcctcgggggccgttcaggcgcgtccgtctcccctagggggtcgggtcgcgccgacggctgggcaagcctttcttcaaaggcgcccggtggggtctgggctcgcgaggaagcgagccttgagagttcgtcggcgaccgcgttatcccgcctgggcacgtgccgaagctctatcccgtcaaaatggcgctccatacgccgaacctggcgcacgtaagcgtccatctgcgggtcagagcactggtactccttggagacctggttgacgaccaactgggagtcgcctaacaccaggaggcggcggatccccagtccagctgccactctgagtcccgcaaggagtccctcgtactccgccatattgttggtcgcccgaaaatcgaggcggaccatgtatctgaggacgtctctgctcggcgaggtcaacgtgacccccgcaccggcgccttgaagagacaaggagccgtcgaactgcatcacccagtaggcggtgtgaggcagctgcgaggggcccgagctggtctcggggacggagatgggctcaggggccggggtccactctgccacaaagtcggcgagggcctggctcttgatcgcgtggcgtggttcaaagtgcaaatcgaactcagagagttcgattgcccatttcaccacccgtccagtaccatctcggttatgcaagatttggccaagggggtaagacgtaaccaccgtgacccgatgcgcctgaaaataatggcgcaacttccttgaagccatcagaatagcataaagcatcttctgggcctgagggtatcgggtcttagcgtcccggagggcctcgctaacgaagtagacgggccgctgcacctttcggcggggccgatccccttcgctaggggccgcatctccagggcgctcttcgtccgagaggccgcgcggggcgcactcggcttctgtgccgacgacctcggggtcggaggtcgtcgggcgacaggcgcggccttcccgcagtggccccggggccatcctgggggtcgggggagcctggcaccgtcggacaagcaggcggagggccagctccggccgtcgggggcctcgggccgccgttcggctcgggggcctctcctgcctgctctctcccgggtcgagtcgacacaaggtggggatgcgcggggtgagggttgtcctcgtcgcgctccacaaccaacgccgcgctgaccacctgcggggttgccgccaggtaaagtagcagcggctcatctggctccggggcgaccaggactgggggagaactgaggtacgccttcaactgagtgaaggcccgctcagcctcctccgtccagataaacggcccggagcgtttgaggagcttaaataggggtagcgccttctctcccagcctcgatatgaaccgacttagggcggccatgcagccggtgacgcattgcacatccctaagcttgctggggggggcgcatccgctctatagctcgtatcttctcggggttagcctcgatgcctcgggcagagaccaagaacccgagaagcttgcccgcaggcacaccgaacacgcacttgtcggggttcagttttatgcgggcggagcggagactttcgaaagtttccgctagatccgagagtaaggtctcttggttgcgcgtcttcacaaccaagtcatcaacataggcctcaacattgcgtcctatctggctacccaaagaaattcgagtagtgcgttgaaaagtaggacctgcattctttaacccgaaaggcattgtcgtataacaataagttcctatgggggtaatgaatgcagttttttcctcatcctccctagccatgcgaatctgatgataaccagagtatgcatctagaaaacacaaaaggtcgcaccccgcggtggagtcgacaatctgatctatgcgtggcagggggtaagggtccttaggacatgccttgttaaggtcggtgtagtcgatgcacatccgaagcttgccgttcgccttgggaacgacgaccgggttcgccagccactccggatggaggacctcacggatgaatccggcctccagaagtcgcgccacctcctcgcggatgaaggcttgacgttccggggcctgccgccgcactttctgccggaccagccttgcgcccggccgcacggcgagacggtgctcaatcacctctctggggaccccgggcatgtcagccggtctccaggcgaagacgtcggcgtttgcccgcaggaaggagacgagcgcgtcttcctatttgccgtccagaagaccaccgattcgtgtggtcttggacggtccgtcgcccagggcaacctccttgaccgggacctcgtcacacgtgatcatccgctgccttggggtggctgggacggaggtgctgagcctctcgttgccaccctcgggcttggacgcggcggcgaggtggtccgcgcgctgctctatacaagcaagcgcgactttgaggtcgccatggacagagatggggccaccggggcccggcatcttcatctggagataggcatagtggaccgccgccatgaacttcaccaacgcgggcctccccaggaccgcgttgtagggcagactgaggtccgccacatcgaagttcacccgctccgtgcggaagttggcggatccaccgaaggtgaccgggaggtcgatatgacctagcggccaagtgtgccccggcgtcacaccgataatcagctgggacggccgaagcaccatccccggggccttgatggcgtcaaaggctgcgggggaaaggatgttgagggctgcacccccgtctatgaggacacgccccaacttcacgttgcaaacggtgggggaaaccaccatcgcgatctgtcctccccgggcaacgcacggcgggtggtcggtctggtcgaaggtgagggcaacctccgaccaccgcgcccgccgcgtcgcctcatgggtaggggccgcggccagaagctctcgcttcatggccttgaggctccgacgagaagcgtgagcgcacgctcccccatcgacggtggcgatggtggccccaggctcctggaaccctaggtcatcgtcgccatcgtcgatgtcctcggcgggggccttctgcttggcctcacttcgccggttgccggagggagccgccggggccttgccctcacggcgctcctgcctcctctcctcctcccacttcctcgtccgctcagccaaacttttgaccgcgcggcagtccgcgaggtcgtggagggaggtgttgtgcacggtgcaccacttgccggtcgggcgctccctgctgggagcgccggcctccttctttttgtcgctcgcaggcctccccttttgggtggcccgcgaagctccctcgacggcgaggacgtgtccctcgtcgttggaatgggccgacctcttcttcctcctcctgtcccgccgccctgaccgagcggcggatccgggggcggccgaagctgccacaccggaaccggtggaattccaggtccaggcctcctccttgcgagccacacggtccgcgagctgaaaaagctccgcggtggtctggggctccttggaggcgatattttcgagcatgcggttgtgccgcacgccccccctgaacgcgtagattaccgcgtgtgcggggatgcatggttgtgtgttgcggacttgacaaaaccgctgaatgtacgagcgaagagactcatcgtcccttcgctgtaccgcatgcaagtcggcttcttcaactgggcgcggatatgtgccttggaagttcatggtgaactgctggcacaaatcctcccaagagtggaccgacgcgggtggcaagttcattagccaaccccgcgcctgtcccttcagggccatggggaagaaattcgccatgaccctgtcgtcacccccggcggcctcgatcccggtcgtgtagacctgaagaaactcggcggggttgacgcttccgtcatatttttcggtgatggtgggccggaaccttgggggccaatggacgttccgaaggctcgacagccgacaccaccaaccgggggcacggggggctggtccccgcacccgaaccgaaatggcgctccggacgaggaagcgccttccgttgcgtgggcagcacgacgaccattgcgccggcgctcgatactgaggcgggcatccggccccctacgcacatcttcttgggtcggaggcgttgacgagggaatggctgacgaacggcgggtaacggccgccgctcgccgcgccctccgcctcgacgacacggagccgacggtagcagcgccagaggccttggtggcggaggaccgcccaccggcgcctaggcgctgctgtgccgtcatgaccaagtcggccacgtcatccagccaacgtcgggctggagtctctggatcggggacgacaggcgggtgacgcaagagcgcgcccgcagcttggagcgcgccctggggcgtgctaccatcgccgtagacgaggaggcgacgctccccgtctcgccgtccttcttcatcgctcgtgggcggcgaagtcgtggatcttttgaccccctcgagcgcctcctcccacctaagacttcggcgagaggggggcggtggagtacgagctcgacggcgcgggttctgctccccgtcgtcaccgctagcgcttggagagaggttgtgcgccacttcccgttcggccattgggctgagcgggagaagcttggcgcacacgaaagaggacgagagcttagaaaaacacacgcgccccctacctggcgcgccagatgacggagcgtggggctcctcaccgggagaccgcgcgggcccccctttgccggttcggccggggacgctaggtgagattctaagccctcgatctgtggaatgtttcgtgagagagcaaatgcacaagacacgggcgatgtagacaggttcgggccgctgagaagcgtaataccctactcctgtgttctggtggatctgtgtatgaaggagttacaaagagctggagagcaagagagttcaaactctagagaccctctccctctctctctcctctatgagctccgctcttcctttcacgagctccccttttcttctcccttttctcttcctcccgttccccccgtcctggtaggcatggtcctccttttatatctcaaggggataccacatacaccatttctacctaccttctttttgggtggggacccatctattttgaccaaaacttgg

SEQ ID NO: 18299 - DNA, 1855 bp, Oryza sativa
tctttttgtcgctcgcaggcctcccctttcgggtggcccgcgaagcgccctcgacggcgaggacgtgtccctcgtcgtcggaatgggccgacctcttcttcctcctcctgtcccgccgccctgaccgagcggcggatccgggggcggccgaagctgccacaccggaaccggtggagttccaggtccaggcctcttccttgcgagccacacggtccgcgagctgaaaaagctccgcggtggtctggggctccttggaggcgatcttttcgagcatgcggttgtgccgcacgccccccctgaacgcgtagattaccgcgtgtgcggggatgcatggtatggtgttgtgaacttgacagaaccgctgaatgtacgagcgaagagactcatcgtcccttcgctgtaccgcatgcaagtccgcttcctcacctgggcgcggatatgtgccttggaagttcatggtgaactgctggcacaaatcctcccaagagtggaccgacgcgggcggcaagttcattagccaaccccgcgcctgtcccttcagggccatggggaagaaattcgccatgaccctgtcgtcacccccggcggcctcgatccctgtcgtgtagacctggagaaactcggcggggttgacgcttccgtcatatttttcggtaatggtgggccggaaccttgggggccaacggacgttctgaaggctcgccacaaaggctcgacagccgacaccaccaaccgggggcacggggggctggcccccgcgcccgaaccgaagtggcgctccggacgaggaagcgccttccgttgcgtgggcagcacgacgaccattgcgccggcgctcgatactgaggcgggcatccggccccctacgcacatcttcttgggtcggaggcgttgacgagggaatggcagacgaacggcgggtaacggctgccgctcgccgcgccctccgcctcgacgacacggagccggcggtagcagcgccagaggccttggtggcggaggaccgcccaccggcgcctaggcgctgctgcgccgtcatgaccaagtcggccacgtcatccagccaacgtcgggctggagtctctggatcggggacaacgggcgggtgacgcaagagcgcgcccgcagcttggagcgcgccctggggcgtgctgccatcgccgtagacgaggaggcaacgctccccgtctcgccgtccttctccatcgctcgtgggcggcgaagtcgcggatctttcgaccccctcgagcgcctcctcccgcctaagacttcggcgagaggggggcggtggagtacgagctcgacggcgcgggttctgctccccgtcgtcaccgctagcgctcggagagtggttgtgcgccactgcccgttcggccattgggttgagcgggagaagcttggcgcacacgaaagaggacgagggcttagaaaaacacacgcgccccctacctggcgcgccagatgacggagcgtggggctcctcaccgggagaccgcgcgggcccccctttgccggttcggccgggggcgctaggtgaggttctaagccctcgatctgtggaatgtttcgcgagagagcaaatgcacaagacacgggcgatgtagacaggttcgggccgctgagaagcgtaataccctactcctgtgttctggtggatctgtgtatgaaggagttacaaagagctggagagcaagagagttcaaactctagagaccctcttcctctttctctcctctaccagctcaggtgttctcccctttcttttttctcttaagtgggcaaggtcctccttttatatctcaaggggataccacatgcatcacttctacctactcttcttttgggtggggactca

SEQ ID NO: 18300 - DNA, 7477 bp, Oryza sativa
ggcccgacccctcggggagacagagggaggggcgcccacatcaccctcgggcccgaccccccccccccgagggggtcaggccacgtgggtgaccacggctaccccaaacctctagtcaagatacccccggtcccatgtcaccgacacaagggtgtccccagtgtcaggcggggggcggcgctgggcccctactcgaggacggacgactgcttagcttccgggtgaaggcacgaatggtggtccgatccaagcggagtgggttcctctcccgtgaaggagtaggtagaggtggtgcatgtggtatccccttgaactataaaaggaggaccttgcccacctaaaaaagggacgattctcagtaagcctaagccccggggaagaagagtgagagtgctccctggagtttaggaaccttggtaacactcaaccttaaatcccacgcgcaggagtagggtattacgctccatagcggcccgaacctgtataatcccagctctcacgggcggtctcaggagactctaggcggatatacgttcttgatcagcgcgccctttcccccggccgaactcacaaaaagggggggtctctcgatcacccgctagagaggatcactcctcgacagtcgtcgttgtcgcctaggacttctcgcaacgagaagaggtggccgaatctcggctaaagaggagaggtgattgggtctggtatgccgtcgtcgcttctccatcacgcatcggcatccctcttctcatctctgccttgctagccgtgcagagggattaaggaagggaagagagatgctgtcagcggcgacgaccaagggccccgtggcgacatcgtcgtcatgtgtggagctccgaacagtaggaggacggcggtggcgcgagacacagacctcccgggcgaaggagcgccaaaaagggaggatgcggtgactatagtggccatgtccatcgttggtcatgcttgctgctgttggcgccgagccaaatcaccgatttctcacattgtagaagagaaaagaggggagaaagcagaaagtggaagaaggaataagggggaaaagggcaatgtgaatccaagggaaaaatagtggcatatttcaaatatatgtaaaattataatggcaatgttactaaatcgttaatactagtagcatatttcaaaaccgacatatttctaatggcatgaattcaattaaccctaaaagttagagaccaacgagaatccctacccttactagtgtatagtggcggaaacaggggtagggtagctagggctgctgccctactcctaagcctaaatatccattaaaatttacatgtcaaaacctcaaaacatggaagataaagataaattatgtacattatactggttaagccctaggcttgagaaaattctggctatgccactgctagtatatacaacaactaagcatattatcgcctctcatgcctcatgggtcgacgcccgaaactttggatcaccacgctacctggtccccttcctcctccatttctttgcattaatgtcagcaacgaggggaagggctgaaggggatcggggatccgtatgatccctagggccccaaaaacgatatttggcgaacttattcagttggaccacacctatattgtaatacccttgcgcttttgtcctcacttaatgcaaaaaggttcgaatcgatattactaatgatcaagcaactcaccttatcaattaatgtgcatcaagcttgatagcggagatatgcactaaattggacataatacttcattattgacttctattttcttaacaaatccattccttctatgttcttagctcatgccactcctatctagtagccaattgtccaaaaaatctagattttaactcaataaacataaggatatgacatttgtaattgtcgagtaaatgctcgttcaaaaaaaaatgttgagtgaatacccatcctttaaagctacggccgccactattgggcatggtcaccggtatctggcagttatggctattgtgtctgggtctgacaaagaaatattgcatatcagatcgatgttatttttgctctatatgtgtccaaaccgacccattgtaatcctacccacccatagatctaaggtgcgaaatagtccaacaaactaatatatttacatttgttttgacgccatatgaaatttgcagtcaaaacttaaacttgtaaattatttatagatgagaaaaatcaagatgtaaaatgtgaaatagtaccttcttcataaaaactctttcataaggagtagtatttcatatggcgaatatacattccttattatatgttgggtagacaaggggtaggggcaagtcaactcgtgacggcacgcctcgccacgacacgacacgacacgacacgagagagatctcggcgccggcgggcggcgccggcgaggcgtacggcaatgcctccttccgccgtgcccttctcccgtcgcccatccgacggtccacgcggcgcccgccccatcctggttgtgatcctcatcgccgccgccgccaccctactcgccctcgcctactcgtccttcccctccgcttcgcgggctaccaccgcatcatcttccatggctgtggcgccgacggatgacggctgctgcaggggcctcgaggggctcgagctgtggggtccggcggtcaagtggggctccgaccaccgcctgctctccgccgccgcgtgctgcgaatcctgcaaggccatgtgcaaggccaacgactgccgctgcgattcctgggtcttctgcggggacaagaaaagatgcggccaaaggttcggggaggtccgttcgcccacccacccactgactattcattctccatttctactggagtagctataataggaggagtatttctgtatgaccaaaccccaaattcagttttagtcactcactactcctgcatatactaatatgatattatataatcccctttcgcctgcttgcaatgcagtgctggctgaagaaacaaaaggatgtgatggcaccctctgttgttgcaaagggagatgatgttatgtggacttctggtctagtcttcgcaaaaggagaggttagtgtctgtctcgcctgattcccttcaaatcccagctgtttcatgtgctccctgcctctgcttaatttgaaatattttggttccaatccaactagagaatgtgtgtgtatcaccttgcctacaagtttggaacgcttgtttccttatgctttcaaacaaacaaaaatgtaccaccaattcataccatgattaattcagagatttataatttaataatgcagggcattgtgggcctggaaacaaacttgggaccattcgtattcaagtaagtgctctttgcctctacaacaaggcaacaatattttgaatcttctttagtgttcaatcaccgaatcaagaatgttacatgtaaaatgctgtgcaccggggcccggggccatatacagctatagttgcatccactgatctaagatttctcttagcaattattttatttgcatatttttctacatgtatctcattttcagtattgtgcacttacctttgggcaatgtaaaacccctttttaatagaatggccacaaggtagatatcttttgtcaacaagaacattagatgcaggtagagatagggaagctggcggagtggtgtagtgtcatttacttttctttccatgaatctgacacattttttgtttactcattaagcattcattcaagccaacaaagatatggtgtgctaatcgtgttgcttctcctctgcccatcaggggtttttatagaatattgtttgttccaatctgttctactgagaacatggtatatgcttgttgagaattggcaacaacaaataatgcactggggttacatttgctacatggattgtttggctatatagagagccatggcaaacacatgagattatggatttaatatgtgtctaagagtaaaaccatacatgcatttaatgtaagaccgctaagctgccaagtgaatatcgatcattagagattatgctgttagcccaggttgctctgtcaagaagtttggatggtaatttcttgacattttgtgcaggtagttctaattctgtcttctggataatccacttgagttgaatggaattatactgtatctgcgatttttcaccatgtcttccctttctaatatactttctttgcatctagttgctgcctggctgtgcaccccattctgtggactatttcattgaggttctgggcttgcggaactgcgctggatgcagattttatcgagctgaaggccgtgggaatttgtgggatgcaaaaggcgaccacataaaaaatgtatgtcttctatgatcgattgcatgaaagggttccaatgtcacatttgggtttggacttgttggtgacaacaattataccctaatgccccttgtttttgtgtgactaggctgcatatggtccaccgtatgccttgcttcaagggacactggaagtcgatggtttaccctttaaggagagagcgaaagaagcctgcccagcactgagaagaggatcggttgcatgggttggatcagggccggagttcttgatcagcttagcaaaccatggggagtggaaaggagcctacactgtgtttgggtctgttgtgcccgaggacatggcgattgctgaggaaatggcactgctgtcgaccagcacagacgtgtggagcaatgtaaccgtgaaggtgctgcgagaccctgtgtatttcaaggtgaagagaagcaccagcagtggtgttccttaggtatcactcattcgctcactcactttcagtcggttggtcggttcttgtgctcattgccgattcctttctggactatctttgtttcttatagaggacataaaagaaagggaaactagattagaatcaggcatgttatagcccctgacatgtagtagtattaccctaaagaaaaggggattactgtgtaaagaaagaaactaaagttgccatgttcaactgtttacctgctcatctttatgtggtctgataagtgatgatgatgtttcagaggtttattcacttatactgttatagtacatactagaagagtttcttcttcttcttctgtcaatagtatatatacttctatttctatataggtagatagaggagttcaatcttggctatatatactgttatactattccaaatcttaaatggcctccctagtccctaatatacatatgctctgctaatgcttgtaatgggctactgaggaaaaaaaagcagtaatgggtctgggccggccgaggagaaggcccacgagcgtcatctcatgacggtttcgcctctctctcctctcgttctccctcctcctcactcggaaaggaaaagagcgccgccgccgccggcgtgatgcttcccttcgaggagcaggtggtggcggacctcctggaggaccccaacggcggcctggtggtggtttcgtgtggcctcccggtggcctccctggcgtccgccgtcctcctccagctcttccaccaatcccccgacgatggctgcttcctgatcctctccgcccccgagccggtcaaagctcaaatccggcggcgcctcctcctcaactcccagagccagcctcctctcttgcagctgcaggtccacgacgtggccccagacctccccgcccaccaccggtcgccctctacgcctcccgcgccgcgctcttcctctccccccgcgccctcgtcgccgacttcctcacctcccgcctcctcccctcccgcgtccgcgccctcctcctcctctccgcccaccgctcctccgacacctcctccgacgccttcgtggctcgcctcctccgccaccaccacctcctccctgtttatgccttctccgatcgcccccatgccatggtctccggcttcgccaaggcggagcgcgctatgaagagcctctacattcgacgcctccacctttggccccgcttccaccttcttgctgccgctgacctcgagcgctccccgcccgaggtcatcgacgtccgcgtccccatgactcagcctatgaggggcatccaggccgctatcctcgatgccatggacgcctgcctcaaggagctcaggcggaccaacaaggtcgacgtcgaagacctcaccgtcgacaagggcctcttcaagtcttttgatgagatcgtcaggaggcagctcgaccccatctggcacacgctcggcaagaagaccaagcagctcgtcgccgacctcaggacgctacgcaagctgcttgattatcttgtcaggtctgctcatccactccataccttcacctatcattctgctccattaagctgttgatgattattccttcctggatggcatgaatcgcacacaaaaattctcttattcaaataataaaacttcttaggcattctctaggtacgatgctgtgacataccttaagtacctggacacactcagagtatctgaaggcgtccgatctgtttggatatttgctgactcaagccacaagatattcgacctttcaaaaaggcgtgtctaccaggttgtgagagcagacggtacaaaggttgcagcagacaacaagggcacaccaacaaagaagaggaaggtggcacgcgctagcagcaggaaaggaaaagaaactggtagcggctaccggccatttcctttcaatcgcaactaatgccttttcttaaagaatttagatataggcctcttaatttcatgaaaaaaataaatattttccactcaataggagtggctttaacgactttccactgcatagatactaattaattatttgccactccatagacagtcttaatataagatcttcccagtcattttctttgcgatcaccccaaaacaaaacgcagtggccacctatcttgttgctttacgcctcctctaaccagacttggtctggtcaaataagctcaagcagagctgatcaggggacatgccacttatcttcttccctgacttctctatccaagcgacaatacaggcgacatggcacgccggcgccggcaccgccaaggaaggtgcactagcaggggagccattagcaagttggatcctggagccatccccaatccccctttttggagtaaatttgcacaaaatcaaagaagtagcttcttctttcatctactcagcatcatccttgggtcgcatgaccactgttttgcagtttgcacaatcatctgcactctccactagttcacatgtcccctgcatcttctagccaggagcaatgtgttggagtcagcgacgctggccactgctggtcactggaccatgaggcggcggcactgctgcagttgaagcatcccggcactgtctaatcagaggcaaggaagggaggggtaattttggaagaagaatatgtgtgcctggcatttagaggggaagttgcagagaaagtggcatttcataaagctcatgtgtctatcgggtggca

SEQ ID NO: 18301 - DNA, 5425 bp, Oryza sativa
  unsure (1)..(5425): unsure at all n locations
ttgttagagaaattgaagtatacaaggcagaaaatccatcgatgaagttaaaagtttactttcttttttatgaagattctgccgaggtacaaaaatttgagtccagcattcgccgggaaaatgaagcatttgaatctttgatcagacagaagtcgctgatgatgatacctgttgatcaggtggtgtaccactctgctaaaattcgttaaatcatcaaggattaatttcagcttgatccttgcgtaatgttcactagtatatgaatgcagacatactatgcttgattaaattactattacactttttatctaatctacatgtgaacctcatattgtacttatcttagctgtcagtcaaccttatgtgagcaaaagtgccggtgtgcacatggagaaaattccatatatttccctgatacatgaaagcacatctgtcttcttttcagaatggccgttgcattggaccaactcttgcaaatgaaccagaagctcttttatctcaaaattcactaacaagaaaggcaggtggtagaaagccactagagaaggagatgcaggtgatgcttccgtccattattttgactaaggaacaatattatttgcttttactggctgaattgctgagatgtttattgttgcatatccttctaggttattgtggacatgagagaattcatgagcagtcttcctaatgtattgcaccagaaaggtattcgaataatacctgttaccttggaagtcggtgactatgttctttctcctttgatctgtgtcgaacgaaaaagtattgcggacttgttccaaagctttgcttctggtcgtctctacaatcagattgaaaccatggttcggtattacaagatcccagtgcttctgatagaattctcacaagacaagagcttttcctttcaggtaccccctcgccctcctctgccatgcattttcttttcatgctactatttgccaatttggtaggatattcgttcttagatggatggtatcttgctccctacaaacagccatcccatgttgtctttcgatcttgagcaaattttaatccatttccgactatgtgctattttatattggttttcgtgttcaaaggtgctgaatggtctgtttatttttcagtctgcaagtgaaattggggatgatgtatctccgacaaatataatctcaaaactttcattactagtcctgcattttcctcggcttcgcatagtctggtctcgcagcttgcatgccacggcagatatattcctatcactcaaaacaaaccaggatgaacctgatgagagcaaggcaatgagagttggtgtgccctctgaggacggagttgtggagaatgacgtgaggtaagttgtttttttttgtatttggtaacggcataacgcacgcggaagcatacttatatctgatctactctcctcggtaaaatatgttttcgtcagggctgaaaattacaatacgtccgcgattgaattcttgaggaggcttcctggtgtgacagattcaaactatagaagaataatggaggaatgcaatagcttagcagagctggccctgcttccggtagagcggctgtctgagttgatgggtactcagaaaggggcacgcatgctcaaggaatttctcgatgccaagtgtccaactatgctctagggctgtgtaatcttgtttgtaattgttgaaaatgatcaataatgaacttattattctacttagtaaaaccgattttaagatgtggatggtgaagagtgatgaatgtacaacccttactagaaagcttgggtcactcggtcgctaaaccatcttgcatatggtgctgttctcacaatttatttacgaggcggttgtcacaatttaactcttgcattcttttatgaaagatctgtagattttttttctttttacagagatggagttatccgaggagatgcggaggaaatgaacaatttaaattcgttgggagacagaatgggtaaatgggccgaaggaaagcccatctagagagcaggaaagcccaagtattaggccttgcctcctcctttgagggaggtggacggcgccgccagcagcggaaaggaaaccatggcgctcgccgcccttgagaggtgcttccaggctgtcccgacggacgccgtcgcgggcatcgtcgactgcgtcctcgcttcttcgtcctggtcctcgccctcgcagctcttccacgccctcctccactccgaccatgccgccgcgtcatctctccctcacgccgccgcgctctgccacctgctcgccctgctcggtaagacgaagaagaaaacccctatctactccgtcctactacagaggctacagaccgaagaagaacttatacatgatgattgattgatgaaatccagatcaggagcggccggcggaggattctgtgcgcgcgctgctatggagggtcttcctgccgctgcttaggcaagaagaccagctccagcacaccattgccttgatgtgcgatgccgtctccaccaaccaatccttctctgaccttctaggagctaccatcttgcccttgtgtattcgatcctccgccatcgccatggatatggatttggattccactctactgtttgtgtaccaaactggggaggacccgccgcctccagctccaggggggcttcttcttctaccaatctccaaggccaccgctgtcctggcgtcgttgctccaacacacattggagaggaacaggaagagcacaagcctcaatgcgctgctgcacaatttgacctgggacctctcctcgctggcgctcaacatgtttggccacagccaagagtatcgatcctgtgccacccgggtcctcctacaccccctgctcctttcgctcgcggatgtttcctgtgtcaccgtgcacctggagttggctgcagctcctcagcttaagctctcaaggtttccgtttcctcttctcttctcttctctcctcttctatatgcgcctgcctcaccctacctactattgattgtttgtctcgtgcaggtctggcttcttggagtctatatgggcctcctgcctttctctctttgcactggggcctgctgagcgcctggatgcttataatatactctctctctacttgtcaacactgaaacatgttatcttgggacctgatgagtatgatcttaggaattccaatgatttttgggatgaaattcgcaggggactggtgcgcgtttctgctctgactgtttctgctagtcttttagctctttatactcatcctgctgcttaacctcttcacaccaggttgacaaggattctttagtgaggaagcaggctttgtacatcttgagaatatcactagacatcttttcctcatctgaggataatggtgctcagcaatgctccaggaggaggtccgccgctctgcctgctcaagacaaatcaaatactgcaatgacaaaaagagaaaggtgggctcagaaagaggccaaatcccttggcattggagaaatgagccaatcagatgaaaactgctcaagtggtaaagaccggtggaaagttttcctgttactctacgagatgctccaggagtatggaacacatttagttgaggcggcctggacacaccaggtcagttggttcctacatgctctttctttaagacctgtatatctaagtgtcaacacaatatataccaggaacaacagtcatagcacagcaataaagtaaccacatgcacgttctattagatgggttgataaatttaaatattatttcccaggtaatgctgctgtttgagtccacaccacggagtgattactcaaatcacatgtcctatacagttttccatgctcagatggaatctttcgaaggatttttccactggatggtagttctttgggagcgtgggtttactcatgataatccccaaggtcagtactgacattgatatatacagagtgcatatgcttaaaacttacaatgttgtcttacaatctgctgttatcaatgatttttacagtgcgctacctggttatgcattcctttttggatattacatgggaacactacttggtttgccctcagatagttcccagaggctttgttcttggaccactgttacgtggtttgaacgatgtagttcatcacaaggattttggtcagttacactcatattacactaaattcaatataaaatcaacgtattcttctctgagtaatacaaagttctttttttttgttttatccccaaacatgtgccttttttttgtatgttttcttgtgcccatttcctttttatgagatattcttgaacctctagctatggggaatatcatattcttctacctcaaaaatccttgcctggaacactcgccacctaagcttccatttctttgtgaagtatagatctgaatatttcaaatggcagactacttgtgaaccaaaccaataaatgactgaagaagcctattcgttgatgtagccattctcagctcatatgttgtgtcatcctactttattagtacattatttggtttgatctttagctaccccaacttgcttgggactaaaggctgaatgcaaatttttgtccnngtgattattaccttccctatcantgctgtccttggacaggtgtttcactatttatgtttagaatttgaagttgaaattctaaagaatactgcactgctacatcaaaactacttagcaatttttcgtgctgattctgtgcccaaaccaaaagttgattgtgagtgcactacaaagggcgattatacttggtttgttccttgtttaaaacacctgagttgctcttacttttttgaaagagaaaaaaaatgagatactaagaagaaactgtttgcatcatgagattcttcttcttgtttgcaccgttctcttctaactcttttataatactagtatttgattattctttctggttctgttacanactgttcaacagtttattaccttttaagtactgagttgtctatctaactattttaggtgtgaagggtgtttatgattcaaaaatcataaaaggtgcagagaggttctttggtctttacgcacagagattgacaacacggtactgatttttaaacaactactaccttttttcctgtgttgcacctcgatgaaaacatggcatgcgaattctggtactttggattttggaaaggattttagttatcttcactactttcaatgattgaaactatggtggttatggtttggcctacaccacaccctgttctcatttccctacacacagaaattgcgcgccaacggccaacctgtgttctgtttatcttccccatcaatcccctccttagttggccatcaagaactcatgttcaaatccaaacacttctagtattaaaaacaacatgctttttggagaacgctttctccacatgtaaatgcgggtacatgga

SEQ ID NO: 18302 - DNA, 6233 bp, Oryza sativa
taattaccaaaaatctcaacttacatgctgcgtactccatttgtttctccaaattcccaaatttgtggcaaagttggagtaagtgttaaattataaattgtgtttctgattacaggcttagagcttcagttgaacgcttccttgatgttttcaatcctgatacttccgggactccttctggaatatttagttctcgccctgaggttcataacattccctttctcttctagtacaagtttaggataattgattcctgcttcttgaaaacaatttgtttgcttttttagacaaattctaggggtgttatggtttctttatgagaactgaatgtttgattcttttaagagaagtctgaataagatgatgttttcttaggtctcttttgactttgaatgtgttcctgtgtcagtgatggagcgagtaattaacttcctcaatgtaagaacttcaacctgatcttgcttttccttcattggactctaagctaatcatacttagctatgttaggatgtgagggaggatctgagacaatctatagcgaaggactcaataacaatcaagaatgaggatctcacagcagaaatgcatcacaaagaggacagaactgatgagaacatagttgagttgttagagcctagtcaagatgtgcttaattttcaaaagaaaatcacaccctataggaactttgatcaaccattaaacgttgggtgggatttcagttgttggcgatgacttttttcaagattactcttaggtatgtaaagcatccttgcaattttactattactcctttcttcacattccctcccaaaatagcttgcaagatggatttgcacaggcttgttactttcattgcgcttggtgtgctaagtttttatgtaatactaagtcattttgaagagctaagctgcggatgctcttattatctacaaactgagcttttgtttttgctccctacgctatttcacttgtccatgtgctgtcttgtttgctgggtgcagatctagagggagatgaccagcagttggatttagcgctagaatcaagaaatcacgctgtggaaactatcaagcaaagccagcagcaattaatagtagtagcatcattggtagatcgcatccctaatcttgctggactgacaagaacatgcgaggtatatatcggtataattcctgttattatccctgaaacgtgcatgatataatggtattaggtttttggtgacagatattcaaagcagttggattggccgttgctgacaaaagtattatcgaggacaagcagtttcggttgatcaggtatgtatatggctggcagatgtatataggtgatgatgatttatttgtgtttctctgacttggcatgcaaatatgcaatgcatgcagtgtgacggcggagaagtggttgcccatgatggaggttccagtgaatagcgtcaaagtgttcttggagaagaagaggctggaaggctattccgtgatagggttggagcagacggccaacagcaagccactggaccacttctcttttccgagcaaaacggtatataattagaagatccaaatccccccctctctctctctctctctctctctctgtgtgtatgtgttatgtttgcattactgcacataggaggagggaaaaaatcatacaaaaaaagaactaacaaggaaaatatatttattgacaaggtgcttgtgctgggacgggagaaggaaggcatcccggtggatatcatccatgtgttggacgcatgcgtggagatcccgcagctgggcatcgtcaggtcactcaatgttcatgtcagcggtgccattgccgtgtgggaatacacccgccagcaacgcatcgcaacttaatttctgtttgagcagaaatcaacttaattttctcaaagctgttccttgttactagtactcctactccatagtggagtctgtattatatgtattcatcaatcggttagaactagaaacaaatgagagatgatagtactccacttgtcttgcccgtacatacagcacaactctactgtcctgacctgcaccccagctattgttattaccaaaaaacccatatttgttcttgctagtaatgccacgcactacggcactagatagaggtgagtttataatacgaataaaacgtttgtgttggagtatcacttaaactttcctcgtcatttggaacagagctcgaaacgggggaaaaaaattcgaggattggttccgtgtatttgcatttgaaccttttattatttattactagtcgaggcatagaatattttgtaagctataggtaacactccacccgttacattcaagcacaataacaggatctctaattctatttgtgaggtagcaaagcatacacaatactatgttaattctacactaacaccagtgtattagtcctaataattttaatttaagagtaaaatacgttggtggtatcttaacttgtaacttaggtgtaatttatttactcatcttgtaaaatgctcaaataagtcaattatcttgttttcttttttcaaatcacataaaaaatgtgttatgtaggagctcggtattaagttggatgccatgttgaattcttttgcaaatatccacaaataagccaactgccatatgagatagtagaatataaattaagatgaattttgttattgcttgctatgttaaaacacgcaatagcagctagcataggtgaaaatataaatatgggtgctaatttgctattttattgattggcaaaaaatatgtaagcttgtcttgtccacatgtctcacaaaatgtatgcttggcccttatggcttccaagttagaaacaaacggtattttctaagatttgcaccatcgaaacaagattagcgactcatttgtgcaaattgtaagatgaatgactaaattgcatctaacttgcaaattgatactgctagtgtattttactttttaatttatttgcatgtccaatatattcttcctctttctatccatttctcttacagcatgtttggatgatgagttgtgaggggtgtgattgggaatgaaaatgaatgaaggtctaagatgaaaatgaaatgagatatgaagaatgaatggttatgatttaaagatatcctttggtggataggaaatcattttcctaacccattagccaaacatgtccttggagccgtgtatagcttaacctcttgtaggagggtagctcctctttctcacctcttttctaatccaacttatcatcggagcctacgatgtaacttgggctagtgttttgtatcttattgtacctactcaagttaattttaattttgtggatgtgtgctcttagagaggtacaattaatgcataagtgagagaaatagagataattttaaaggcaaaatttatgcgcactatttattcttatcggatgcaggtgactggttcgcttgaacgatagccacgcgtgagaggagtgctactaattaaatacaagcacagcaaattcaaagatttttttgtgtcatgcatgtctttttttctctcctttttatagttttttttttctcaaattacttatctgattacaccattgtatttattacaataaaatatttataacaagatatcacattattatgatgggagctgctatataccggtatcccaccggtatcccgttgggatactgtcccaacgggatcgctcctcttcacctccctgagacaggggagcacgggccactgtgggagcagcgagcgtagacgagctgacgccggcggcaccgacaacgagctccagcggcgccgacgacaagcttcggcgtggaggatgcggccgccggcgacgagctccggcatggaggacacggccaccggcgagctccagcgtggggcatggtcacatggacggcagaggatcctgcgtggtgatagagacggcgccggcgccgagcaccagtgtggggcatggacggcagaggatcctgcgtggtgatggcggcagcgccggcgtggagaacgcggccgcgggttgaggcgtggacgacggacgcggccgccggtgacgtgctcccaacggaggatgcggtcgccagcgacgagctccgatgtggaccgtggacggggaaggatgcggctgccagcgacgaggatcgggttcggtgtggaccgtggacgagggaggacgtggccgccgacgacgacacctcgacgcccagctcctgatatctagtaagtatcatctgatacctcgcaagtatcatcccgatacatcgtagaaatcgcgcgatacctgataggtatcacataatacctcgcgagtatcgcctaatacgtgataggaatcgtctgatacctgatgcgtggtagaatcgcatgatacctggtaggtatcacccgataccggctaggtatcaggcaagtatcaccatctatgtggtaagaatcgcatgatacctcgcaagtatcacatgatacgtggtaagaatcgcatgataccttgcaagtatcacctaatacgtggtaggaatcgcctgatacttgatggttatacctgatacatgttaggtatcaggtcctgataccttaccagtatcaggcgatacttgcgaggtatcaggtgatacttgatacctataaggtattaggcgattcctatcacgtatcatgtgatgcttgtgaagtatcaggtgatacttgtaaggtatcatatgattcttaccacgtagaaggtgatacttgcaaagtatcaagtgtacctatgaggtatcagacgatacttactagatatcaggtgatttctactgcgtatcagaaaccgaacacctacccggcaccaacgccgacaaccactaccgcccccaatctcccctggctctagccaccgccgccgccttgcccctccctcccctggctccggccaccgccgccgctccatcccccggatccggctaccgccaccgccgcccctcccttccctagctccggccaggcggccaccaccgtcacttcgttccctggctctggccaccgatgcccctcctctcttcgttgatgtatcccccgccggcggcttggccacgatgtgctgctgcctcgacgcgacgcaaacgaggtcctcgatgtagcaggagcttactgcgcagggctcgtcgccggcggccgcgtcctcctctcgccgagcgggtcttcttccccaaccgcgccgaaggtcctcacggacaggcggcagcgatctcctccacacgcttaggcgctcagctctcgcttctctttggataggcaagcaggacgaaggatcccatcccgacgggatcccggtatatagcatttccgtattatgattatattttgatgaaataaacatatatgttgcaaaatactttcactacttttattgtatatgtaaaaacattataatatatagatttattgcaatattatttaaaatgtactttaggactttaatattgaatccattcgtttatacaatattagttataaaaaaatcaatcattaccgtaccttgtaagcgggctcaaaagatgggagagacgagggggaaaagggctagagtagacgaggactgcgcagtggaggaggcagaggcagaggcgagagagatggagatggaggcggaagaagagacattgtaggcggcgagagagagagagagagagagagagagacggactagactaggcgcgattgccttgttgttgggtcgtcaagcccgatgaccatcgcaggaggaggagaggggatccctctcgatcgccgccgcctccattctctttatatccgccgcgctccccgctgcctccacctctctcctcctccgccgcccctccccgccccgtttatagatgaatgctaatggaggttgccaatgccatggatgccatcaccaaggagaccgtcgacctggttgctcatctacctcctccttcttctttcccctttataatataataaaataggatattattctcctatttaatttaattatctagtgatcgattccatctctgtggagtggagttgagttgagtggattaacatgcgggcattagttttgggttataatgaactccctccgtttcgaaatgtttgacaccgttgactttttagcacatgtttgaccgttcgtcttatttaaaagcttttgtgaaatatgtaaaattatatgcctacatcaaaatatatttaacaatgaaacaaatgataaaaaaagaattaataatta

SEQ ID NO: 18303 - DNA, 3280 bp, Oryza sativa
  unsure (1)..(3280): unsure at all n locations
ccaaaaaaaaagatatactaatatgatggacgcagttaattgaactcgcatcgatcgcaggagcacatccctgtggaggaggtgttggatcacctaaaatgcacgcgcgagggtctcacctccgaggttgcccagcagaggatccactccttcggctacaacaagctcgaggagaagcaggaaagcaaactgctcaagttcctcggctttatgtggaacccgctttcctgggtcatggaggcggcagccatcatggctatcgccctcgcacacggaggaagagatgccaggggaaaggtatattcttcatcatcatccactcttcttattgattttggacaactatagagtatacactacctacctagattagctgcttctaattgcaagtgcaaccatcaataaaccaaccacgcagagaatgcgcatagactaccacgacttcgttggaattgtactgctactctttatcaactctaccattagcttcatggaggaaaataacgctggcaatgctgccgctgcactgatggctcgcctggcaccaaaagctaaggtgcgtatacctctacttacctggacagctggacttccaattcataaatcattctactagttaattgaatttaacttatttctaggttttacgtgatggaacctgggatgaattagatgcatccttgttggttccgggcgatataatcagcgtaaaactcggggacatcattcctgcagatgcacgccttctcgagggagatccgctcaagattgatcaggtttttctggcagctcagccttctcctttgcatctaggactgtcgctcaattctgctaagaggaataactccgctacaaaaatatgcagcaataacaacaccacaatgtatcacttaatttgcagtctgcacttacgggtgaatcgctacctgtaactaagcatcctggagatggaatttactctggttcaacctgtaagcaaggtgaaatagaagcagttgttattgccactggaattcatactttctttggaaaagcagcccatctcgttgaatcaactactcacgttggtcactttcaaaaggtgagtcttcagcaaacaatgtctcttcaattggtctggcataagtttatattttgtttcctgtctcaccatgttttttcctgtatcatgtttcaccacatctgactgtgtattcattaggatacaaactgtaacttctgttgccaatgtcatgatcttggctgccatcgtggatgttttccaggttctgacttcgattgggaacttctgtatttgttcaattgctgctggaatggttattgagttacttgtaatgtacgctgttcatgaaaggaaataccgccagattgttgataatcttcttgtgcttcttattggtgggattccaatcgccatgcctacagttctttctgttactatggccattggatcacacaaactggcacagcaggtatgcctatacacagatggccagaattctctggttaccatgccccatgaaaagaactctggctaccaacgaattgaacagcattttagaagtgactacttcctttttattgtttacagggtgctattaccaagagaatgacagcaatagaggaaatggctggaatggatgtcctttgtagtgacaagactggaacattgacactcaacaaactgagtgttgacaaaaatttaattgaggttgtatgggttcttttagcatgttatattttcgtagctgtagttcattcattaaccacctactgagctaacattttcaaacgaagcacctacccccaccttcccttctgcgtgtgtggcccaattgaaatgagatatggaaagcaagcattttaatgcagtttcagctctgaaatgatttctcttacaatgattgtgacctttatcaataaatgaccatgagcatggttttaattttttaatccatgctgacccttcgcactgactattgatggcattgcaccaacatttatttgtaggtttttgaaaaaggcattgagaaggacgatgttgtattgatggctgcaagggcttcaagattggaaaatcaagatgctattgantttgctattgtttccatgttaccagatccaaaagaagtacaaaactcttgtctgctgatttccttcaaagaattacccattccagtgactcacttctacctatctcactcgaactaacaaatgtgcactgaggaacaatgtctatatcatcctgttctttggaattatccccattgtagtttgatctagacatttagtggctttcaactatcatatgattttacagctggggttggcatcaatcatctgttaactcaagtttacaactcaagtgttccttttgctctatctataattaattttctggttcgttgttacaaggccgatataatgttatcctatgacaatgagtcatattgttaggcatttctagtttatggtcaacttaactttcctatacacttctgttttattctcttctgtctgctgctaggcgcgagctggcattcaagaagttcatttccttccatttaacccaacagataaaaggacagctctcacatacttagatgctgagggtaaaatgcacagggttagcaaaggtgctcctgaacaggtatagattgactctgataataatcaaattcttatctctactattaaaaatttgaagatgtttccgctggaagtttggtacgtcatccgtgtttgagttggttgtatgtcgcttgtatccaattcaacgtgagtctggaataactattaaacaccccctcccagcccaacccaacaggcccacaccatcccaccgcccccccgcctccacttggggccgcgcgtgcccctcccccaatcgctgtcttttttttcttttttcttttactcctttttttccccaatcatcctgatcctctccctctccttccgatctccctttatcttttttttttctctttgatttctcttccaaatttttctcgtcataaatattttccttttgaaattatcattggttaaggtgtgtatgtggcaagtttgtcactttgcaaatactttccatctcaagtaaaaaaaatcactaattggataatattaatttcaatctttagtcgatgaggtataacaaaatacacgagtcaacttatggaatagtcacccgatcgatttatgaggctatgaaaaggtttacataaagggattcttcgtgtgatgacgcatgaaacaagcacaacggtttcagtgatat

SEQ ID NO: 18304 - DNA, 1177 bp, Oryza sativa
acttcttatataccctgatgttacaaaaaaaaaccctaaagtgttgatctacacagtacacctagtagttgtgctgtgcatcacaaatctgttctcaggattgcttagctattttgagcttcagaataattaggaagaacacttccgaatattcacacaaggagagtaaatccttgtataacagcacattgtttgagtgtttcccattttggtgaaatggaacaactatctataacagtctccatggcagttggaaggtacatggacagtggatatcaagcatagttcttatgggtcttgtgatgcacctgtagtacaacaaagctaaacatctaaagaatgaaaggttccttagcacatagttcatcctaaaactcgcaattaaacatcaatatgtaagaaaattaagcaataccaggactgaccatataatttggtattagatgattaatcaactttcatactatatagtttttgttcttttacttttggtatttcttgcccattatctaaaatttttaaaaatataatgcaatttcacctcctctactgttttctttcaaaaaataatattttttgtgtgtactgtaacatcaagaggaagttaaggattaaaacagtactttgaagactatgacttaagcctaaaaggccacattaatttacattcattgactgctttgaatttacaccctaaactggatacagtatgtgcgttattttttaatttgaaattcatgtgttccaaactgggccgttctgctgatctacacccttagggatagtagtagcactgtaaatctgtaataactgtgcttagccaacacctcaaatctgtaattcattatctacattgcagaattgctgatacatcctggactctgtcattatcaatgtggtttgttggaaatattttcaggtgatcagttggctattggtaaggagacaggccggaggttaggaatgggcacaaacatgtacccttcttcatctttgctgggtgacagaaaagatggtgatatcgctgtcctaccagtggacgagctgattgagcaagcagacggatttgctggagtattcccaggtacagattaattttctatctcattgttaatgtctgtcgctctaacttgttttccttccagagcacaaatatgaaattgtgcagaggctgcaa

SEQ ID NO: 18305 - DNA, 2403 bp, Oryza sativa
tccatttttccaatctgatgcaggcttgcagagcttgaaaactggtactagatcagatatatcgtttttagcatttaggtaactcaacttgattcttgagggacttggcatgattaggagatatgattggtcacacaatgggtgagctgctaggatctttaagattatgccaaaccttgtaatattgttactgttgtaaagaatgtgaactctgcctggttacagttatttcacaagaatacatgtgtggtaccttgatgttaattttactgcagctacctataatagctcatctttgtttatttgcagtctggtattttttgcattcttgctgattccctgattaaaatggagatctactcagactatgtccaggttcgtgtagtcatttgcacttgaaaatacttaggtggattttttgtggaataatttattgaatggtgaattgcaggcacatcttgcacctagtggttacatgaaaatcccaactgtgagttttttatgacttgaattcttttttgtcatcaccctgaagacataatgctttttatgttgcttggttgaaattttaatttgatttttcaattattgccttgtagttacaaactatcagaaaaaaaattataagttagtaaaatgatgaaaacaccgatctttcttcaaggcatgataattactggaaatagaatttgatgtgtatttatgttaatgtttcgattaactgaagtttgcataaccttcctatgcttttcaggatatttcagattatttaaagggttgtagatttcttccaaagcttaacaatgagttaccaggtgaaagaaatgccacctacaaggaaaggtttagcagcttagagaatttggtattaatcatggtaagtttaatatagtccaaggttgtattttgattatgttcatgttcaacctccaagactgttggtagcatcggtttataagcgtcaacaattgtgttccttaactccttggtatctacttaggtttatccgatttctacttgtatagcgccctgactgttctagaattctggagcatatcaccagggtatagttgtatggacccatcagcagtaccctggtggcaataagataagttgggtagattgttggccgatgctgatcccctgctaacctgtttgctacctctgttccatggctaaacttgcttcatatgtggagctggagcttatgcagcaagccagcaacttggagttgttcatcattgtggtgtcaccgcatgtgttgaccattagttctatattagattaagttaataaaatctaatgagtttatgatattataacagtgctttcgaagagaaatctacacataatatttcattttaaactaagcatttgggaaattattgatggtccaatttttaagagtttgactaaatcttgtcctaaatgtaaaatatttatgaccagaggggggtaatttattactcattagtctgcctttagtgtgtttatccattgtttaatgtttagtttcaggatgacgctgtcttgatacctcgggaaacagcatggtttggttactatccagatggaggtttcgatcctgtcctgccccctcagaaggttgagccttgcattgcatgtagtgcaaatggaatgaagtaaatcctctggccttaacattggtagcaacatgtcctggtgttgtggttgcagacaaagctgtacatggaggactggattggtctcaagacgctggatgatgaggggagagtgaaattcgtgtccgtgccaggggggcacctgggtatttccaagactgacatgatgaagtacatcgtgccctacttgaagggaaaggacaatggaaaggcttggattgctgcgacttggcgtgccatcaccaacaccatcggtggggaagcgtttgtgctcaactagctactagtactagtatcatgttgcagcctctttcttggctctgatgatgattgtaaaaagatacaggtgtacagtgcaggatacgcgtttcattccctgtgcaagtatatgtattcctcatcatgtatacattcaccaaactaggagttcaagtaacaagtactcctatatatgaagacaaaattgagctgatcttacatgatggtatcacaaatgattcggagaagtagtaacaaatttatttgtgggtttgcggccaccctgggacttccaggcagtgatggcggtgagcagagagcggttgggcacaagtgtcttgtttggcatccgaacattggtgaccggagacacatccttgtcgcacacccacatctcaatggcgtggcgctcgtacgagtagccgtccgacgcgatgcacggctcttgcataaccctctgcattgcatctcatggatgaggtgttagttaggagtttgcatt

SEQ ID NO: 18306 - DNA, 779 bp, Oryza sativa
aaaccctgttcatgaagacggaattaacgagagtggcatagttttggtagcatgcaaagatgagcgctcatgcgtgcagctgcaagaatgcatatcaaaaggctcgcatcaggtaacagttgaagtataatgtagttagcaacatagcatcaatcaacatcttaaatgcaagttttactttgatatatttaaaactaaaccatattaatccttcacacgcttccttgtttttaacaaggtcatgcgggccgagtgggagaagtacttgcttggcaaagctgaactgcatggattgcataggaagaacaagaaaacatctcagcaactaaaagggtttggtgttctggatggggaagttcctatgaggtctggtgagagtgcaggtcctgttagcattagcaaggttgaggctaatgccttacttgcggctgcctctgaaataagcactgtaactaaggaagcaaatcttgctgatgattcaaatgtcagctgcaagaagagatcattcggaaaagggaaagggaaagggaaatttaagaaaaccatggcaaagagagaagccagtaagttgagaaacagaaatactacagaacatactgatttggaagttgaaggtcaatcaggaaaaacaaatgaacaggctgagactgatgcttgtaagttgtctgcagaaaatgattctgcatcagctccagctgttgacaaagctgctaacaatttatctgcttttggagactctgtggataccgaaccactacctcctgtgcaattttacgccc

SEQ ID NO: 18307 - DNA, 3420 bp, Oryza sativa
ttgcgatgaagcctggtatgaatctagccgggactgacgtgttaacttcaggagttagcacgccggctccggctagggacgagtgcctagaggctctcatcattccgacgggacggggcgaggcgtgtgacaggccgcctgttgccacctaacccgcgatctgaccggtctgtgaccggtcacacactgtgaccggttacggaccggataagcgagcgctgcgccgcattgaatgcggcgtggtgcgcttgtccaacccgctataaatgcggttaggtgagccccgctgtgctcacctaaccaatacacgtggcatcaaaaccacagggggtcggggcgtcccagcccttggggccgaaacgggagcggcccgacccctcggggagacagagggaggggcggccacatcaccctcgggcccgacccccccgagggggtcaggccacgtgggtgaccgcggctgccccaaacctctagtcaagatacccccggtcccatgtcaccgacacacttggattggcttaactcactctctaacacctcactagataaactaagtgcacaagggtgtgagagctcttggaagggttcaagataatgcaatggagtgccaaaaccttacccttgctgctggggagtgggtatatatacccccaaccaccaaaactagtcgttggaaccgaaatccccaactttgtgctctgtcggtcagaccgccgttgtgaggccggtcagaccggactactttgtaacggctagaaaactagccattacagggcaatcattgagcctactcaacctggccggtctgaccgcagtgtagtggccggtcagaccgtccacggctcggtcagaccgccgtcgactcggtctgaccggttacggctctggcagctctgtatcgccaccaaaaaccagaccagtgcaacagaccagtggggccggtcagaccggccttaccacgccggtcagaccggctaacagacccgatcagaccggcctaaggcccacggtcagaccgcaggtcacttttcagctcaaccgaccgttagtaaaacggcgatatctcttgactcgggtctcgaaatttggcgttcttggactctatggaaagcttattcaaagggccatccaacccatgaaaaatccatccaataaacacaacttaagtcaaggataaagggctcacactccaaaggatatccaccggacatacccacaagatatcactcactcctattagacatgcccacttatctcttggtttaggacttgagaaaactcatcacacttggttagacaagcccacaaaatgcacctacatgcatatgaactaatatggcacaagatcatccacaagctcgcttcatagacccctcttgatagtacggcgcctatctagcaaatccggtctacaccaaacaccaagaccgggaaaagactaagaaaacattcttagctacattatacctttgccttgcgccatccatcttggggtcaagcttgagccgagatcaacacttgtgaccatccagttgaaccatgtttatgctgaggtcttgtccatcctttgtcaagactttattctcatcacaagcttgacttcattcttgccaacatgacgatgtccttggcttggtgaccactaacccatggtgtcattcattagcctcatcgtagtaggacctattccttttcacacctcaaaggagaacattagtctcaacaaatcagttgtcatccttcacttgatgaccaaccagttgcatatgaaagatatggatatgtttgttgagtattcattaacatcacaagtgtcatatactcgtatgcaagctcaagtgcaaagatcagatataaataataggtgaacaacatggatctagaacatgcacaataaatgtataggatttgctccccctaaatatatgcatacaaataaatatacaagagatgcaagtgtatgcataattagagaatggccaatggggtttatcctatacatatagagaaggcatatgtagtaatgatgtagaccaacataaaacatataccttcatgatctccatgttctcaatgtaaatgagactaaataagataacattcgagtaaacattagtctcacacttatatatcaataacatggaaatcatatatatgaacctatcaaaaagtaggagataagaagtggtacatatcgttttatctctatgcatttcatccttgtcatgattaaggtccatcacaaaagaatgcatgtcttccacatctcattatcgggaaataacctagtagacaacttatgcaaaagagaggttaatcccataaacatcggtttatcatctatcaccaaaataacaattacacaaattgtttaatccaagatctttcaatcttttctctctttggtgatggataataacccgatataaacaatatagagagatgagatgaaaaatgatttcaaatcaagatagaaatcttataataaacaaaatatagaataagctccctctcaagatgtgcatacatatggatatgaaggaacgcatatgcacataatcaataaagatcaaatatgaagctcacactatattttggatccacaagagagacctagttagagtatgtgaagtttaatacatacctctcatcatttttacttccatatccaaatgagactagtcaaagaaaggctcataaaaacgttagtctcatataattagatttgtcattaatcaccgaaaccaaattaaggcacttgaacttacacccactcatccccaccccccccccccccccgccacgtggcggtcgggcgagggcctcggggcgaggtagcacgagggcccgaggggtctgacgtggcaccccgaggccccctggctgcctctgcgtcgtccgagatgtgaggggagagccaggctgtagggtcgcgtggctggacgggaaggagacttccccatacttcgcatacccccgggcccatatcaccgacaacgacgatgtcgaagcaacgaggaccgaggaaagagcggctgcttctcctctctggcgagctcgtgcaccttccttccaacctccctcattgcactaacgttgcctgatgtaccctcatagcctcctccgtctagcagctgcccaacgcgctccaactcgccgtcaacgaccaccttggtgcttgacgcgacaaggccgacctttgtgaagagccccgggtggacctacccggtgctctccggcaccttgagctcccagggcaacatagcgggcgtacattaatgacatgtttcgaaacttgcataattttaatggcatggatctaattaaccatattttttaagagtgcgctaggaatcgtattccagacgtatgagggttgtcatgtatgacttgtatattatctttcgtgaaaaaggg

SEQ ID NO: 18308 - DNA, 10887 bp, Oryza sativa
ttattgttgacgttgacgaggcaggtgatagccttagctatgatggcgatctggatggtgtcggcggtgagctgggccagcggctgctgcagcgggacgccgatcttggcgaaggcggcgttgcacttctgcgtcagggacagggcctcgtccagcttcttctccccgacgtcgtaggcgcgattgttgatcacgtcgtgcgcgctggcaaaggcgaagcccacgccccggtactgcttcgcgcactccgccagcgctggcttgatgcccgccgtgcttgccccggcctctagctcctttatgtcatcggcggcgaggtccgccttgtccacgcccaccagggttgccgccttcgcaagcccccacgcgtccgcgtcgcggtggtgccccagctgcgacaggcacatcgccaagtggacgcgcttgtcgctggcggccgcgtcactgcaggtgctctccaccgtcgcgtccacgcccatagcggccgcgctcaggctcacggagatggccaccacggcggcgagggccttgctcattctcattcttgctctcctcctttttctttctatctgtgagcatctatttttttgtttttttttgggttttaaacaagacatgtgtggacgaacacccatgtatagatggagagatccacgcgggcgccaacaagtgtgtggtcgcatgcggcagcccgcccaagggcactcccgccaatttaggcactactaattttgttttcttctcaaacgaattcaacaagcacaaaaaccatacatcatttaaattattactttgcgacataaaaagtatcaactctctaaatgccacttttaaatttgtaaaaaggtccaaataccctccgaataaaaactttcgataaaaatccgtttaccaccttaaaatttaaaattggacgccaatccttgctataccattcgtattacccgtaggatgattttgcatattaatatattttacgtatctcatccatttatatcatagcgatgtcacacttttattatattggtactcttctataagtcagtgagcaaggaagtgaaaagaaatatttaaataaagattttaccatatatgcacaatgtgtatgtcacgtcatcaaacttatccaacgtacatataaatttgataaaaaaaacactttgcaaacccgtcttaggagtttatatgaatggtagtgcaaagtttggaagttaaatatccggtttaaagtttaggtgctaaatggacttcgaattaatgtttttttgtgaggggggagggggttgggtatttggacttattcctttacgtttttatcgttggacaaataagagttcttaatatattttttgccactcttgtctatgtggcatgacacatctacgtgtcagcatggattggtgatacgaaatgactgttttacccttggtaggttctttctccctcatttcccttcttttcttgtcgcgcgtacgttagttggtaatttccttcaggggcgattgcaatacaactgaatgggctcatcttcttcttcctccttaaccttgttactcttcctcttctaccctctccattctctccttgtaagactatagttgaattaatagaattatctttttttttaccttcctgtgtttataattcatatactactttagtagttatatgctttataaatataatatactttatttacatgtttcacttgattagactagtcatctatggtacgataacgatccaatgaccttgatgggctgttctagctttaacttgtccatccatatagtgggagttctaggggaattaatgtcattatttactagcataagtatggtgcttagataaatgccattggatgcagatatgtcccatgaaaagtgaggccaatccgtcctttgtactcctccaattcgggtatgacgtaagagtgcgtaaattctataaacacgctggcagatcagcagggagtattctctcggtagtacatgggtgcctataactaagtcctagccttgtaagcttgtatgtgttaagtgtatacttagacattaggaatatagaagtacaattatatcatagttctcttatgtcctttttcactatactaattatttagaaatgaatcttttgtgtgccacatatttctatttttaaccggaatgaaaaagttcaaaaaacaccaaaacatgatttttggatatattagaatgtattgggtgcattcgtggcaaaaactcacttcgtgactcgcgaggtgaacttttgtcaattaatgtcgatattggcacacgcgggtgcgatgttatataccggaatcaaaaagttcaaaaagtataaaaacatgatttttggacatattggagtgtattgggtgcgttcgtggcaaaaactcacttcgtgactcgcgcgacgaacttttatcaattaatgccgatattggcacacgtgggtgtgttgtttttatctggaatgaaaaagttcaaaaagcaccaaaacatgatttttggacatattggagtgtactgggtgcgttcgtggcaaaaactcatttcgtgacttggcaatagaagcatccggataatagaggtggattttgatattttagaagttgtctctatagtctagggaagttaagtaaaattttgatcatatatgtgaatggatcaatatgtctcgggactaaaatatatctaaacgaaatcttagttaaattataagattccgacatttacactatggtgggttaattatagattgatttatgatgtataaactatatctttacaacgccaccttctctgcagaaacatacatatgataggaagagatcgacaggagaccccacaggattgcgcagtggtgaaaacgggagcacagtagggatcgatggcgattggactccacaaggagatcttgatgacgtgcgcggagagtgcgacgatgctgccatcactgatctggctctggccaacacgtcacgacacgagcgaaaactggagggggcaggcgcggtacggagtaaatacgtattatccgcatccgttagatttgtccaatgatgaatgagtaaatagactttgtgaattatagagcagatgatgctgtctctctccatatcttcattttttttctttcttctttcttgttagtggacgtcacagcctctcgtggccttggagcccagcgcagacatgagaagagcctggccttcaacgatttggtaaagtctgatacaactccctcaaatccctcattcgctaaaatgggtatatgaaccactcgaaccgtataaaaatgactcactcggtggtggtggtattgatggtttttactaacgtggcgtccacatgacagccgttattaaagaaaaggatgccacgttagagaaaataactatcgaaatagtaagggaggagtgttatgtcggttttggggttgaggatacaaatatttagggagtccaattggaccttttcctcaacaaaactttgtaatcaaatccaagaccaacccagtccaggctccagcccagcatcccgtcgactcgatgatataccagcaaaaggggcaagtgtgagcaggcggcggcggagccatgccgatgccgtcgcgggcgcggcgcaggtccaaatcccggtggcctctcggcgagccccctcccggcctcttccccgctagggacgacctcctccgcctgctcgccgtcgtctccatcgccgccgcagcagccgctgcctgcagccttctcaaccgccgccccaaacccttgtgcgacagcggcggcgccgcctatacccaccatggtgactcactcactcactgctttctcgatctctcgcgcgtattccgtttcttttcctttggctagctgtagctgattatactaataatacgcagattcatgccaaccatgccctccccatggacgatgcgtagacggaaacctggagtgcgtccagggattcaacaaatatggcaacctgtgcatagaggatgggctggtcagccaaactgctaccaagattgtactgcccctttgcttgctctcttgttcctttccctctcattttgctatgcataccttccttttactgcttctccacatatctctatatagtcacagttgctagagcggaggatctgcgatcaatatgcccgtgctttatgtggccaacctgccaaaatcttggtctgttttcgttttactgctccccatcctcatcttcttcattacgactatgtcccccccccctgctttccatgccctcatcctcgtgtacttctgttgcctcgctttcagttccaagagctcgatatcttaaacatggctgatgagctgttatccaagggttttgttggcctaagtcaggatggagctaaggttgcaaaaattaaggttctggacagtgcgcgggccttctttgagaaaacattcagctccgacgggtatgcttcaccactacttctccccctatctctgactatatgtacgctctctttacgtatgtgctgtttcccctttcttgtttagagtcgaagagtttaaatgtccagacctggttgccgagctttataggcccctgacctgtcaaattcggcaatggatctcaagaaatatcatgtctgtgacagcctttggtgtcctggtacgtctatagcattaccatcttagtcatgcagtttgcttaaaggcagttcaattgattattgtacccaagttttcagcactgctctggattctttggactatttacaagagacaagcattatcaaagagggccgaacaaatatatgctcaggtatgaaattcctctctctctctctctctctcactcacacacacacacacacacaattcttccagttctttatcccatgacgaagggttatttgctgctaatttgcataaaacgacgaagtctgattaaccgtatagtaaacgttgttcttgctgtaagctatagctgttattgttttttgttggcaaaatttgattggagttactgcagtactagcattcacttttctggcgcaattcactagtacgtcagcagttccaccatctctttcaccttttccaagcatgagggaggtggtggctgtggggaaaggtggatactttcctttgtccaaaaaacagtagtaaatcatttgtttgtgcattttaatttttccataacttctttggaccttcttgtatttgtcttttgcctgttctcatacaataggtgtgtgaggtccttgaagataatgccatagatgcaaagattggcaactctgaatgtgagccttgggtggtcacgtcttggctgcgagatcatctgctagtcccacaagagagaaggaatgctttcctttggaagaaggtaattactttgcagtatattccactcaatacatagattttgacctgtattgattagcattacccaaattcgaattcttaaaggaaagttccatggagctacaatttttctgtacatgttttatattagtagatgaaagtacgtcatattttcgagcatctgaagcaataattcaaacatttaaaatgtttagaagcaacgtttaaacaatggggcacaataaaattcaataaatttggtttctttggataaccgattaggttactgtgtagtatttgagaagacacttgtacgcgttacattttattttttgatggcgacaagttaaatttcacatttttagtcctaggtgttcatcattacctacacagctttttcttcggttgctcccatggtattttgttctttgaccaccgtcgctgttggttcagtacacgtaattttcagttaaaaatgctgttgagggaatggctcaagcagcgcaacgttgcagctttatttctgagtagaaagttgacatgagtctcatctttaacttatcaaaacttgactactaaaaggaagcgttgagtgggcattaatcttctcatgatcatgtttgcattgaaagattagtgtctagtactagtttcttgatgatgtggagtttatgaaaactatccctagtgtcttgggttggaactggccttatatggcactagaagtatcttgggaaaaggagaaacacactgcccctaatttattgacaagtgcattgtcctaggctcaatatatgtactagtatatgggcataatagagaagtaaaaaaattgcctcagcaagtcgtagcctcattggtctaaccttgtaatttatatagctctgctgctgaaaatttgtcatttcactctccattgttggtaaactaatttccctttctctgttgtattgtggcataggtggaagaactaatactggaagattctcgcatagatcaatacccgaaagtggtcaagggagagtcgaaagttgtttatgagtggcaaggtacaaacatggctcctgctttattagttccaccaactaataaagcagagaagtattgacctgtttgacagataatgtggtgctatttttatttcgtcgagtatgctatcttattagatgttgttttgtggttatatacttatattggtgtgtttgcttgcagcgagcggctcgctcagtggaaagaaaaaggttaagaagatgcaaggtgtagcagcaggcaagtcaagagccgatggtgcagctggcggcgccataaaacttgctgaagaactggatgcaggctagctagagctgccatgcgttatgtatgtacaaatgtttctcaagctactaggagagtatatatcatgatgtatgcttggaatgtactaaattaattgagttaatggagtacgtggtgtatatgtatatgaatggtcactggaagatgctactgacagagcagtcgtcgtgaacgcgccagatggtctcgccgaggagattggcgacggagaggacggtgagctgggggaaggtccggtggtgaagcacggggacggtgttggtgacgatcacctcctggaagaggccgctggagagcctgtcgacggcgggcgggctgagcacggcgtgggtgctgcaggcgtagacggccctggcgccctccctgtgcagcagctccgctccctgggacaccgtccccgcagtgtcgatcatgtcgtccaccatcaccgccaccttccccctgacgtcgccgatgaggtgcaccacctccgactggttgtgcccctgccgccgcttgtccacgatggccagcggcgcgtccgacagcttcttggcgaaggtgcgggcccgggcgacgccacccacgtccggggacaccaccaccacctcgtcggggcagatggtcttgctggccaggtagtccaggatcaccggctgcccgtacacatggtccacggggatgtcgaagtagccgatggactgccccgagtggaggtcgcaggccagcacgcggtgggcgccggcctccgtgatgaggttggccaccagcttggcggcgatcgactcccggccgccgcgcatcttgcggtcggcgcgggcgtacccgaagtagggcacgacggcggtgatggtcttggcggaggcgcggcggcatgcgtcgatcatgatgaggagctccatcaggttctcgtttgccggcgggcaggtgggctgcaccaggaacacgtcgcacccacgcacgctctcctgcagctgcacgtacagctccccgtccgcgaaccgcttgatcttcaccctccccagctccatccccaggtagcacgccacctcctgcgccagcctcgggttcgccgtgccggagaagatgcgcagccgaccaccgctagagctcgcctgcgcctgcgatagcgctggcaccgggaccacgtccgagtactgcctgccgccgtaggccccagccccagccccagccccaactggaagcaacaatcccctctttgacctgctgctgccactgctactgctggtggtgccatggccggcaagcgagcacggcgccgaaatcttgacgaagaaggccatggccaaccaccgacgtatcctctccacacagcagcatctcggtcggataagaatctattatattattaaagaaatagaaaaatgagcttccacgttcgttcgcatggcctagaaattctcacattaatcggagaaaaagaaaaagcagaatccatatagaaatacaattaggaaataactgaaattcggaattaaaaaataaaaaatattagaagaggagactagagtcaatatagaaatacaattaggaaatagttgaaattcggaattaaaaaataaagaatattagaagaggagactagagtccatatagaaatacaattaggaaataactgaaattctgaattaaaaaaaaggaatattaaaagatgagactagagttcatatagaaatacaattaggaaatacctgaaattcagaattaaaaataagaaatattagaagtagagtatagagtccatatagaaatgcaattaggaaataatataaatttgtaattaaaaataagaaatattagaagtagagtatagagttcatatagaaatacaattaggaaataatataaatttgtaattaaaaataagaaatattagaagtagagtatagagttcatataggaatttaaaactaactaaaatttggaataaacataataaaattaaaagtagagtttagagtccgtataaaaatataatttacaagtaactaaaatttgaaattaagaaaaacatgggaagaagagtttaaagtcaatataggaatacaaatataggaatacaatttagaagtaactaaaattcaaaattaaaaattaaagaatattgaaagatgagtttagattccacatagaaatacaattagaaataataaaaattcagaaataaaataaataatattgaaagaagagtatagagtttatatagaaatacaatttacagaaaattcggaattaaaaaaaaagaaatattaaaagacgagtctagagtctatataggaatatatataatttacaactaactaaaatttgatattaaaaataattaataactaacacatatataaaatataatatgaatattacacattagtagtttttgtaaagttattgcaaaatttaaaattatgttgtcatttcaatatatttgaataatataatgagaaaacatatatactattatatgagagaaaatataatgatgctagccgcgcaatctgcgcgggccaccatgctagttaacataaagacgatgagaacatccactgcgcttgaggccggcccaccaagcttctgcctcgcatatattgatcttttgtcatttttcttttagaaaaaagagaaactcataactattttgttatcacgcatgaaacgagacacgcaccttttgtcactatcatttttttgcttatgcttatacttatcagccttgaatttcaactttaaatttagagttgattttgaaggttttttattgaagtttatttttcagcatttgcttttagatcactaaaaacacgcatataaaaattctattcacatattatttttcgtttgcaaatatgctgtttgatggcacccatatgtaaaatgactttcctccaaatctactacattctttcccaaaataattgcaattctagattgtttagcatatattaaggtttaagaagaaagactaaggtgtccctaattaaatgtgtataggtaataaaatggttgaaggtagaatttttttttaataatggattaaaccggcttctatatctgttgaaggtagaataggaagaaattcaaatcaaaagtgattaatgggatagttaattagtactctattgttgggaaaaatttgaatcctaaaaatataattattatgggacggaggtagtacgatatatgcattagcatttcctttcctagccacatatacagggattatcccatgaaaaccatcgaatagatgaagactagactaaaattttcctaaattcattaaaaaaagtacaagagacaagtatatataggaatgaactacatttctaacaaatcacaagtccaaactcatttgcatttgggaggaaaaaaattaagatggccaaacatcgtcgcttcttgttgtaatggttaggagatggggccggtggcgtgtcacgccactggagacgaagaagggcagggcaggatatccgcgccggatttgaggaagagtgatagtatggcgccaaggtgtgacggagtatcggatagggaggcatgcgacagtcgcatgggacgagattcgggagctgcacgaatcttggaacaatctcgaccgttcaaaagtgaatgatattttcttagaaaataaatcagcgggctgatgaatatagacagccgctatatatatacatgaaccgcataaggaaatgcacaaacaacacttgctttccagctgcgcttctaacaaaagaaaacaagaacatattactgatgcaacgaaaagaactcagccatctctcttccgcgtataccaggattcagtgaacccagaaaggactcagcactccaaaagggaaagtactagtcactattcgtgcaactgcgcggagaaatgctcacccattttagttgcataagtgtagaaatattgctactgtgtatacacacttatactgaggatatacaacaaatatactgtctatgtacatgttgacttaatctttctatcttctacgtacaagtacatacctacctaaggatcatcaaaaattgtcagctgtgtcttgtacatggttctgtgatctgatctgatcatcccattttgccattcaagaaaagcggtgctagctagctaccatctcatgatctgttacaacgtgtctgaatttgttgttccttcctgtctgatttcctgaattctttgccgtagccttctcctgtgg

SEQ ID NO: 18309 - DNA, 1164 bp, Oryza sativa
aaaagaaagagagattgaatgaaaagaacacacctgccatggtgacatgccatagaagaagctgcgaagctcctcatcctcgacatccctgatggcgcgagcatgaggtgaatatttgacaacttcatcctgcaggcagagattaatcaaatcgaagagaagagagcaagtaattagtaaatatttatatataaatacgtacgtcgaggataaagagcaaagccataatcggcggagctgcatatccgagtccctcaacaagcgcagagagagatggatggaagccccctgtgcagtctattccggccatctggcatatgaatctcccagtaagtgccatggcggcataaatccctgcacccatcagattattattctattattacttaattgttgcatagtagcatcgattattactaaaatggaattaatttaaatactaaaagtagatgaaataacaggagtcgttagtaccaatgccatagctgagcctgacaaccgctcccagcctctcccacatggccagctccgcgtcccgggctgcgaagcccccgcctcctccgcctccgccggtgacgacgggggcggcaggtggggcagcgacctccacgactctggggccatctgcagccaagcggccgctcctccgttggtcgccgcctcggccctcagctgccgctcggatccatctgcgaactcggggggcgaagccgatggaacagtgggtgtagctgagcctgagcctgagcttgcacgtgtttgtgactgtggaagaggaggaggaggaggaggccgccgcaaaaggggccagctccattaattcacaagatccctggctgccttttcaatctctctctctctctcgatctcgattctacagcagcaggaggagagagtgccaagcggatcaaagaggggcaagaggagagacaaattaaagcagagccaagaggagagacaactaaactaggaggacggaagatcgatttttgttttaatactcctactcctactcctattagaagtatactctgtctatcttgttgtcctacgctagtagaaatgtactcctagcataggaggaggaggagactcatgcgccatttgattttgattaatgggtttccgccattagttttctagtggccgccggtttgctctgca

SEQ ID NO: 18310 - DNA, 778 bp, Oryza sativa
gagcaggcgcgccacaatctggaaggtgcccgcgccgagagggccgcactggatcagcgggccgctaagctcgaggcgcgggcaagggagctggacgcgagggcgcgcagcggcggggcggccgcaggcgacggcgacctagccgcccgtctcgcagccgctgaacacaccatcgccgagctgcagggcgcgcttgactcgtccgccggggaggtcgaagccctccgcttggcgggcgaggtagggcccggcatgcttcgggacgccgtctcccgtctagaccgtgccgggcgacaggcgggcctctggggagggcggaccgcgaaatacgccgccaaccaggggggcctcgcccagcgcctctcagagatggccgggaccctccagcggctccccgaggagctcgaggagacgatcaagtcatcctcgagggacctcgcccgggggacggtggagctcgtactggcaagctaccaggccaaggaccctgacttctccccgtgggcagcgctggacgagttccctcctggaaccgaggatggtgcgcgcgcgcaggtccgggacgccgccgaccacatcgtccacagcttcgagggtacggctcctcggctcgtgttcgccctcgactccgacgaggagggcggtgaccggtggtgcggacgacagcgacgatgaggccggcgaccccggcgcgtcggcgtgagccccagccccccgccatcttaaatagcttttctttcttcttctgaggccttcgggccccctcttgataaactaa

SEQ ID NO: 18311 - DNA, 943 bp, Oryza sativa
atctcaagctatgcttgaagcatactttatctaacctagagctgcatctgaccattgtgagcaggattcagagagtacacattcaggaggaatagctcaaagagctagacatccagaggagctgaaaagaaaccctgacaaatggatgattgatattgactactatttatcgcagcaggttccctttgcatagaaaaagaaatataagcttatttcgttatgctatgtctatattctcttattctggattccgtttacagattcatcctgtagtttcccgtctgtgtgcttcgatccagggcaccagcccagctcgcctggctgaatgccttgggcttgattcatccaaggtgaaaaattcttcatctattttcatctttatatgattgatctattttctgctatgatgttttttgatccttttaattcatggaatcagttccaatcaagattgactgagtctgataatcaagatacgtctagcatgctcttgtctgtaattgatgatgaagatgagaggtaaattacagtgtatgcattttgcttttattactgtgatctgttactttagttagaatgacttgaataatatttgcagatatcgtggttgtgagcccctgcgattatcatgcccaagctgttctactacctttgactgcccccctgtgtctagtctgattattggttctagctctggaaatgtatcaaatccaaatgaaggaaatgatgcttccattaatttttggcgtcggatgcggtgcccaagatgtccagatgacactgatgagtccagagtttctcctgcagtacttgcaaaccaggtgaataacaattaatgtaagatgatcgagcattcagattgcttgtaaaactgaactatattttctctatgtgcagatgaaaaggcaggctgatagtttcatcaatctatattataaaggtt

SEQ ID NO: 18312 - DNA, 626 bp, Oryza sativa
tccgagacagatgtgcttttggctgggttcagttgaaggatcttgcaatatcaatctgatgaattccttgtcctttgtaaacgtcaaccttcaaatatcggtgaatgagctaagaattcctcataggacgtgcaacgttgtgttcttgtgttgtagaagctacatcacatgctgagttgcagacatccaaattacaagatagtaggctgttccgtgagggtgtttctcaacctgtaaagtacagaattttcgtagtatatttcatttgaattcaaatgttatagctgttgcttgggagcagacccagatgagtacctttcgtagtgtttttagtgagtgaatgtaccatgctaaacttgtaaatatggtgtagcaatataagatcccaggatatctgacttcgtgtacgttgtccctactaacctacattctttgtataacatagtatcaaatgtttcccttgctgttatcatcgtcaggtaaaagtgttgctatcctgagtatcacattcataacaagtatacgttcttgtttcagtgtatctggcagatcaccaatgctctgaaagataaaactgagaaggaaagtgcacacttcattctagttccaggcatgctgtttgcctg

SEQ ID NO: 18313 - DNA, 1534 bp, Oryza sativa
accaaagacaatttaaccccaaatatattactgccattctcacaattcatagatcctgtataacagcagctaaaattcaacaactgttaccgtatgacacaaacaagcacacccatttctctcacctgaattgcctccgtgtcaaccgaaggcgttataccaaggaaattcgcaatctcggccaggtctgcacagtccccagcatttcaatgtcagcaccgcactttgatcccaagaacaacagcagtagtgaaatgtttgaaactaaaaaaccttacgttggatcctgctgttctcctcgtcgcggtcgaggctatccccctgccagttctgctgcgtgaacggcgatctgtcgcctaggagcctccgcaacaaagagaaaacgaaaccctcaatttcgagttgggactgtgagggggaaaaagaacgcggaccaaatctacccgcaactgtgcagcaagccttgcagattgagatgcggaaatagggaatgtggcgtgggtggccgcgtaccggaagaagagccactcgaggaggcggtagcgctcgacgccggcgaagaggagggactgggcgggggcgttggcccgcgggtaggccagcaccgccagcttccgctggatctcctccatctgcttcgacgccatggcgagagccctcccactcttcctcgcttccccacctcgccgcgccgcgccggccgaggctgccgctgctggtggtggtggtggggatcgagccgctcgcttcgacggagacaacccaacgagcgagatggtgtcaagatttgcaaattctcaaaatcgaatttgtttttatatttcccttactgtcgtttcaaattctgaaggtgtctggaacttacctgtagcatttgtaaatttaccactgttttttaaaatttatgagctgttcagatggtatgcactttcaacccttctaaaatttgtcattgtcaaattttaacacattttggcactatcaaatcaaattttggtagtgttggttgtgtttagtttgttaacttatcaaaatttgtaaaacaattttttaggagtagaaacttatcgaattaccaaaatttggtagggtagcattgataagtatttcttccgtttcatattataagtcgtttgattttttttattcaaacttggttaagtttggctaagtctaaaaaaaaagttttagtaacatttaaaatatcaaattaatttcattaaatctaacattaaatatattttgataaatatgtttgttttaggttgaaaatactgatatatttttctataaacttagtaaaacttaaaagaagtttaattaaaaaagagtcaaacgacttataatatgaaacgaagagagtatgtgtttggtttatagtctaaccaaaacttgactcttttggtgtagttaaaagtggcaacataataaacaaaccctataacgatgtcactcgaatgataattctagggatatttttataattttctagtaacaatctctcaacaaggatttaaaccattagcaaatgtgg

SEQ ID NO: 18314 - DNA, 2066 bp, Oryza sativa
cggagtctatcgtgcggtgcggttctccgctcgccacgacgacgacgagccccatgcctcctccgccccatcgcggcggcggcggcggccgcgacacgagcgcgttcttcgcggcgacgctggtgctgtgggcggtgtcggtggggttcgagatcggcgcgcgcgggcggcgggagctggcgcccgtggccgcagggtttgccttcttccaggccgccagcgccgccgtgcgcgccgccgtctcccgcgacccgctcttcgtcaacaccgccgtttcgctcctgcactcctcgctcacgtcggcctccggtctggcctctccctcaccccccaaaccccccacttttggttccgtggctttccctattcccgtgcttaggatccatcggatacacgaaatcgtacgctctgttccaacattacgctagtttgaggacatagacgcgcgtggaggattaaacagtaggtaaactagatgatgttgatgcttgatgctttggttcagtactagggaacgggaagcagcatggaatatgtaatcctactgtatagtgctagttttagtgctgcttctgtgggccaaagtggtaatgcaaaatctactaatttgtcttcatttaagctctttttggttggaactgtccaagatagcttacatcccacattacttagtatatgttgattccaagaggtggtgtgcttccaagtagctggcagccaacaggcttggaaacatttccatttcttcaccaaaaaaacatcttctgtttaacataggactgtcttttcccccgttttgtattggaatatactcaaacctctgcaacaatctaatgttactcgaatgtgaaattgagtataaggaatgatataaattgtggtcatcgtacccttttgtatcagcatatagtcgcttacgttacctctgcaacagcctatgactatgttactctaatgtgaactcgagtatgtggaatgatataaattgtgctcagcaaagaaggggactggcttgtcgtggccatgacttgtgcgtactaatttatatgacaatagccgtcctactattttttcatgacacttcttgggcacataattatgactagcaagggtgttgtacaaaactgctagcctctaaacaaaaaaactatacgtgttaaaaaataccatcttatcttggtgaatacgtggacttagtttcatccattaactccaccaaatgttatttctaattcttatgcctgtaaatcagctttatcccgtatgtcttccattcctgactggatgctgttgtatttgcagttatctttgttcttgtcaaccgatggcataataaggacctcaagaacatgtttgagcatgaagaattgtttggtggcagttgggttggagcatattctgctctgtgcttttcttgtggctattttgcttatgatcaattagatatgcttcgttaccgactgtacagtggacggattcctggaattctcatgcaccacctgattctgctcatttgctttacactagctctgtatcggaatgtgacgatcaactacctaattctaactcttgtatgcgaggtacgcctagctcttctcattcttgggcactctagttgtgtagacaaagttcatctttttggcaattcagacaaattttgaatttttgaccccaccttttaaccaggataaactaatttgctcacttatcactcaaagggatagatttgtgtttcagtataaggagtctctattgcacaaattttagccttcattacaaccaggcaaccagctatccatcttggtggcagcttgtctcaagtgtgacatattcagtagttgtttgtaaaaatcattttgtatctctgccctttgcacaaaaggtgcaagctcatgtaatacatatttgatataaccttcatgtctaactaattgttactgagattgaattgatggcgtgtagggttgtatatgatattagaggcttagagctgtttttgcaaagaatactttgttggtaaatacccgcacagactgtcttttactctattaagttgctagagaata

SEQ ID NO: 18315 - DNA, 1163 bp, Oryza sativa
catctacatattgtatgctacggatatgactgtatgtaccttcttttcagagaaaagatgatgtgcaaagccttaatatgctgtggtttgaaataagagaagaactcaacccagtggattgctctttcttttggagaaagtgatgaagggaagagttcttcagcaagtataagctccatgttctgtggcctgccataaaaaagaggtcagaatcaggagagtttgattaatggcatgatcctattacaaagttacaaagcacaaacctgaatatttcactatctttatcaaaacaaagtgttaaaagttgagctgggatttgttcatagtgaaaattaactgtggcaatcccttttgagcatttcttacagtaatctcggtataggtctagcaacttaagcattacatgctttctgacagatacctacaaaaaaggtttaagtgaggcaccgtaataaaacctgcagtagtgacaaaatgcaatagtttatgctgacctttttatcacgtagcctccctgctgcttgcaatattaccttagcaggaaatgagtttagatttgatttggccatatcgcagactgcagcaacagctcggatcctcactttgtcatcaaaatccaatagcctgcctgcaagtgatgctgccaaatacaatattttcatcaacgtgaagaggactctaatatagaaatacgaatgtaatagcaacagatataaatagcagacttactaagaatatcttctgcttcatttccagatgatatagccatgtaacagacttttgctgcatcaattgcagcaattcttacttctgcagatttgtcagagaatctcttcaagaattccttaaaaattaattggttttcttgagcaaaccggagattagataatacaagaagcctcccaatcaggtgaactgcctccagccggatatcaacacggtcgctctaagcaagcagaaaatacacgatcaaggctaatacacatgtaaaaggatatcaaaggagacacgaaataacataccaagagctcatgagttaagtgtggaataacagcaaaaagcatctggggtgcacactggaacatttccaggataatcttatgatgttgtttcctggtttcattagctggcacatccttgttgaaaatgcacgaagacaa

SEQ ID NO: 18316 - DNA, 1522 bp, Oryza sativa
ccattaagatcactcctactggaaaatatgctatagctagcttttctaacacgcataaccatgaactcataactcctagcaaggcccatttgttacgttctcagagaagaatgacagaagctcaaaaagctcaaattgacatcttgaatgattcaggtgttagacccaaagaaggccatgaggtgatgagtaggcaagcaggtgggcggcaaagtcttacatttaccagaaaagattataaaaattatctccgatcaaagcgcatgaaatctatccaagaaggggatacgggtgccattcttcagtacctacaggacaagcaaatggaaaacccttcattcttctatgcaatacaagtagatgaagatgagatgatgactaatatattttgggcagatgcaagatcagtattggattttgattatttgggtgatgtcatatgctttgacacaacatacaggacaaataattatggtaggccatttgctctttttgttggtgtaaaccatcacaagcaaacagttgtttttggagcagcgttactgtatgatgaaacaacatcaacatttgaatggttatttgaaactttcaaaagagccatgtcaggcaaagaaccaaggacaatattaactgatcaatgtgcagccatcattaatgctattgggactgtctttcccaactcaactcatcgtctctgcgtttggcatatgtaccaaaatgctgcggtacatttgagtcacattttccaaggttcaaaaacatttaagaatgattttggcaagtgtgtttttgattttgaagaagttgattagttcatatcagcatggaacaagatgatagaggagtacaatttgaatgataaccaatggttacatcatttatttgagatcaaggagaagtgggctttagtttatggtcggcaaacattctgtgcagatatgaaatccacacagagaagtgagagtctcaatgccctgctgaaatatatgcaacatatggattggttcttgaaattttcttttatttatatagagcaaacactcaggcacaaaattgggctttttttacatctcgatctgcagttcaatgtcattaatatttccatttgcaatctaaacaatatatctatgcttatggtgtgtatacattatagtacaagaaaaaattattaagcagttagacattaacctgtgacaggcttggtcgatccagagcaagcccaacctaatccatcaggactgcatgacctctccctgctctaagtctccatggcgaccacggctccttccgccggccactctcccacggtgagcgatgcgacctcctcaggacgccccacggcaagtgcgcaagcctgtagtggcacccggcaagcaccgccgccccaccccggcggcctgcctcgagaccgtcgtcctcttcgatggcccatggtgagcaccacttcccagccaacggcaggtgtgcaggcacatttgcagcagctggcaatggcgtggtaagcattgacctcgctcccgac

SEQ ID NO: 18317 - DNA, 2047 bp, Oryza sativa
agcgcgtcgcggccatagaagggattcggggagacgtggccgcccgggcgcccgtcgcgcaccctatcctcgccgcgcgcccgccggccaatcgccacccctgaatccacagccacgccacgcggcccatgcctacgcctcccacccgccacaggatctccctctcacgcgcgcgcgatctcataaaaacctcgccacctcgatcggtgaggtagcacgaggcggcctgagctgaacaccgcatcagcagcagcaagcagctaatcgcgcacgtacgcacaccgcgacccggggcgagatggcgcagtcgatgctggtgtcgggagccaatggcacggtggccgccgcgagcaccagcaggctgcagcccgtgcggccgacgccgttctcgcggctcgtgctgtcgcagccgtcgtcgtcgctggggcgcgcggtgtccgtcaagacggtggcgctgttcggcaggtccaagaccaaggccgcgcccgcaagaaaggttggaatttggatggatgaatgcaagctaaactaagctaagctaagctcgcgtttgttttagtcttatgtttgatggtgctaactattttgtaacgtgtcaacgtgtgtatgtaggctgagccgaagccaaagttcaagaccgaggacggcatcttcggcacgtccggtgggatcggtttcaccaaggagaacgagctgttcgtcgggcgtgtcgccatgctcgggtttgccgtaagtagacctttcttggccttctagttatttggtatgcatcatttcttgccatcttggtacgtacctgtgcgttcgggtttgggttagctagctagcaagagcacaagcttaaacgtcaaaagttttgtggttaacggaagcactttacccgggagcgtcatcctttattctataaagggtcacatgttgcataggtagatttgcttccaactacttttttttaaaaaaaaattatagtttttgtcatatattttactttgaattttctgtgcacataaaaatgctatatttctccttagcaaatattgctacttttattttatttttcagtccgagttttgacagcgacattgtttaatctaggccagttagcaactcacatgtataccacacacataactaatgaattatctggatttagtaatataggtattgtaggttttaaaaaattcgtctttcgagcagatatattgtttaatgagtaaattttagagaactataaatttagtgactaaattatcagcttgttgtaacgttagtgacatattatatttcagtttaggaagaagaggggatttctgaaaaaaaaagaatgaatctccttcctgcagcaataacaaagaaaatcattataaatctacaactacgtgaacaacctaacgttaatcctgctgaaacgccgctcagtcggtgcacctgagtcaaaacctcattccaaggtagggcaaatggccatttcatcttcccctttgccctttttagcttgatgggttttaacctcggtgcaccaaccgagtgcgagtagcattctagtcggaacaaacggaacaattagtttcaggccgattttagttacaaactttttcttcaaacttttaacttttctatcacatcaaaactttcctatacaaataatcttacaacttttccgtcacatcgttccaatttcaactataaacttttaagtttagcgtgaactaaacacacccctagtggagtcgaaccaaagtgatgcacttagttgtcggccgatgtggcatgctgctacgatgcacatcttgacattgacgtgtcatgaagacatgttcctccatcttgccacactatatactacctctatgacacgcgatgtccatgtatcaataatattactaggatgtatatgatgttacagatttgtgatattttttttcttttattactgtaacaaactaaaactggttgtaaatgttgtagcacttagatagtttagtcactaaatttacagtgctttaaaatttactctcgtttaataatttgtatagtgtacatgcat

SEQ ID NO: 18318 - DNA, 778 bp, Oryza sativa
atctcgcgggccctgaccgcgacgacgtcgcccacgcggacgtcgcgcacgctgacgacatcgcccgtcgtcgcgaggaccgccttcgcaggtagcatgcccatcaacgacgacatctcggcactcgcctgcaacctcgcaacgtgagtgttcgtccaggtttgtgtaagatcgccatggatttggtgaagaagacgataacattgacatgaacctttgtgcatgccagtgtctcgagccattctgcggtggtgaagaggaagacgatggcgcggcagagcgcgccggcgccggcgatgagcatgaggacgttgatgtcgagttacagctggctcgccgcggcgaacccacggcgcaccatcggcggcgcgccggcgacgacggccgccacggccaggcactgcaagggagggaagagccactcgaagaaggaggccatgaggaggacgccagaggcgacgatgtacgggctcggccaccagatgaccatgccgctgctgccgtaggcccacaccgacgcctcgaggccggccttgttcagcgccttcactggactccagacaaagacggcgacgagccgacgacgactcgattccgtgagaatcttgcgcgagaatcgcatggaggattaatggcgcgcgcgcggtggcttacctatggcggactccgtggcggcggcggggtcgtgctcgacgacggcggcgcacgaagccgataggaggagtggagtgggcggcgcgggcgaagccggcaggcacacggagcatcgacggcgggc

SEQ ID NO: 18319 - DNA, 6918 bp, Oryza sativa
  unsure (1)..(6918): unsure at all n locations
tcaggatacttgaataaccttgtagcaagtcgatcatttgctttttgtggcttgtagtattgccgttgtgccaattgtcgttgtgttcttgtgtctgtagttcgtaactgcatagatgaaaactttaacattagcttatattgaaatatcatgccgagagctctctttcaaggctgtgtacggctgcacgttgcagcggctgcaacgctgtacaaaataatgtgcgaggcggccgcagccgcagtagtgcagccgtaacaggccccaagtttgtgcagtacttgtatgttttttcttttttctttttttccccctttgattctttagacagtagtaagtttcgctaagcaaatgtaccttttttccccctgaaaacggttctaaatttgacacatcaatgatgaattgaatcaagtcacagcctgcacgttgagccacttcccggcgcttcgttttccggatgctgctgccgtaagagctagccttcatcaatactgtccattgtccaacacttgtatgttgtgtttgctcttcttgatcttttggcggttgccaatttcagtgtacagatcttcaaaacttgacaccatggttctgaatcttctgataaacgaagggaaaagcctgcatttctacagagccacagcgatgcacgcacttgtgtttgtgtacgtataatcaggcttgacatatttgctttcaagagttcaagaccaagcatttcccagtccgatcgcagccacacgacgtttcagttttggacgtcacaacgccgccggcgtacgattgtacgagctgagggcgatggactacccaccacctactccctctgtcaaaaaaaaaaaaaagacaaatcctagggtttttttttaactttgactgtccgtcttatatgaaaatttttataattcgtattttcattgttgttagatgataaaacatgattaatattttatgtgtgacttgtctttttaatttttttcataattttttcaaataagacggacggtcaaacgttgagcacggaaagcaggatttgtcttttttttgggacggagggagtactccgtctttcctaaaaaaactcaacccctaaaatttcagtacacaaatagtagagagagaaaatgtcacgttaatacaaatttattactattgatgagtggataggaaaagagtattgaaagaataaaatttatcaatttacggtttaagaatagatgagaaggtagatattgatttactctaggacaaaatttaagattggaacagctagattttttcacagttagatgagctttgagatgtgtgcgtcaattggagatatactccctccgtcccattaaaaaacaattctagaactagatgtgacacattctagtacaacgaatccggacagatgtatgtctagattcatagtattaggatgtgtcagtactaggttgttttttttatggacggagggagtaacaattaaccaatgcatgcagtggtcaaggattgagaacccacgatctgtcgaatgctcacgtaccactaaaccaccaaactatgccaatatcatagttatgttacaatatagttacaatgtaattacgtatcaattatactatagttatatctaaattttttttaaaaaaaaacttatcactgttttagatactcccttaaagatggtagttagggcatctccaagagaatgctaaacaggttactaaaacataaattttaggaatttggtgaaaatcagccctccaacagactcctaagcatggtcccaaaatttagccacctccaaaaccaggaccaacctgaaccaaatattgggcaactagaagcgctcccaaattttagtcctctcttggagaagggggtgtattttaggctaaatatgtttttggctgtccccaatacatgatttttgggagtttaattttagtcatctattggagatgctcttactccagtttattttgggaatgagagaatactactctacctccgaggcatcttcagccatccaccattccaaccgcaccataggagcaactcctttgggcttcagcgtccgcaatatgggccactttaattggtcctggaatgaatattagactctccaacaatacgagtgacctaaagtgaacttatttctcaattggtccatggaggccacactcgaatcgaaatatgggcctggcacatggaggcccatttgaaatgaaggcgatgtgccctattagaaatgaataagttcatttcagatcccttaactttacaccaaatccgattttcgttcttagaaaccaaaaatcagatgcaaccggtccctgaactgtcaaaatctgtgcaaacgaagtccctcgacggtttgaaaggcgattttgactgatgtgacgtttgcgtggctggtttgattaggacttcgtcccacgtaacattgacatggcgcatatgcgacaatttgatcccggaaaaataataaaaaaacgtaagcatcacgtcagccaaaactgtctttcaaaccgtcgagggatctcgtttacaccagtttttgacatatacagatacaggagccggagtcggagccggatccagaattccagatacaccgtgtatcatacacgaacacgatcaatcacctgattccttcaactgtttcgtcagccatgacgagcgtttctttggctcttttcctccgaagtactagtactacattcttctcccatccagtcctcagcaagcaagaacttgggcaatcagttcactgtcctgcactgcgcctgccgctaactagagatcgaactatcgaaggcaaggcatgctgccatggacaagaccatcgttctgtacccgggcctctacgtcagccacttcgtccccatgatgcagctcgccgacgccctcctggagcacggctacgccgtcgccgtcgcgctcatccacgtcaccatggacgaagacgccaccttcgccgccgccgtcgcccgcgtcgccgccgccgccaagccgtcggtcaccttccacaagctccctcgcatccatgaccctcccgccattacgacgatcgtcgggtacctggagatggtgcgacgctacaacgagcgcctccgtgagttcctccgctccggcgtgcgaggccgaagcggcggcatcgccgcggtggtcgtggacgcgccgtcgatcgaggcgctcgacgtcgccagggagctcgggatcccggcgtacagcttcttcgcgtcgactgcctccgcgctcgccgtgttcctccacctcccgtggttccgcgcgcgcgcggcgagcttcgaggagctcggggacgcccctctcatcgtccccggcgtcccgcccatgccggcgtcgcacctcatgcccgagttgctcgaggacccggagagcgagacgtacagggcgacggtgagcatgctccgcgcgacgctggacgccgacggcatactggtgaacacgttcgcttcgctcgagcctcgggcggttggtgctctcggtgacccgctgtttctccccgccaccggcggcggcgagcccaggaggagggtgcctccggtgtactgcgtcgggccattggtcgtgggacacgacgacgacgacgagagaaaagaaaacactaggcacgagtgcttggcgtggctcgacgagcagccagatcgcagcgtggtgttcctctgcttcggcggcaccggggcggtcacccactcggcggagcagatgagggagatcgccgccgggctggagaactccggccaccggttcatgtgggtggtacgagcccctcgcggcggcggcgacgacctggacgcgctcctgccggacgggttcttggagcggaccaggaccagcggccacggcctcgtcgtcgagcggtgggcgccgcaggcggacgtgctccgccacaggtccacgggcgcgttcgtgacgcactgcgggtggaactcggcgtcggaggggatcacggcgcgcgtgccgatgctctgctggccgctctacgccgagcagaggatgaacaaggtgttcatggtggaggagatgggggtcggcgtcgaggtggccggatggcattggcagcgcggggagctggtcatggcggaggagatcgaggggaagatcaggctggtgatggagtccgaggaaggggagcggctcaggtcgtcggtggcggctcacggcgaggccgccgccgtggcctggaggaaggacggcggcgccggcgccggctcgtcgcgcgcggcgctgcggcgattcttgtcggacgtgggcggccgcgagcttcgatccgttgagactttactactttgggccttccacgagattgtcgtggcacgcattgggctaccactggactaatatgggcccaatatggcccagtttatttttggcattctcccgctcgagcgccccgttgggcgggaaaccaattttgatgggggaccactttgcgtgtataatttgtatactgtattattattaaccgataatttggataagctagattgcattgcggagtaatgtaatttgtaaagaacactatggtaggctgcagatataactcttttcctcttaaaaaaatatacgtttatacgattgcacttctggtacatgcattctaatctttactcccccataaaaaaaccaatactaaatgtgacatatcctaatataatgaatctgtatatgctatcacctagaggataatgattcttttgggtttaaattctatcctacaattaaaatgcataggcgctttttactattacttcctatgtttcataatgtaagactttctagcattgtccatattcgttcaatgctagaaagtcttacattgtgaaacggagagagtaccttataagcacattttgtgtaggtgtttattcactactacttttatatccacattgttcctgtagagcaaagacatcttagacatgggctaggatgtatttatacatctgtgcacgtataaatttccgtatttagaacgaagaaaaataacgtgcacaactttatacttgagtacgttgatcgagaggaccaatttaccctcggcaaaacccaccgtcactgctacccaactccgttccatggcctccgcctccgcctccgccctcgctttcgcctccgccgcctagcctccctagggtttcgggttccgagatccgtgccgccgcaatgcccgcctcgccggagcaagccgtgcgcgaggtcggcaagcgcctcgcgcagccacgcctcggcaaggacgccctcgtcaagcttctaaaggcgagcagcgtcgcatccttggtttcgtcttgcttaaatcggtctaaatcaaccgcgcttccatttccggtggaacgttgtttcgattttcgagctttcgaactggttaggggcgttctgtgttgccaactagagcggtatttgctacatgtattggtaatttctcagttggagatcaggggggcacttcagcctctatatatgtggctaccactaccaatgttatgagtttttttgttgacgctttggcgaattcgagtaccatgctgcattttctaatgatattctgctgatccgctcacatgtccacgcgacactgcagtaacaatgtagtagtgctgaggaagttgtgtatccactatgcctgtgtttgaaaatttgaatgaatagagcttccgagtaagtctctgacttaggggttttagggtcatctcggtagtttgtagaaaattgatttgtcgaaattagttttggtatgcggatatttctgattggcatccagtagaggagtcgatggcttaattttgtgttcatgcgaattcgaagtagccatagagacttcagttaattcttatatttgattnnnnnnnnnnnnnnnnnnnnnnnnnnnntgtcccaagttttcctgccttttgaattgctgagttgaagaaagttgctctccattgtaaacttagtgggtaaggaatgaatgataaccaagacttacacctattcattgccttaaattgtgattcacacttgagcagttcaatctatttttccttttccattttacatgatagtttctctggcagatctactgggattaaattaatttttatttgccttatggcaaatccaattctagtcacttgtctttgtattttattgatggtcaagggcactgactatgttcaaacactttgttgaaagttgaaactctgtttaactattcacttgctcttattagacaaatcgttgtgataccgtctcaacagtccaaaattgaactttgtagtgcagccaaatgcactttggagctactgatgaacattcaaatacttaactggcatcattgtaacaattatagcttcaaataatacacgagtcgatgttctcagcttcaatttgctgttaactgattgcttctttacattatcttttctctgaataggtttattctgtacttccataactgcttctgatatttttttctgcagcaagctgaaagtgctttatcagagttgagtcagtcctcctctctgcaggaggctctacatcctctgagtaaatctctggtccagaccacattacttacccatagggacaaggatgtcaaacttcttgttgcagtttgctttattgaagttatgcgtgtccttgcacctgatccaccttttagtgatgaaatatttaaggtatttaacctagtccaccttcaatactgatgattggttattgctgacttcttcaattatttcctttagtgacaacctgataggtactacctaatgaccatttttgaataggatttctgaaacagtaatcatgttagatttatttaatttaatttagtggcagagaaaattttgagcaaggaccattctctcttgacactctgttaactcctttttctcaggaaatatttaggctctttat

SEQ ID NO: 18320 - DNA, 4885 bp, Oryza sativa
tcgcatagcctaaaatctcaacaaatccaaccagctaatatggtgtaaatatcacgctgcggccttcctactctagtagcccaaccaccaactacattgcagacaagggactaatatgaacttagctaaaagttcctgaatctaaacctagcgaaagctaaaccgatcaacccctcggaacaacccatcgatctcggaatccacgcccaaagctcacgggaaaaacacgagaccaaatccgcacagatccaaccacggagaagcaggaatccacgcggccgacgggaacggcgggggccccctaacaggagcagcacgggcgcgcgattagccccccaatgcagccgcccctcgccgcgaggcgcagcacgacgagcgcgtgggttgggggggttagatccagaccttgcgggtggaggtggtgggcgagctgggccgcggcggcgacttggccgggtcctccgggtcaaccgcctccgccgcctggctgagcgggatcgacgttgactcctccttctccgccatggctcgcgcccctcctcctcctcctcctccaaagctagctcccagcaagcggcgcggccggagacgagggcgaggcgaggtgaggcgtcgctgccgctgcttttggctggcggctagtagcagcaagcggttgatgcttggggtgggttgggttgccgagagggagacgtcagacgtggcgtgctggccccacctgtcagtcccgctttccgacgccgtgaaaccgccgtccgccacgtggcttttctcgaatggctggcaggtgggacccacctgcgacgcgggtacacgtgtcggcgcggccgtggctggcgcggttaaggagacgggaggtgacggcgtcaacggggaagcgcgtcggctgcggggtttgggctggcggtgagctggcccgggtggaacggaacggacgtcgggtgggccggacggaagcgggggttggaagggtaggacggttcggaatgtggggcccagtccacgtcagttcaacggccgttgtccatgcacccgacggcggcttcgggaacggaagagagttcgtctgggcccacctattcggcgtttacttattggtcccacatgtcagaggacagagtacgttccggactaccacttggagacgctaatgggccattttagtttcacagactcaacgtgtccacgtaataagaacatgggcctgtatgcggagttggatctttgttctcaactttgctggtgcctaatttgaagccgataattaattcctatgtcgctcttccataatcttgggcaaaatcatttccaatcggaataattaggtcgacggcgatcgatgttgacatggtgatgttggccaatctactactaatatccaaggcgatatcgttgttagaatatctatcatccaaggtcttgcaagacatccactcattctctagtattctatacttctaccatttaactatttcagatcttacatacacgcaggtcttttatagtaagaatttatgctagtaaatttggagatgcatgcagtggtaaggggtgtgtggttttaaccccgaagtctcgtgttcaatccctaacacgctcatgatctattcttaaaaaaatatttggagggtcatctctccctcaaaatctcatttcttttataataaatttgtcctatcttcgctttcttataagcacatataaagacattcctattatgtgtttctacttgtcttctgtccgagtaactgattttacgcagagatagattttaaaaacatttttttctagaaacacgtaatagagggactcaaaacatgtgtgcactcgtccttacgtacatgcgcgcacatcctatttcgatgaacatatctaaagaccggacggatatatattgatgttggagatttcatatgtaactgttgatttggtttctatagatatgattcgttttttgcacataaatatatcgatagtccctgccgttttaacgtgaaaccatcgcattcaaatcacgcatctcttttttatttttctcgatcaacataataattaggagaatacatcttcaaaacgagcgtggtgtcttgttttcatccagtagttggtgtaaacgtccttagcgccaatgtcgtggtataaggtaggcaagcatctaacacttgtgcaatccaactgtctcacatgtctacccaattctataagaccataaccagagacaaagattttgtgccttgttaccaaccattactctctcataaagaactcggagaatgcatgcttttacatccatctaacaaatctagtcctctcatcgttcttcctcttctaatttgcacccaaaacatgatcaaagaaaaagaaaaagaagaaaaaagagaaaacaatggagatgcatcccatattcccataccaccaaatctaatcaacgaacaaaagaaaaaagatcagagcagaacgcgatcagacaatctgcgacgtccatctccgtctctccgtctcatcccagccgtccgtgcttaccttattcttccagaagcgaaagagagcaggacagaatccggcggctactgcgtgtgcggcggcggcgggtggtggtgatagctcgactccgaccatgacgccgccgtcgccgggtagaccagggcgttctcccagttccactcctccgccgccgacatgctctggtgcgagccgccgtgggacgagtagtagttgcccggcgcggaggaggtggaggaggggacggtggccacggaaacagagggggtagggaaagagtagtaggagccgaggaagccgctcatggcgccgccgccaccgcctccgtagggattggtcatggagccaccgccgccgccgccgccgtagaacggaagaagggtgccttggttgggggtggcggtggtaagcctcccctgcagaagcatctggtagcgcaggtactcggcgctctgggaggcgccggggtagatggccgcggaaggcgatgccgccgcgaccggcgccgggggcggcgccgcggtggtggtggtggcggcggtcgggtagaggcgcgcgtcctcggggaagttgagcttggcgcggctgccgcggaaccggagcgcggcctcgtcgtaggcccgcgccgcggcctccgccgtctcgaacgtgccgagccacacccgcgccgccttgtgcgggtcccggatctccgccgcccacttcccccacggccgctgccgcaccccgcggtaccgccgccgcggcgtgtcgggcccctccgcgttcccgccgccgcccaccggcgagtggtgctcgtccatggtcgccgcgctcgcgctctgggtgtccgagctctgctccgatcctgcacacgcaaccacatatttatacacgcgaccgcacgaggcgtgagcaaacgacacagagaaagaaagaaaagagcaaatgcgaattcaaaacctgctcgctttaccactattaactactatacacacacatgtagtatatgaaatatgaatgcgatgtggcgcaatataaattataaaatgagaagtggacgatctctatcacaaaacgagtgtaattatttttggaatgaactatacaaatgcaagtgatgacatgacaccagcttataattttattcagacagcttttttttttgcccatgtacttttaataacattttttcctcatttatactttccagtagtatcttttgtgaagtgtatatatcctgtgtgttacgcaagcacatcgagagagagagagcaaatgcagtgcacgcatgcagcagcgctgcccaacggattcacatggggaatggcttagctgtatctttgttgtgttgcggaggtgcagtggattcgaagactttttttgtgctgtgccggtgaatggcgtacaactgtgtcgtgcagatatggtttgttttgaacccctgatgtcagctgtaacatgcagatatggcgaccaccctgccgctcccgtcaaatactttgatattaagcttcgggtcacgcatgcgtgtgacttatcgttacgctcgcaactgcatgggtatgcatactgtctcccatttgtttcgtagtgacaagtggtattgctatttaagcttaataaagaaaattgttggttttgggcgaaaagaaaaggaaaataatgttttttatgtttgaatggaactccgctgtaaagctttaaactatatagaggtgcaattggtttgtcattttccgttcgcttaactaagggtataacactggaaaagactatacatactatattttttttactaaattcttactaaaaccgatgtgtcatgctacgagtatatttagatttttttataacatttatctatctaaatcaaatggctgagattattgttagtataaattttagtacatgtagcagtgctcgggtacatgcatgctctggaaattttttttaaagaaggtcaccacatgtgtatattgcaccgtacaaattccaaatggagaattttttttagatactttgaacagaggatatgatatgaaaccgaagttaaaatatacgcaaaagcgcttatatttggtgaatttttggggggcatgcctaaaaagttgcaactggtttgtccattgaccatgcttgccacgtttcgtgaaaaaaaaaagttgcaaagcaaagagcagaagttggtaagcaaagcgtacgcgtgttcgctgttccattacctgcgaactccggcgatggcgcgcccccgcaggcgtatcccgccagctcgtgcattgcctgctcctcccgcctcctctcctgcacgccacgcgccgccgccgccgcgccgcccgccacgacgcgcgccagcgccgacaccatcgtcgacatctcctgcgcctggtaataccccgacatg

SEQ ID NO: 18321 - DNA, 11574 bp, Oryza sativa
ctactatacaagaatggtatggataaagcccgattgaaaataaaaatatgagagcatcaaagtatctcgttttcttaaaagggaataaaaagggggccataatataacagaggtatcaactctaatttgggtggatgaactccaaatttgattcatcccccccttttggaatctaatttataatgtatgccttaaatgataaaaatatacaattgttgtactacataaataacattggtgagtatagtctctatctcctttctgtatcgccgtggttattcttatacgatgggttcatgaagtagagtttggaggggaggaagaaaaatagagcaagagtaagaaaagaaaacggtgcgaataaagacattgtcagtttgttaccaaaggtaagagaaaatctatgatatgataattttatatgatcaaaggagaaaccgtctaaaatattttagatacatgatggatgcagttggcatggacggcattctcggagtcttctcctatgactatctcccatcatgtggtttctaggctctccatcaacacctgtagttgatagtgtggcgggtttacttgcgatgcaaagtttgccctacgtcccgatcaaaaggaggttgcgctacctaatacgttcttctctggtgagctactcacaattgcaatggtcttcttacttatttttggcggtggcttttcatggtgtggctgaatttctctctcatcatcgaggttgcctcaacctccaacttttggacgttctatctaagtttgcgtcttggtgtcttcttctatagctcgtaatggttttactatcctagcccatgttagtccaaccactattgttgtggccaaagtgaagccaagtagttagttgcttttatttttctttcattttttaagtatttctttgattgttttcatgatcaaactgtaatttatctatcttcaaagggcttctttgattatcttgttgtacaatcatatccaaatatccacttatagggcctaattcaaaggtgagacacgcctggcacacaaaacgagtaacactattaatgctatattaacttagtattaactgttataattttaatgatagggtttatttgaatttttaaagaaacgtttatatacaatttttttaaaaaataaaacacatcgtttaataatacatggagtagtaaacgagtagctagcccaataaacccaaatgagaaagtaggtgtgtctgagagtaggaaaaaggaagattgagaaatatgcaaaagcaacgtaagttattagtgtatgacaatttacgtattaattatttcaatattgtaaataaattcatatacactactacaatagggatttttctgtgcggatgaaatcgattttcgcgtgcggaggattcgaccgtctagaaggaatcgtctgcgaaaatgcgcgatttttcgtgcgggcgacgcacttgcacgcgaaaatcattttttgcgtgcgggcgcttaagttgaaaccaaaataaaagaaaaaacaaaccctaaccctaatctagccgccgccgccggcggcggcaccgccaccctagccgaggcccgccgccgtcatcccgcggttgccggcgatggatccattgtcgccgcggtcgccggcgacggatctgccgccccctaccgtcgttgacgccagatccgctgcccgcgcgctcccgtcgccgccgggaaaggaggggaggggaggagccgcgggccccgtcgtggccgccgcccccatgcctcccctccgctggtgccggatgcaaggggagggagggaggggagccgaggggaggggaggggccgcgagccgcgccatctgccgccgccgcctgcgcccgcgccgctcgtgctgccgcctgcaccgcccaccccctgcgcctgagagagagagatcgagagagagggctgagagaccaatagagaggagtgagacagagaggtccgttcccgaagacccagacttaggcgcgcgcggatgggaaaaaaacaaaattttcaaagtgggtaggagggaaactatttttccgtgcggttatctcaatagatctgcacggaaaaatcggtctattttcgcgtgcggtcctaattaccacccgcatgcaatcttaatgggtttttgtctaggaaaatcacttgtatagtgtgatatttacatagcaacttttttctatagaaaacttttgcaaaacatattgtttagcaagtcggaaagcgtacgagtgaaaaacgaaagatttttttctccctctgttctccacttctcctaaggcagtttatgcataaaaaagagtttatcaaatggcaccctccaaatccaccttttggttcgaaggcgtccatgaatcaccaaagtgttgtatgaagaaattagctcagcaaatcggaacttcacatgaaatggatgatcttgcttttttgtcacgaagattttctgctggcacagtggcacttcaacctgtgtgcgtcaaactgttaaccaaaacgaaaagatgagttaaaaaaaacgaaacgaaaagatgtactacttcttccgttctaaaatataagtatttttaatgttagcacgggtattaaaaaagtaggtgagaatgattgaagaaggtgtgtgattggttgaaaagaaaaagtagatgaaaaagaatgattgtgattggttaagaggagaagataggtagaaaaataactttattttgaaataaagtactgtgctaaaaatagctatattttaggacggagtcagtactacccaagtttatctcggacgaaactttgctgtcaaatgtcacatcgttaagacaaatatcaagacgtgaattttggaaccacgttaagctgacacgacaaacacggagcatgttggttgatactccagtacaatagtgtagtacttcaaactagacttttcgttttttatatttgtacaattttttttaataagatgagtgttcaaacagtataaagacagatgaagtagtagtagtaagattctaccatgcggggaccacgtacgactcatgggacatgccattttccgaacatgtacggcaccgatgtcgtatccagataacgtataaggggcaaggaggagaaatcaacggctggatcgcgacgattcagcgtgcggcgatccgagtgccagcgacgccgctgccatcgttttccctccctcgcctagcctcactgaacctgagccgttggttgggaggcgacgacgtggtgcgctcgtagccgtcaacaggctcggtccgagccttgcatacagctaaatatacggtggaaaactccggctaatctaaaaaatcacgtaaatcccgattaagaagtcctgttaattcacagaaagtcttacatacagttaatatgatgagtccagttcaaactcgactaagtttattgagatatactctaaaaattaacaagctttaagaatgaaattgagccgactttttacacagctatgtatcttgttggataccagctaaacatccgtgttttgctatagatacaagaaaaaatatcataatattttctaaaataaattaaaatgtattttttatgaaatatgttaccaacatttttttataggacaaagtgtctatccacattaattttatactccatctgttccaaaataagcgtagttttacactgttcatatccaatgtttgaccgttcgtcttatttgaaaaaaatttatgattaatatttttattgttattagatgataaaatataaatagtactttatgtctgaataattgtttttttaaaaaaaattcataattcttttaaataagacgaacgtcaaacgttggatacggatatctatggctgagcttattttaggacggagttagtatgtgactatccatttatatttagttgttatgtaatattaagaaatttaagggttagtatgtaaaaattgcaatgatagtggatgatgtatcatcactatcactatcgttggagtcttttaaaagagtatagaaatgattctcacctgaattttccattgaataggaatgagggtatcgtcaccctatctacctgttaaattttctttcataatttagcttccttttttgttgagatttgtatcgttttcttcgaagttgggggtcccgctatatatttagacaccgataattttttagttacatgcaaaacgatatgggtcattagcatatgactaatgatttgagtattagctactgtaaatttgaaaaaaaaattgaaagaaagtaaaaaaaataacattgttcgatagattgagaagcgtggtcgctcaaaactaggtgtgcctaggcttttaagcggtttagagcaaggataataacagagcccacttcctactattagagcagccgcaatggtaaagtaaggtgctatctataaaacatgtacatctcagcaatagactagattaatagtaaactacttcaatggtatgtctacatgggtatctatagttgtctaatccattgcctcgtttttctctatagactatctccaggttagtaaatagctttgctctctctcttcatttaatctcttccaagtagtaaaatatgctgacatggatctcttgtagagagcctatagatagccattgcgggtgcccttagtccatcttaaagccaacacatataatagattagctataaggttggctacaattttcttctcctctctctatctctcacttatacatttaatgcatttatcttggagcttgtgataagctagctctttcataagagccaacatccttattttttcactatatctcttctccacctaagtttatagtaggtttatagccaactattatacttactcttacccgtctctccttgtgagaccttgttcatttaggctgagtttgagtgggaggagattgagaagattgggaagatacgcaaaacgaggtgagctattagagcatgattagttgagtattaattattttaaatttcaaaaatggattaatatgatttttttaaagcaactttcgtatagaaacttttcgcaaaaaacacaccgtttagtagttcggaaaacgtgagcgcgggaaacgagacaaactcactcacaatctcctcctgccgaacgctcccttaattcctcctacaaagattaattttttggattaaacgaacaagacctgatggggcagtcggctgccctgctcggtcgctcgctagtgctttatccactgcaagcatcgtgcggcaacggatcggcatgagccatgtgacactcgcgagtcgcgagatcacccaaggttagaattgctaatgatttggagaggttggcgtcgcgcatgcacctgcgcgcgcgcgcgcggcgtgatttggtggagtgccctcgtcgtgtcgccagcaggtggtgttgttgtttttgcacctatccacgatctaattaagttggcggtctttggctgggaatcttgatctttgttgttgttttacacgtgtcatttctcatgatgtcttatgacggtattatggcattaattaatagacgtgtgatgcgtcctcatgattaatattagagcaagtttaatagtacagcacactactagctctaaatcatccataaccaatgtagtaatagctaattcatataatagttgcttactatactattaatatcttgtcacacctgtcatacacacgttacgtcttagagtccgtgctacagctgactacagatctgtcccctgctcttctctctcttcctttatctctttaaaatatatttatagttggtttatagactgctattgtacttgctcttataagacgcactatcactcaatatctacaaaggaatataaaatttactgttcatgaggagtaaagggctggtttggtttcaggcctaaattggccttaccaatatttgtcaatttcaatagtgttcagtgtctatttggtttgaacttaaattttggcatgcctaagaaaatatgctattttaatagttaacttaggctattttggcttcaatccaaacacaactttactttgacaaaattagccatgctaaaatttaccaaaatttgcaattgataaaaattggtaaggtcaatttaggtcacaaaccaaaccagcccaaagtaacaaagtttacatatgaaaaaaatgatgcatcccatcacatcccaaagaatggtgaaaatcacatgtgggaccaacctatatgtgagcaatactacatatgtaatactgcagagaatccaatgtctaaaattactcccaaataaataacatgtatattgcagttattatatctacgaggacaaaggtatgagatgaagagggaggtggtggtagacgggctcagtgaagcacacgagccgcgagggcgtaggagggaggtgagcggggagaaaggcaacgtgaggtctctccacggcttggccgcttgggggattgggaattcggaataacgaggggactgacggtgtcggtgacatgggaccggggatatcttgactggaggtttggggcagccgcggtcacccacgtggcctgaccccctcgggggggtcgggcccgagggtgatgaggccgcccctccctctatctccccgaggggtcgggccgctcccgtttcgaccccccgagggctggggcgccccgaccccctgagggtttggcgccacatgtgtgggttaggtgagcacagcggcgctcacctaaccacgtttattgcgggttggacgagcgcctcacgccgcatttaatgcagcatagcgcatgcttatccggtccgtgatcggtcgcagtgtgtgaccggtcacagaccggtcagatcgtgggttagggggcaacaggcggcctgacacacgcctcgccctgtcccgtcggaatgatgagagcctccaggcactcgtccctagccggagccggcgtgggaactcctggagttggcacgtcagccccggccagatacattccaggcttcatcgcaaccattgcaaggaagtcattgtatgaagaagggcagacgtgtagcatgctaaactgacacgtggtggacaagaatgaccggtctatgactggtctgacgccagtcgcgtcatcagcaaacaaccgtgcttccacgttgcacctgcttccggcggagtggaggttggtatgacccatcccatcggagggtcattcggacagcagccattgcaaatctccgcccattaatgagggaggacagggttatcccggtgtcagacgaaggtacacgccaagttttggtcaaagtaggatgggtccccacccaaaagaagggtaggtagaaatggtgtatgtggtatccccttgagatataaaaggaggaccatgcctaccaagagaggagacggacaaaaagactagagaggacctgagctggtagactggagaaaagaggagtgagagggtctctagagtttgaactctcttgctctccagttctctgtaactccttcatacacagatccaccagaacacaggagtagggtattacgcttctcagcggcccgaacctgtctacatcgcccgtgtcttgcgcatttgctctctcgcgaaccattccacagatcaagggcttagaacctcacccagcgcccccggccgaaccggcaaaggggggcctgcgcggtctcccggtgaggagccccacgctccgtcagacggagaaatagtccgctctcatataaacgcttgatggtagatcgaatggatggcgcagtcaagcaacagaggatatgaaaaccaacctcctatcatagtatggggcgactttaatagcacggtgatcaaaacatgtcagttcaaaatattatgggggcttcaaccgctaggagccttcaatattctcgatataattgatataagctgaaatatatttttttgagaacatataagctgaaattagatgccctttttttcaaagaaaaaaaacatgatggtggtaggacaggaagtctggaacagtgggaggatctaggatggttgcctatgggattaacaaaactttttcagaacacgagaaaatctccgagaaactttcaattgggataaggcacacccaatttgaacatgacaaacttcaactgagaatgtttgaaaacttgcaggttaagtttttttttttaaaaaaaatcagtttcaattggaagaaatcaattcccatccaatgggttttgaagcgttcaccaaggaataatctcaaccaattaattgtgctactgttggttgatggtggtaggacaggaagtctgtaacagtgggaggatctaggatggttgcctatgggattaacagaacctttttagaacacgataattttatagtattttatataaacagcttcatttcctaagaaatctccaaaattcctcttttataaaggaggcttgaaccagatgtggacggggaagaggaacaacggaatcataccccatttacacaaatgctattgtgacaggcggttgatgcagggcgttcattgcataaaatacttcagactgatccctaacaatattgtacacaattttattagccaaatccggttgaacacacacaattggcgaagaacaagaaagatgccatgtatatctagtactactggtctagctgacgcacacgttttttttcttctttgtttgaaacgagtgattgaaatgatgccacattcaaatgaattgaattcgggctcaagtgatcacaatcgcgacgaaccgatcgaatcagttattgggatgtgacgatgacgggtgattgagaatttaacagttgcttcatatccatcactctttggttggctctcatcatagaaaaaaaacaaacttttaacctgtgatggttgatggccaccacttcagaagtggaggtacttgtggctcctagcaagacctgatcccagctaggtgatttggctgttccaagtgcctgtctagtcccgcaacgggcaacagcagtagccgatatgaactttatttctagaattaggcccggttgttttttagcgtattcaccttattattgaaacatgctatttgtttcatatttcaaaaatattttttctcaagagtttttttctactgcatttttctgttgttttaagtaatttgttaagtattattatttaaaatatctaatttatttctataatttatagtcaaagtttttatacatgtgatataaaagccagtactatgaaataaaatagactacggcgaacataactccaaaatcaacataaaaataatttccagcctcattttttcgattatacttatgcttatcaggcaaaatttgatttttttaactttaaatttggagttgattttggggttttttcattgaagtttattttttcagccttttcttttttatcactaagaacacgtatataaaagttttattcacaaattatttttagtttgcaaatataccgtttggcttattaatggggaccttcgtattttaaattttggttgtaattgacaagctaataaggagacgacaggaagcatagtctttggaaaagaaaaaaaacggttttactgagatgtgacaatgtgcttgtccattttgtgaagggcatgtgtcatgtgtgtcccatgcacagcagcacatgtactggcgatgtactacctcccatagtcacacatttgtttcttctccagcttaatttaatttaattagttagtgagcttgtgtgtcacatgcttgtcacgccaacaactgtggctacctagatctcattgtgattgttatgtacccaccatatccataacatggagaattggagatcttgcttaacacacatttgccatggatatgcatgcctgtaactgtagtgattacacactttattaaaaaaaaaacatagagatatctgatttgagaccagaactgcggggatcgtcggaagcgatatggtgcagagaaggagaagaacaagacaaaggaaacataaatagcaatgattcccaaaggaagatttgatcttccccctgtggagtttgacagtgacatgtcatcgagcaaggacgggaaaagagtgatcagagtgaccccaaagcgacttcttttctcttctttttttacataaccagaaaatcgatctccaaatgattgcaacccgtgaaacttcccggaaacacacacttgttaatccccttatcccattagtactactacaatccagctgatcgatcacatatggatcagtgagcattcatccatccatttattcacttggtcctccacaaagagcgaaacacagagagagagagagagagagagagagaggggcagacatggagagagaaacaagatgcaaaaatgcacgcgaacatatccgatcgacccagatgatccaaggataagatcacgagtagatcacccagaattggcctgcttgtgcctggataaagatggcaaaacggaagcaatacatggccctacacacacagctatcgtcacgagctaagctttcgttttaggcacttctggtgtagtgatggtgtggtatctagtccagtatttcatctgtcaaaacaacgaatctaggatgacgtgatatattctagtataacaaatttttacgctgtgtttagtttttaaaattggagagaagtttagtaaaagttggtagtttagaaaaaaagttaggagtttatatgagtaggaaagttttggatgtgatgtgatgtgataaaaagttagaagtttgagagaagttcggtttaaactaaacagggcgatatctctcgaatgtgtcctgtccgacgccgagacgccgtacgtggggcaggccgcggacgcgtttatcttgtgcgcgatcgcgcgcgagcgccgcaattgcgttggtagggccgcgccgtcccgcctccaaccacgtcagatgggggggaggagggggtctcgtctcgtgacgagccaacgtcctcttgagggaatccttccaccaactgaacactggctcagtacaacgctatctttccttgttttgttcgtgtttagctgttgagctgcattattagatttggggtgggggtttgaggaagagaacttcgacttaagcagcgtaaatagggatttgtttttcaaattattattcataacttcattttatactatcaaagtctaattagatcctgacttatccaaaccagggttcattacatcatttatcgtgcggttatcacgaatcgaaatcacccacctggtgtatcagttaagttcaaaaaattaaaaaaataaaaagaaatatcagttttcgccagtttttggtgggaaccgttcagttaccgctgatactgctgagtagtggtaacctacccttattaggtaaggcaaacatgacccaaacaagatgaacgtaggttgttgttgacgaagaacgtgatcacgaccggtagcatcatcggaccacctatatcaaataaatagcggaataaaataacacgcgaaggagtgacctgacctctattagatttggggtgtgtttagttcacgctaaaattataagtttggttgaaattagaacgatgt

SEQ ID NO: 18322 - DNA, 7093 bp, Oryza sativa
gtgacttgtagaattttccaaaactctaccgaaacggacaaaatatgtcatctattaaaataggcgtaactttctcatacggactcggaatcaggcaaataatatatgcacggacatctacagaaaatgttacatccgattctcccccgctttgccgggttcggcgatattaaaacctccaaattccgcttgcaagattgtgttttcgaggagagaagtttttcggtagaactttggaaaattccacatgccacatatttcgtccgtttgagtttattttttacatggttgattcctgtgagttcctaagtgtgaaaaaaatatcaaaaaataaaataaaaataaaaaagttgtacatctctcctttgcactagttcggagagaggagaggagaggaaaaattctacaggtcacatattacgtccatttgagttcaatttttctatggttggttctctaagcgtgaaaaaaatatcaaacaaataaaacaaaaataaaaaatttccgggggggcgccagccactctggcgcactccctagccacctcagcatcgccccgccacgtcagcagggggacggcgccagagaggctggcgccgtcctgttggacgacggcaccggccactctggcgccccaaaaggaccatttttaggataagtttttctagaggtctatttgagaaaataagttttttaaaaggaccaaaatatgaaaaatccagtcgtggtgaccatgtgacaactataaccacactaattgaaggcatcaacggaggtcaatcggtctgaccctgcagcgccgcccgcctagctaggccaccgtcgcttaatttgcatcgcatatgctgcattcatgaatgcgtgcgctcgtggctgcgtgtaccctttgcctctctgccctgcctggtcgtgttcaacgcctacgacgacgtttaatttgatcaacgcacggcagtagagctaataaatactagtacgtgggtcagtgatgtatgtgtggtgtatagtagtaggagtgtacggcatcattcgctgtatgtaccgtaggtttgctaaatggacaggcgtggaagttactcgatcgagattgaatttcaatcgttgaaaagttgaaaacaaccagtggcagtttaccctcgtatccctacatttatacgagtacaacgtgtttacaggggtattataagatgttttgattttgatcaaaatcaaatttatttaagtttaattaagtttgatgaacattcatgttagcaagatgaagaaaaaaaactagagctctattcagttgcaccttttttttttactgtagtgcagccaacaggcacaatgtcttgtatttgtagttgccgcagcatgatggttgcatatagtagccgaatatacccagggtgcgggatggttgctggggctcaacttcgctccctccactaccaccgcaacatatatattttgtgataaatctaggccagttactacatataagttgtagagtagttacaatataattatactttaattattttagttacatttgatttttttaataaaaaattatcgcatgttatatagctactcccgaaaagaaatttaaaagaaaacctcaacgttcgctaaagtacatgttttgtctgaaccaatattttggtttcaaattttcacaagcttagcacccaagatttgaaatttggttcaaaatcactaacttttggatttacaatgggctcctgtagggaaaaaagaaaagtaaatttatttgaattttaaaaaaatgcagggttttcaacattaaactaactttttgtcgaaatttttatttttcatccctggaatctgcttcctgagatgtaaaatctcgtagagcccagctcgtagctagtttgagtcagagtcatccggtcaggtggctaccggcaggactcgatacaaatggatacaaattactaaatgaaaataaatgagaactaaagctaagtgcctattctgtcgaaggattatgtataaaactgacttccggcaattattcgagtgcacaaaggaataaattaagcattaagaagttaaaaggttaattgattattttttttaagaaatcttagttaaaaaagtttttgcaaatatatagataaagagcttgggtaacatgtccctgaccctgataactcacgcgcctctacaacctttggctagatgctccactgtggtgttgggctggtggtacagatgttgctcttgtctagcagcggtcgtcgatcgttcacacgtagcgatggttgattcgatgctagacttttttttctttggttatgtgtacatattgttggtgcgtggtggtattgttttgccttttgttttttttttctcttgtgttttttcacaccctaactggattcaacgacgctactcccttgagcagcttcaccgtgcactgtctaccaacgacgccgtaatgaaatgttttagtacttctacttggcaacgcaacagaacacaaatgtatactccctccgtacgtgtaaagaaatcatttaggacaatatttaagtcaaatcttgagaatataaatcatgaatactccctctggattgataatatttatcgttttgaacaaggacacagtctccaaaaaaacaactttaactatcatttttcattataatatatataaaagtgttaacaaatatatgatattactaaagtactttttaagactaatatatatatatatatatatatatatatatatatatatatatatatatgtagtcaccatatttgaaagacaaatattttaaaaatgattcataatcaaatattctaaagtttgaccttatctttgtctaaaacgacaagtattatcagtccggagggagtaaatctcaagttgttgagtttgaaaatgtaaaaattatataaatagatttggcttgaaaaatactttcataaaataatgcatatatcatttttcaataaatacttttatagaaacaacaaatcaaagttgtgttttagagactatgtcgctgagggagtatccacattccacaaatgatctttttttttttttttgagaacatacattccacaatggtcggcacggtgaaaagtcgtagccatcagcccgtcacccatcagtgccccatgcatctcgcctttgcaacttggattccggtggaagaaacacccccggaacggacaagcggcgaccgggcgggatcgtacggcgaacccaaacgctcgccgccgccgtgaaacatatttggcggcttccccgtgcgagagcgagagcgagaccaccaccaccgctatggatttggatatttggatggagcggcggtgtcaacgcctcgggtggctgaccaaaccgcgtgatgagtttgcatcgcatatcgcagccacaggacaagaggaaaaggagcgcgagttgctgtggcggcaagagactctccgagtccaccggttcacacgaccacgggcgggggtgggtcggggtcgtggatggatcagtcggcatcggtcaaacctgcttctggtatgagtatgatgatgaccacggcgagcagcggggagttttttgtggttgggtgtgccatcgtcgcagagttggcacgatctcaacatctgcagagtactttatggaatgtttgtgtttttcacagttatactgtgagggtgtttttgttcacgagagctaaaagagttagtagtactctttaaatatcgtgaagatatatcgtttctttgaatgtttctttaggtatgtttgggtgagcttttagctgctgcagattctcccagaatctccagctcccccaaatagtccagattgtcagccagattctgggaatctgtagttgtagaatccaaaaaatgaactcaccaagaagctgctccagaatcttaagctcccaaacagggtctttgtagtttcgtcgagcagaaaatctaggacgcattgattcgctcagaaatggagtattcatgatgttaagacctctttgattcaaaggaaatttatagaaattttagagaatttcattccttcatgcggtccaatcaaacggtcattcctacgtttttcctatattttgcaatactctgttttacacttaggcatggtttatttcgcaaattttttccccaaaaacgtcacatcgaatctttggacacatgcatggagcattaaatatagataaaaacaaaaactaattgcacattttacaaatcgcgagacaaatcttagattaattatgctcaaaagattcgtatcgcggtttccagacgagttatgaaattagttttttattcgtgtccgaaaaccccttccaacatccggtcaaacatccgatgtgacacccaaaaaatttcatttcgcgaactaaaaggccttacattcctatcagaattctatgttttttctattacttcgtttttttcattcatgagattcaaagggtcctaaggtatatttctggagtagtgttctgtatttgggttttctggtcatcaagatatactgagaactacaggtgttaaatctacgagtgctttgcccatggaattcaaccaacatggataaggaagcgaagcagagagcacggtaagactccttacctgctcaaattacactctgctttttttctcttcttgtatttttttttaaaaggaagacaatgaaagtgcactccactgactgacgctctaacgcattatcaccagcatacgcaatgtcagcgtcaaattgatatcccatgcgacgcgacgactcttgggtcaacattccatttctgacagacagcaatggcgttttatcagaggcatcaaacgctcctgaaaatgcagatagtaactgagatgtcgtggtcaaatttttgcaccaaactgaactttggtaaccacgagacaattaagatatctacaacatcacagctgcaaattttctctgggttgcaaaaccatacagagaagacaaccttaaggtcttcggagttcggcatttaccaggagatgcttccagtctcagctagagtgagtccaatgcagaagtctgaatccagaagccaacgagagggatcgatgtcgccatatcattgattacaggattccagtagaacaacggcacgaccagcattcaaaaggcagctctgaatctggttgcgatggcaacatgtcggtgatgatgccaatgtcctctgcattgaccaccagatgagcctggaatgtcaagttgtagaggtagaaagacctgttgctgacaatccgaattcaacagcacagcatattggagaaatagtacggtatgtgaacagaattgtcccactagagtggtctcaaaatggaacgaagtgatgattgccctatcaagaaaattgtattgtttgtaagggtacaaaatggggttgcattctagatgaaatcgacatcctccagacgatatgagggtaagagtgtgcatgaggaacgacaactgatacgcgcacaggagaaattcagagcaatagaattacaggtagcatcctaagtatcatggatcagtttttttttacaaaaagaatcatcctggcactatcagatgagactagcagaaaaaagacccacagcgaagtaatcgcccacttctttgaaaacagaggtacatacatgaaaaatggtggaaagcactgatgaatgccgttgaagttcatgaagggcatttgttcctgtctgtgcagatgtgacttgaatgaatcagttcatcagcttaatgatccatgccactggcatctattcagacttcatagaaactgcctaaagagcttctctccgaaatgggaatgcaggttgggagactggagcacttgttgtgatgccttctgatgcgaggtccgaacttcgacttctttcaccccgactcgggtgctgtacctcatcttccactgtaggagcttgtgcatccgtctttgatatcaatttggagtttgagacagcctcattcctactatttctgtctccacctcccatttcaatatcaatgccatcataattatgtcgttgtgagatcttcaagagatcaccacctatgtcaaggtcatcttccacttttgtccgagcaccaaccggctcttcttctctctccacagcacggttagctggtggagctcgcgcttcctcttgtataggttccctgaacttgtgtttggaaggtggaaccttagtatagaagacttctagaaagttattcatacatcctcgatcataggcatttggtctgccatctgctctgtaccggaaattttcatatgtggtctgaaaagccaaagcatccgtatcagagatcatgcaatgtaaaaatatttatgttcaggagaagaggcatctaaaaggggttgtttcaaatgcttggaatgcttgccctttgaatcgcagggtagaaaaaacggaggaatagaaaaacataggattctgacaggaattgaagtgtaaaacagaggattgcaaaacacaggaaaaacacaggaatggtcgtttgattggagcgcaggaaaaacgcaggaatcggatgagagagatagactcaaaggaaattttccaagaggttggagctcttgctaaatttcctccaaaatctacatgcaatgtgtcattccataggaatttcataggatttggaaagcttcaatcctttgaatcaaagggccaaataggaaaatttcctataggatttgaatcctatgaaattcctacataaatcctttgattcaaaggggccctaagtattatttaggaactactcccttcttccacaaatataagcattccaagcatttaaaatttgtcaaaagtataaggattcctagagtactattttccccatcaatcacctctcattcattttttttcccatcttacccccaaccatccctcatttaatgaggggcaccaaagtcattttttcttctccttgtctctccaaaaatgtttatgaatgcttgtatttaaggatggagtcctgaggctgtttggatggattactcactttaccaaacttctatgccacaagtgtggtatgccatagtttttgtggcaccaaaaaagaaagccacacttgtggcaa

SEQ ID NO: 18323 - DNA, 3307 bp, Oryza sativa
cctaaagccctgaactgactcatcgaatcaagggtttgtgctttcccatgagcaaaagaatagaagctggcacccttagtcccttaccctcacaaatgcacacacacactgacaccacagtactaaattaagaagaggaatcccagattcagacaaaaatagtaatggagaaactgaaaacgccctctttcccaaccaattaatcaaataaatatttttttttcaaaatctctcattataagcactaagcataatatgactagatgatgttgcgatggtagaaacaaacaggcaaaaacataaatctttgatcaggagcacaggcaaatcaactagcaaaaagaaagataaacttcacataaacaggctgacctggtttgtgctgatgagatatgtatgaaatcctgtgagtccaccaacaaaccaaagacagatgaaacaatatattagtaatgcaagagaagcaggggagtgtttcaaagccttccacactgtgggatagtctccatccatgagaatctttatgtacaatgctgacatagcaaatacataaatgcataggatactcgccgaagaaacaaataggaaaaagtatcggtaattgcgctgcacaatggaaaagtagaaggaaattaagataagcaactaaaaaatggagcaactcaatcaaaacatttttgacattggatgctatcaattgtagatatgcctatgagaaactcatatttacactatggatgaataattttcttataaatatcaaattaaccaaaaaggttaaaaccaggtagctcgtatgaatatataggagcatttttagtaaatatgaaactgacagtttgcctttgcaatcacattgtctataacatgaatattgaggggtgtcaagtcaccaactactgactgggaagtgaatcagtacaattccagtgaatgctacatgtacattaggtagtgattgcctgtaacattatgttgagcaactctgctcttagatgacattgctgtccagcaatcaataaccgtagaaagtttactttgttaaaaataagttgattaaaagcaaggagataatatcagggaaatcatgtagacaagcggtataagtttattgcggacaactaaatactctgcctttagattttaatcaagcagttgctgaatttgctgtagtgtaagagtaatcatctcactacttaatattactagcttataacacacaaaaaaaagttacctttccaatgcattgccctacccaggggcaatgatggtcaaaccgttccacgcaattgttgcaaatggaacagtgcgaacaccgaggaggccgaaaaaccatgcaagtttcacagtacttgaccttcacaggcaccccatttaccataacatcttttacacgagggaagactagtctgccaggtgtgtccgcaagagataaattgtcatagtgaaactcttcttctggtggatgagatgcacgaggtacaataccaggatcctgagctgcggtgatgaaaagtaacgaaagcacctgcaagaaaaagaatgcgcatttgttgtgtcattaaatcttaaaatgcccagtgtgaaagatacctacaagaaatagaccaaaatactcacatagattgccaacactattgctacggcaagaattgcgtaccctgcattgtatgcaggaaattgatgacgaagattccgtgctacaaacgcacagaagaccgcaaccgggacaaaaatcagtgcaacagaaaaaagcagggatttagcatcaggtccaaatattagccgaccaccaaagaagaacctctgcagattagaagcatcgatcagttcacaacaatgaatccattccaccatgaagacatacagagtgccacacactttcaaagatggagcaaattgcagctgaagtaaaaaggcctaagcaatgtatgtaagcttaaaaaaaatgttattaatgttctggagcatcaattccatagaccatcaattatctaaaaaaagacaacacaaatcaatccgattcaactgacagtatggtgattgcagacagggtcggtacgagtgatgtccccatcacagccactctgacattcgcattcagattttttcgcatccgttatctccacgccaaaaatgaagcatagtattgcattggaacaacatagggcattccaaacaagtagtgatatcatagtatacattgcttcttaaaactaggcactactgaactaattaaacgaatcgacaagttcaaacagctagggcaactcgattccacaaagcctacaaacttggcagtaatctgtgtttgctagactatatgttatgattaatgaaacaaatagtatcacaacacacctgaaaagaaaaggtatcacagcgaggcgcatgtggccggaggtgctcataggggtagggtgtgcgtgtgtgcgttcataggggtgagtgtgcgtaagttgtgagcgcatgcgtttatactgtgtttctcaaaaaaaaaaaaaaagggaaatccccgcaagagaaaaaaaataaatgttgatacaaaatgtaaaattggtaagctgaagaaacagcaaaacctcacgaacgcttcgaaattcgaatcctataacggagcacaaaccttcgaatcctagaacagagcacaaaccgatccccctcctaacctaacaataaagaaaactagtatacaaacaacaatttaagaggtaaaaatcctaaaatcctcccaagaccctaaacgagaacaccgatacgatccctagaaactgtaaaaccaactcaataccagaaaggggaagcggaaacgagacgagtatacacgagaggaagaacaattctcacattattccccttccaggcttcgtagacgcgctgccgctgcgactgcggctgcggctgcgccatgggcagcggactccaggccctcccgaggctctcctccaatcaacaacccatcgaatccgcgcgagccggcgaggaagaaatcgatgctcgcacgcaagaaactgaagtgcacgaaatcgacgcgaagaagagagagagagaaggcaagcagccgagagaggaatcgatggtgaatgaaagcggctactgtgagcgagagtagggtacaaaagaggactttttttattgttcgtgggaagtatggagactggggagaccggaagtccagaacgcccaaaattctctcatttttttatttgttttttaaggaagaacgctgaaaattattagagcctgtttggtatagcttcaactcctaaatttaactccaagatttgagtctggagtggagttgtgg

SEQ ID NO: 18324 - DNA, 29140 bp, Oryza sativa
ataatgatggtctacctggagagtttttccccacaggttaccgctgatatttgtcaattggcgtgtaagcgggagaacactcaaatgaaacatgagctccaaagcaagacatgcatcagtctcgccatattcaacctagatgagcaggacaatttggcaaataatgcttcagtttgtagtttctgaagaataagcaatctcataaacaaaagaaagttccaaaaaaaactgtaccagcttgagaagtgctcctgaagattggaacattgggggaatatcatgtggagagacctctttcctctcctttttcaattgtgtttctgcaagttgtgtcaaagaataactcacctgtgtacaaacaaattcattagagaataaatatggtagtaagaacaaacaaacaatttaaatgccatttacctccttcaggagatcgcgagagcataagtaggtatcacagaggagacgaccagcaatgcaggacataattcctggacttgccccagacccataaagtgtgttccctttggtgagtctgggcattactgagcgcctaagacgaccaatcttggaccacatattgcttggtactttgcaagtctaacaacaaaaggacagtgttttcaaatgattgaatttaaatcgaaataatagtaattaacatagcgtaaaatgatagaaaaacctgtgcacggtgcaaaaggacgtccaagtcaaatccagaaatattgtgtcccacaagtacatcgcaatcaagtttgctaagctcgatcatcaagcggtttaacaatgcacgttcactgatagcagaatcaaaaggttagtgaatgctaccacagttagagttattaacagttatagaaaagaaagttagaagtgtccacctgctctcgagtgccagcacattgctaccagccttctggttcctatcagaggattccttggagaggcctataggaaatatactgccttcaagcttgcgcataacagtaaaatggctgagcattccccgtttctgccaatcttcagaacgcattggactatctatctgaaatcgaccacccaaaaaaggataaattagttggtaggagaaatgttctccttttataatatgcatattctataattgttttagtgaaacctggaatgtgctagttagttttaaatattcatctcagtcatggaaaaccatttaatctgacaattcattgacaaaatttataagtaaatactatagtaaagtacttcaagtgcaaatgaagaatatgcttactttcacacggtgacagcatatgactgatgctgacacaatttcatgcacattgtgtttctcatttatgatagttttaagattaactgctgcaaccacgacaggaggaacttctaacgtggtacttgtcatcaaaacagatatgtctttgggactatcaactgtaacttcaaatttacaccagctgacctgtgaagaagtcaaaaggcatcaccatcaacatggtgcaaaataaaagcagataggagctatgagggcatcataaactagaaacatggcatggaataataggatatttaggatatacccgctgagtagctggacatgccaaaaatttggagatcgaaagccatgaaggccccttgatcttccttttgatgagaagcaattcaagagcactggaaaggtacgatggttaatatcaatgaagatactgagcatgaaacagcatatacactggtttgtgtatgctgtatagcatgaccccatgtatttgatggatcattacctattgttcgtcccaagtaatgcatggaaatgttgacctcgaaggtctgtaggtagcgccggatcctaagaaaatatatgcagtataagaaataagcaaataggagtcaaagatgcattgcccaatagacataccttatatgggtaatttatcttcaagacatactgctccccatttggtagatcagtcctctcaaatgcatagttcctctatggcatgccaaataggaaaaaatagtaaattagctcagcaaaagaaaaaaaaaaggaactaaaagataaaagtcactggatgcctagtatcaactttccaccaacagaccttgactggagtcattgcaaaatttgacacgttgaagtctgacaacttatcagctatttcgctcttcaatcctgatgctaactcctggcaagagaattagcatgtatagataagtggtgcatgcaaagcatcacatttactttcaaaaaaatcaatcattctcacatgtagacttgctcgaagtgatggagaagaatcagaagtagtggaattcttctctagccttgatatggtgtcccttgggaagattgaactgcttggaatagcatatatgcacctttgcatattctttacaaccacacaacaactgtggaaccgcttgcctacttcaacctacaaaagaaagcagcttgtcgggagaatggaaataacctctgcaggtagagctgcaggtgtgtcactactaaattaattacagtttctgacagaacacagtaactatccagcagagttgataactgttttcatatcgcatagttgtaagtagagcttcttttagaatgaaattttctgactagtttaagaaatgcatgtgagccttaaaatgtcaaaatgtatcaagcaccatatcatttaaggcaaatcaattatcccacactcccactaagttaaatagtgcttaaaggacacaatatgatataaaccccatgcttttttatatgaaattggtcattaagcaaaaacattctgccacacaacagtaactagaatctgtgtactttacaaatgaacagctgaaattttcgttacctttccaaacaaatatactgtgcccgaattagcaccaaaaggctcctcgtatgcatccaatatgtagaatggcagcgctccatccttcagctcaaattctgagctttcatccacgccggtgttgctgttagcagccaccgctccctcacctcctgcattgtccccatccccgcatatcttcatccaccctgctgttgcactagccatatccccattccggctgtcctccgtcttaatcttagcattcagacgatgcaccttctctatcttaacctccccattagcctcctgtttcggttcctccaggctgttactattattcgccaattcagcactagcaccaagaggtgtgtccaatttgggctccatttccacgtctggcttcaattccatatccatatcatttccatgatctgaaacctcatgggcctcgaaaacattatccgatctgaacgccattgccgtatcgactgccacattttcagccttgatgtgagcagttgttgttggcgctggcgccggggcacaaaccctaccaacgcggcggcgccgctcctcgcggtcattgtcgtcgggagcgaactccgcgatgacgtcatccacgatgctgtcggccgccagcgacgagtccctaccgcggtcgctgccaggcttcctaaacacggaggaggtgaacatggaagagagtcgttgcttccccatcatggcggcggcggcagagagggacgccgcggcggcggactgctgaggcgggcgcttcgactgcggacgcggctgcttccgcttccggggggcgccatcctcgccgtcggagccctcgtcggaggaggagtggatggtgcggtgggtccagtcctcctcccgcccgtcgtcggcgtagcccaggccgtcgtcgtcgacgatgaaggcccccgcgtccttccggcggcgggcgacgagcgcggcgtagtcctcctcggcgacggtgtcgtagatcggggcctcaatcctcacctggacggcggcggcggcgcgggcgcccccatcgcggatcgcgcggaggcgctcgagcgccgcggaccgcgccaccgcctcggagccccgggcgcgcgagcggcggccggaggcgcccgcatccgcggatccctcatccatggcttcgcctctcgctctccctccccttccctaacacacgcagtgacacaaggcaatgtcccgatgctttctcttgcggcggaaagggggagatctattctggatttgtgtactggttggattgggcgggaaggtgttcgagggcttgtggcttttggcgcgcagaatttggggaaatggaggtctagggtttcgcctggacccgtttagtgagctagcgggtggcgcaggtgagaacgaaggacccggtaagagattgggctgaggagtacgtgggcatgacgttcggctgctaatttagcccatcagttgtacacgttgggctattctgttgaggaataagtccactttaagtccctaattatacttgcatctaatttgtatccctcaaaagtcaaaaccattaagggagtcaaaatgtaccggttttaatagttaagaattcaatatatatggtattgcaattgagggatacgaattaaattgcacgtatatttgtgggagtccaaatgtacttattcattccgtcattccgttgatgctttggttcgctcgaggatagtatttaaatggtcttgggccaagattaaatggaaaaattagtttgagcaaattgcaattttctgttgttgacagacaataggggcttacatattttgcaattttctgttcttgacagacaagagggcttacatattctatatgatcgttcaacaacatatttttttttccgaaaaaacattggttatattttcaattttgttttctcgttctctgtcgtttgttgatggcttaccttctatagttggaaaccctggaatgccaccatattggaaagtcaacttcaaatacacttatcaaaactttcgtggatatgctgttcattacacaatgacttgtgatgttttaattactatgaacgtaccgagtctgtacagtgagcacaaatagaaaatcaaacgtggcctcgctgtttggccccgggaaaacattctagcccccgtttagtttgacatattcgtcgcattatcatttggcaatctccgtagagaatccatatgagaacaaaggctataaatagtggaatctcaagtctaccgcaaacacattctagctcagcctttgctggacttgttcccgccaaaagtcaggatcaagttaaaagaagctgcctccaatggccgatcgaatcaccgttcttgccattgccctcctcgttctgatcttgtcgccgcaaatggctgtccagggcaagcctgcagctggcaacaccgcgagcccaaggccgaagcagcagcaactcgggaacttcttcaagaagcacgggtcggacatcgccggcctcttcccgaggcatcgcaacggcggatcatcaggtagctacagcggccaggccgtgccggccgacggcggcgaaaacggcggtggtggccagagccaggacccggcgaccaacaccggcatgtacgtgttgagcttcagcgtcggcacgccgccacaggtcgtcaccggcgtgctcgacatcaccagcgacttcgtgtggatgcagtgctcggcgtgcgccacctgcggcgccgacgcgccggcggcgacgtccgcgccgcccttctacgccttcctgtcgtccacgatacgcgaggtgagatgcgcgaaccgcgggtgccagcggctcgtcccgcagacgtgcagcgccgacgactccccctgcggctactcgtacgtgtacggcggcggcgcggccaacaccaccgccgggctcctcgccgtcgacgcgttcgcgttcgccacggtccgcgccgacggggtgatcttcgggtgcgccgtcgccaccgagggcgacatcggcggcgtgatcggactcggcagaggggagctctcccccgtctcgcagctccagatcggcaggttctcctactacctcgcccccgacgacgccgtcgacgtcgggagcttcatcctcttccttgacgacgccaagccgcggaccagccgcgccgtctccacgccgctcgtcgccagccgtgcatcgcgcagcctctactacgtcgagctcgccggcatccgcgtcgacggcgaggacctcgcgatcccgcgtgggacgttcgatctccaggcggacggctccggcggcgtggtcctgagcatcaccattccggtcaccttcctggacgccggcgcgtacaaggttgtgaggcaggcgatggcgagcaagatagagctgcgcgccgccgacggctcggagctcgggcttgacctgtgctacaccagcgagtcgctggccacggcgaaggtgccgtccatggcgctcgtcttcgccggcggcgccgtcatggagctagagatggggaactacttctacatggactcgaccaccgggctggagtgcctgacgatcctgccgtcgccggccggcgacgggtcgctcctcggcagcctgatccaggtaggcacgcacatgatctacgacatcagtggctctaggctggtgttcgaatcgttggagcaagcgccgccgccgccgtcgggttcatcccgacagtcgtcacggcggcgctcatcgtcagccccgccgccgctgacctcgccggcagtggtcgtgatccatttaatgttggtcgtggtatacatgttcttgtgaacttctactcgaccttgcggtaatatctggaaggtatccttattgtcatgtcgcagacgtgcagatttcaccaaggtggttcattttgacaatgtctgtaagtaaaatgatgtattctgaatttctgattgtttttttttccaaattactactccaaatcaaagcgtatacgtgttgtatcgttttaaaccgtgttgtcacatgtggactgatgattgtctgattctagtttttaagtggttagtatcctttgctgacgctataatttctaagtgaaatggcatatagcctagtggttgcagtgacctgagtagcaccttaagatcctgagtttaaatttcgagcgaatttcggattggattatttgagggctaagttacctatttgataggctaaatttctaatctaaaaagttcaaatctacataggaacgaatttcggattgaattatttgatagttaagtttcctatttaataggctaagtttttaatctaaaaagactacctacatccggttggataaaggccgggtaaaaaatacccttctacaaaagaaaaaggcaatgtggtgatttcaaaagacagagagttgagcaataaaccatcatcaacgacagcacatttttggagaaaatattaccaatttaccatcccgttgagagataattgtagaacattacgtgctgataagtgacacagcatgcatgcgacatggtatgtctctagcaaaactagcacccataatcttgatgaaaatgtacccataacccataactagttggctactacacctgtacaccaacttataattagtttttcattttttttttgcggcgaccaacttataattagttgacactggaacatgtctgattccccttcttcagtctgtttagcgaactaaatcctgttctgagttcttttattagaacgtgcttgtctgtactttgaacccagaacacagactaaattctgttatggtctggatttgtgcagcgtctggattgggcgggaagttgttcaccgtttggcgctcagaatttggggagacgggaggtctagggattgcttgggaaggactaaatctcggcccatcatgggctgctaaaatgaaccgaaactacacagagatgggctttgtcaaacatggaccaagagatttacgaacaggttcaggagaaattggcccttgaactcggcctactaacttaaccgagcaccgcgcgatcacgttgacgctctgggtcaacctgttagtttactttgaaatggtcttcgggtcgaaattcgaaaatcacatgggcatttactttgaacagattgagtttttccaagataatcttattaaatggaacagactggatcactgaacagagaggaggggtcacattctcagcgatcattaaccactggttacataatcagaaattaatattacttgttttgttttttttctctctctgtctctgtcctgtttttgttgtgtgattcccaaaccaatgactagaatggtatccatagcattaaataagttgtcacctatgacaaaaaatgatgtagcaagtgaataaatgaggaaagagaagaaaatcatgtcttgcatgagacatggttcctacacaacatctaagatataatgtgagataagtagcattaaattaaagtatggaataatgatgtttgtattggaagactagtgtctagtactaattttttttttgatgatgtggagtttatggaaaccatgtctagtgttatgggttaggactgccctaagggcattcccaacccaatgactaggatggtgtccatagcattaaataagttgccacctatgataaaaaatgatgtggcaagtgaataaacgatgaaagagaagaaaaccatgtcttgcatgagacatggtttctacacaatatccaagacatcatgtgagataagtagcattaaattgaagtaatgaatagtggtgtttgcattagaagagtagtgtatagtacaaaccatgtctagtgttatgggttgggactgtcctaaggattggattccccgcaggacgttggttgtttccatttccgtttttgctatggcagacgctgtccttccatcaaaaaacatggcaatttcgttattgctgagagattaacttaccttaatcaaagttgatagttgctaccatttgtcagtcaacactaaatactttattagaaggtgggcatgtacactgttcattgagtacacaaggctttgagcgtttaccgatcttactataatccacaaaatcaaacatgacctggctgtttaactagaagagagtattctaaagatcaattgctgcaaaaatatgagtgtattaaccgcgtttgacacgatcttgagtcaccatgttaccagctagcattccacatggtgatctacgtaatgagagaggaatttaaactctcgatatggtgtacactcttatttacataaaacttaaatagttataaaaaagtgaaaaaaaataaaaagatgtattaacatataatatatcacttcacaaccatgcaagttaaaatttaaccttcataagtcataataaaaaaaataagttaaattatagctagttaatgtatatttatagtaaaaaaaatcgtcgaaacatgtagaaattaaatttgattttgcatgtttatagaacgatctatcacatattatactattttgtttaatattttattttttataactatttaagtgacatacaaataacgagcggatatccctcaaaagtttactatggtttccctctacgtactgcttcttcagaataaatagcagtgtacattcatcatagaacctcagctcaagctctcctcgcaacaaaaactagcagcaaagatcgaggctgccacctccaatggcggatcgaagccatgcccatgcccttgccttcctcgtcctcgccgtcctcatgccgcaaatggcgtccccgggcaagcttccacgcttcaccatgggcccgaggacgaataagcagctccgggacttcttcaagaaccatgggtcggacatggccgacctcgtcccgtcgggccagggcggccatgagcagggtggaggcagctcctccaacgggcagagccagcagggcggcggcgacagcggcggcggcggcggtggcggcaaccaggccccggccaccaacgccggcatgtacgtcttcagctacggcatcggcacgccaccgcagcaagtctccggcgcgctcgacatctccagcgacctcgtgtggaccgcgtgcggcgccacggcgcccttcaacccggtgcgctccaccacggtggccgacgtgccatgcacggacgacgcgtgccagcagttcgctccgcagacgtgcggcgccggcgcctccgagtgcgcctacacctacatgtacggcggcggcgccgccaacaccaccgggctcctcggcaccgaggcgttcacgttcggcgacacccgcatcgacggcgtggtcttcgggtgcggactcaagaacgtcggcgacttcagcggcgtgtccggcgtgatcggcctcggcaggggcaacctctccctcgtctcgcagctccaggtcgaccgcttctcctaccacttcgcccccgacgactccgtcgacacccagagcttcatcctcttcggcgacgacgccacgccgcagaccagccacaccctctccacccggctcctcgccagcgacgccaacccgagcctctactacgtcgagctcgccggcatccaggtcgacggcaaggacctcgccatcccgagcgggacgttcgatctccggaataaggacggctccggcggcgtgttcctgagcatcaccgacctcgtcaccgtcctggaggaagcagcgtacaagcctctgaggcaggcggtggcgagcaagatagggctgcccgccgtcaacggctcggcgctcgggctcgacctgtgctacaccggcgagtcgctggccaaggcgaaggtgccgtccatggcgctcgtcttcgccggcggcgccgtcatggagctggagttggggaactacttctacatggactcgaccaccgggctggcgtgcctgacgatcctgccgtcgtcggccggcgacgggtcggtcctcggcagcctgatccaggtaggcacgcacatgatgtacgacatcaatggctcgaagctggtgttcgagtcgttggcgcaggcggccgcgccgccgccgtcggggtcatcccaacaaacttcgtcgaagacgaaccaacaagcgggcgggcggcgctcggcgtctgccccgccaccgctgatctcgccggcggtattcgtgatccatttcatgttggtcgtggtatacatgtttttctgaacttatacctgaccgttacatactccctccgtaccacttagtacagtctttaagactatttcttgaatttaaaattttcatatactataatattttttaacaaaatcataaggtgaaaataaatttaaatgataatttaatgatattattagtatcaaataaaaattaaattataataaattatttattggtcaaatatttaaagagttgaattttaaaatgtctacgagtctttataactgaggcggagagagtatgttataacaccgaggtaatctctgggaaattatatatcctactttatgttgcagacttgtagatttcaccaaggtgattcattttgtcattgtcaaaaaaactgatgtattctgattgtttgttcaaagttctccaaattagcgtatgcgtgttgtatatataattattgagtgatgttacggtacagcggtcggtaccagtaccgcccggtaccaatatcatgaccgttggatctggcttgattgatccaacggctggtagagtttggtaccgggcggtaccaattctgcccctagtgcagtaccacgcggagaattgaggtggaagggcaaaaacgtaacttcgcgtgcaagtcctcttccgatccgccgtattcctcttccgcgtaaccctaaaatcccgatctgccgccgccgtattcctcttccgcgtcgccgccgtgtttctcttccgctccagcgccctcgtgttcctcttccgccccgtcgtcgccgtgtccgccactgccgtgtcctccttcggcgccgtgagatcagcctacgcatcgtcggtggcagcggaggcagaggcggatgagccagcggcggaatatgcggttgcagcggccgaggatccgctccggtggcggcaccgaagtaggccgtggctgaggcgcgacgaaggaggagacgacggaggaggaggaggcacacccattttctctcccgatcctacccttctcagattcaacggttggatgatttttggtaccgaccggtactagtaccgctcggtacattccgctggacggtaaaaaatctcataattattttgtggggaaagtgcatttaaatactttgtaaatatgcaagtttaaattcgacttttacaggttgtaataaaaatagttgtgattttatagtaactaatttcagtttgacttgtttgttttattacaacatttgaaaatcaaatttgactttgtatgtttgtggagtgatatgttgtaacgtcccgccttcccccaggccgggcccacttacatctgatagctttcataggtcatagactgccttcacagaccaacacatatcttttctgcacactttgtcctcactcgtgtgcacccgggaagaattttccggtcggtcacccatcccaaattactccaggccaagcacgcttaaccctggagttgtttggagattggcttccggaaaagaagttgcaacttgttgatatgagtattctattaatcctattaagccctaagccgggatgttacatatgtctcatattaatatatctttttttattttttaaataactttttaggtgtcattttacaaaaccggcctgaaataaccatagaaaccaaacgcggaagaaacgccataaaagatcaaaacatatataatgattgtcgacaggggatacccgtagactgattaaatagggtattggggtatattggtacgaggatctacacgatatgatatcaagcaaaacaagaagacaaggattatactggttcgaacccctcataaggtaatagccataatacaatttatatgagattgatatggaaaaaatcacagattacaatagaagaccaacgatcccaagtttactggcgagatcattgtcgagatggtttcgacgagatcttccggcgagtaggcttcacgtcctccgggttgtagactatggtggtggtgttggcgctatgattcaataccttgggaccctctagggggtgtgtctttatatcgcgaatcaccttaatttctatctaagtagaatttggagataccgaacccagcacgagtaggactctgttgttcacttgcccctgagaattgttttcataatatctcgtcgattttcttatcatatacggagacgtgtcgtacatacgaagttatgccgtacccgtatattccatgagtcgtaggatagaaggtatgcattatccataaccatgacaatgatgacattgaggcatgatatttgctaacggagtttagccgaaacctacatattggggcccattgattatgagcgtctctctccaatccaacatattacaacgtatcaaagttataacgatcctcggctggatatcgccggcaatagaactcgatctttatttaagagagagcatagaagaaagtccggctcttactatgttcataaaatctactaaaactctaaactataaactgtaaccgactatgtacatatattcgatacaaaatctaacatgatatgtaagaaatgagtagatatccactcaagcgatgaaaatccatctccctatcccgtgtctcttgtggacttattttgatttttagaatttgtgaaatggagtgaatcgcagtcacaggtctactggcaattactatattatatttcttttgttattgtgtacaatagatgcatgtttgaggtgtaggaattaatagatgcgctaaggcctattcgaagattaattctttggaaaatcacaaaagcccacctcatggtatggcatgcatgtggagtttagtaccaccttgcttattctaggagagggggacctccttaaaagggaggatgccctcctagccacttgaagcatgtgtggtggagaaaagagggggaacacacacgcgcgctcgctcgcctggcaggcggcgtacgcttcgaatagtccgcaaaattggctcctcaccacagttttgttttgctgcaggaaaattcggatttgttttgttttggaaacattccgaaaaatccagtgtccggataagttacgcgcgacttatccggttcggttacgtggagtggagatcgtgcgggcgccctgatcaagtgacctatctctatataaaccgagccgccgccttcacgcaaaacacacgaaatcaatctagggtttgcctcctcttctgtgctgcggcgtcgctcgtagactactccatcccgctcaccggcgtgcacctgcgatcgggagagcaggtctccttaacctctgccttcgacgtcttgcaccgggagaaggcggcaataaggtttttgggaagcgcttcgcgcgactgctccctgttcgtccgcgacggctcgccttcctctccgctcgcgtgttgcgcgccttcgtcgaagctcgtaaccgcgagtagttcctgtcgagcaaccggtttttccgccacctcggtacgtgttcgacatgttgcgcatatttgatctgttcatattttactgtttagtttacatgtgtagatctaatgatgcgttaatactagtataaatctgtaatgtcatgatttatttatggaatatattaaattattatatttctatattctcgaacatgaggtgctgtttggtttggccaaatttagcccgtatctgatcgcagcgtaaacagatgaaacaaaagttggtaactgtgcagaagcaatacaggtcgctcccatgcaccattttttgtctgtgataactcataacagtaacatgcaaagaagtactcccatctaccagctgaaatcaagagattaaccttgttgttgcagccgtaaaaacacactactaatctgtctgactctaataccatccgaagagatcaatgtggtaatctggctaattggcaattgacggtgcaaccgagacgagacacatcgtttataaggattacatagaacacgaaactctaatcccaaatcaacctagcttgcttgcactattactgaccagtggtcagcatggcgaccagcgcttcacacgcgcgtgcaccgcttctcctcctgctgctgatgtgttcgtgtttgcttctctctcccgtggcggccgaccgggcggcgtacatcgtccacatggacaagtccgccatgccggcgcatcactccgaccaccgcgagtggtactccgccaccgtggcgactctgactcccggtgcgccgcgcggcggccgtggcgggccgcggatcgtgtacacctacgacgaggcgttgcacgggttcgcggccacgctctccgcctccgagctcggcgcgctccgcctcgcaccgggcttcgtctcggcttaccctgatcgccgcgccgatgtgcttcatgacaccacgcactccacggagttcctccgtctcagcccgttcggtgggctgtggccggcggcgaggttcggcgagggcgtcatcatcggcgtgatcgacacgggtgtctggccggagagcgcgagcttcgacgacggcggcatgccgcccgtgccgtcgcggtggcgcggcgagtgcgaggctggacaggacttcacgctcgacatgtgtaaccggaagctcatcggagcgcgctacttcaacaggggcctggtcgccgcgaacccgaccgtcaccgtctccatgaactcgacgcgcgacacgctaggccacgggacgcacacgtcgtccaccgccggcgggagccccgcgccgtgcgcgtccttcttcggctacgggcgcggcacggcgagcggcgtggcgccgcgcgcgcacgtcgccatgtacaaggccatgtggcccgagggccggtacgcgtccgacgtgctggccgccatggacgcggccatcgcggacggcgtcgacgtcatctccatctcgagcggcttcgacggcgtgccgctgtacgaagaccccgtggcgatcgccgcgttcgccgccatcgagcgcggcatcctcgtctcggcctcagctggcaacgacggcccgaggcttggcaccctgcacaacggcatcccgtggcttctcaccgtcgccgccggcatggtggaccggcaaatgttcgccggatccatctacctcggcgacgacacgcggagcaccatcaccggcatcacgaggtatccagagaacgcgtggataaaggacatgaacttggtgtacaacgacaccatatcagcgtgcaactcgtcgacgtcgctggcaaccctagcacaaagcatagtcgtgtgctatgacactgggattctgctcgaccagatgcggacggcggcggaggccggcgtcagcgcggccatcttcatctcgaacaccaccttgataacccagagcgagatgaccttcccggccatcgtcgtcaacccgagcgacgcggcgagcctactgagctacatcaactccagcgcgcggccgacggcgacgatcaagttccagcagacgatcatcgggacgaggccggcgccggtggtcgccgcgtactcctctcgtggaccgtcgcggagctacgagggcgtgctcaagccggacatcatggcgccgggggacagtatactcgcggcgtgggcacccgttgctccgctggcgcaggtaggaagcaccgccctcggcagcgacttcgccgtcgagtccgggacgtcgatggcgtgcccgcacgccgccggcgtggcggcattgctgcgggcggcgcacccggactggagcccggccatgatcaagtcggcgatgatgaccaccgcgaccgccgtcgacaacacgttccggccgatcggtgacgccggccacggcgacgccgcggcgagcccgctggcgataggcgccgggcaggtcgacccgaacgcggccatggacccggggctggtgtacgacgccgggccggaggacttcgtggagctcctctgctcgaccaacttcaccgccgcgcagatcatggcgatcacgcggtccaaggcgtacaactgctccttctccaccaacgacatgaactacccgtccttcatcgccgtgttcggcgcgaacgacacctccggcgacatgaggttcagcaggacggtgaccaacgtcggcgcaggcgccgcgacgtacagggcgttctcggtgtcaccgagcaacgtggaggtgaccgtgtcgccggagaccctggtgttcaccgaggtggggcagacggcgtcgttcttggtggacctcaacctcacggcgcccaccggcggcgagccggcgttcggggcggtgatctgggccgatgtgagcggcaagtacgaggtgaggactcactacgtcgtgctatgacggtcaaccttggtcttctagtcatgtcggacttctgtgtactggtcggaataatgtcgtggaacaaacatccattcttatggattgggatcctctaacatgatataagaggaacatggtgattgacatgttgccccaccactcatgggcccacctgtcagtgatcacgtcagatagcagttcatattaaaggatccggatctctattttacacgccattacggttacaaaaggctattacacaagcattaagtgaaccccgtcacaagcattaagtgaaccccgtcacccaacaattttctttaagtttatataaacttgagtttattacaagagttcttatcgtcctttagggaaggcagtactaaatccaggccgtctatctcgcacaatctaagagttggaattgctttgtaccaggtggtactacgtccccaagagaggatttcgaactatgggtgggagggtaaaattgtactttcgcgtatacactctcgtttctatcggtttatctgacacaacctcagcgtacatcgccgccgccgcaaatcggggatgaatggagacgcctcaaatccggcttgatgctagctcatcgatgcattcggtgccaatgccctacaggccgctacctatatcgttcacgggctcaacccaaatcgaaagccccgccatgaagttcgatgacgcggacggccaccatcagcaccgatgccatggactgtgaggacgctacatattcatgaggagttatatggcggaatggattttgatacctcgaggggatgttcccttattgtgtgcatgctactcaaatggttatagaaaaaaaataaaaaaaattgagaagatgtattaacatgtgatatagcactccacaaacatgcaagttcaaattcaattttatatctcacaacgaaaaaaataaatttaactgtgaatatttgttaactagttgtagtttaatttgtttttttcgtaacgagatgtataagttgaatttgaatttacatatttatggagcgatgtatcacatgttagtatatgttagtacatgttacatatttttttaatttttttcataatcatttgagtgacatgcaacaaatgagggatatacccacgagggataaaaagagttacccttaaatgacaaccgactactatcatcagcgctgagatagcgtggatgctgccgatgcccggtatgctcttttttctcctcaatactcgcgtattccacattcataaaaataaaaacaaggcttctaacgacaccaaacaattcataacaacgaattcaagacactgcgggctatgatcgatccatcgaggaaacaaagcatgaaaaacgtatatttagcacacttgcacagccgcttgcctttgctgatcccagcctaatgtggccttataagccttaggcccaaataggtacgttttttttttctagtttttccctattttgtgacataaaaatagatcgaaactttatatccaaattttgtatttaaagactttgatttcttttactattttagccgttttaaatatttttaaattcgagtaaaattttgtattaagtagggcgagacaccacctctccccctaagaacatgcgcggattagcatccccgtacgaggaattgttcaagaccgcaagctaatctagtactccctcaatactcgtaaaggaagacgtttaggacaatgtttaagtcaaaccttgggaatatatattatgaataactctcaagttgttgagtttgaaaatgtaaaaattatatgaatagatttgtcttgaaaaatacttttataaaagtatacatatatcacttttcaatgaatatttttatagaaataagaagtcaaagttgtgttttggagaccatgtcaatgtcctaaacgacttcctttgtgagtatgaagggagtacagttcatttatgcgtccagggatcagttactacatctgtcttaaaatataataattttttgctataaatctgaacacataattattttgattcatagctaaaaatatttatattttaagacggatgaagtattagttaagctaccgcgccgtgcatggcaacacgacgaaacaccagcagcacccccgtgattttgggtgttccccggtacgcctcatggcgagacttgatataagtgcatctgtgcatggctcgcgagacctgaaaaccgtatatgtgggcgtgtggttgagaacttgattgggatgatgatgagacccggtgggtcgaacaacaagcgtacgtagacgagccaacgcgcgtacgccatttttcccggccctgcgtcacacggcattcttgtcccgtatccgcgccccgcgttcgcatcgatcgatcaaccggccaaccgccccagatatggcctctcgcgcgcgcggggacccaagcaaccaccgggcaaatccaacgcccaattcgtcgagagatttttcagctggtgcgtagacgtcgctaacccccatcgcctgctagtataataagatgacgcctacgtcgttccgtgcctgaatccgtggcacagctacgtacgtacgtgcgtgctcgttacacgtatatggcggcgtcgctggcaatcgttgccgtggtcgtcgcgctgtgcgtggcggctgccgcgtcggccgagacggcgacgtacatcgtgcacatggacaagtcggcaatgccgagcggcggcggcggcgggaacgggtcgaccagcctggagagctggtacgcggctacgctccgggcggcggcgccgggcgccagaatgatctacgtgtaccgcaacgccatgagcgggttcgccgcgaggctgtccgccgagcagcacgcgaggctgagccggtccccgggtttcctctcgtcctacctcgacgcccccgtgacgcggcgcgacaccacgcacacgccggagttcctcggggtgagcggcgcggggggcctgtgggagacggccagctacggcgacggcgtcatcgtcggcgtggtggacaccggggtgtggcccgagagcgggagctaccgcgacgacgggctcccgccggtgcccgcgcggtggaagggctactgcgagtccggcacgcggttcgacggcgccaaggcgtgcaaccggaagctcatcggggcgcgcaagttcagcgcgggcctcgccgccgcgctggggaggcggaacatcacgatcgccgtgaactcgccgcgcgacacggacggccacggcacgcacacctcgtcgacggccgccggctcgcccgtcccgggggcgtcctacttcggctacgctcccggggtggcacggggcatggcgccacgcgccagggtggccgtgtacaaggtcctgttcgacgagggcgggtacacgacggacatcgtcgccgccatagaccaagccatcgcagacggcgtcgacgtgctctccatctcgctgggcctcaacaaccgcccgctccacaccgaccctgtggccatcggctcgttcgccgcaatgcagcacggcatcttcgtgtccacctcagccggcaacgacggcccgggcctctccgtcctccacaacggcgcgccgtgggcactgaccgtcgccgctggcaccgtggacagggagttctccggcatcgtcgagctcggcgatggcaccaccgtcatcggcgaatcgctgtacgccggctcgccgccgatcacccagagcactccactcgtgtacctcgactcctgcgacaacttcaccgccatcagacgaaaccgcgacaagatcgtgctgtgtgatgcacaagcttcctcctttgctctgcaggttgcagtgcagttcgtgcaagatgccaacgcggccggcgggctcttcttgaccaacgacccgttcaggctgctgttcgagcagttcacgttcccgggcgccctgctgagcccgcacgacgggccggcgatactgcggtacatccagaggagcggcgctccgacggccaagatcgcgttccgggcgacgctgctgaacacgaagccggcgccggaggcggcggcgtactcgtcgcgcgggccggcggtgagctgcccgacggtgctcaagccggacatcatggcgcctggctcgctcgtgctcgcgtcgtgggcggagagcgtggccgtggtcgggaacatgacgtcgccgttcaacatcatctccgggacgtcgatggcgacgccgcacgcggcgggcgtcgcggcgctgctcagggcggtgcacccggagtggagcccggcggccatccggtcggcgatgatgacgacggccgcgacgctggacaacaccggcaggtccatcaacgacatggcccgggcgggccacgccgcgacgccgctggcgatggggtccggccacatcgacccgaacagggcggcggacccgggcctcgtctacgacgccgtcccgggtgactacgtcgagctcatgtgcgccatggggtacaacctctcggacatcagggccgtgacgcagtggtcgacctacgccgtgaactgcagcggcgcgtcgtcgccggacctcaactacccgtcgttcatcgcctacttcgacaggcgcagcgccgccgccgccgccgcggagaccaagacgttcgtcagggtggtcaccaacgtcggcgccggcgcggcgagctacagggcgaaggtgaagggcaacctgggtgggctcgccgtcagcgtcacgccgagcaggctggtgttcgggaagaagggcgagacgcagaagtacacgctggtgttgcgcggcaagatcaagggcgcggacaaggtgctgcacgggtcgctgacgtgggtggatgacgccggcaagtacacggtgaggagtccgattgtggcaacgactttgagctcaacacggctgtagactcttcttttcactcttgtgtactgtagcgtgcaagttgattcacatatctgaagttctgaacatgttgttcgtctctagctgttgggcaaataatgcttttggtggttagttagtgcagtccgtgagttttggtatatgctgctcgaatgccccagtaattggcataagtatttatgttcttgcttttgttcaaaggaactgttagaagccctaaaatatgtcctctatagagctaaactattggaattatgtcaaaaatcacgtctccaacaggtttccaaaggtgcacccagtttttatgcacgtccagtcctgatgccctcgtaagtatagacttcaggcacctcgcggcgcctcattttgatgtcaacgttaatataagaggatatttggccagaaacagttggagaggatttgcctaccctgatgccatatttctaagtttttgagaaccaataatatgtgatctcttgaaggaggagatgatttttggacccatgttttttcacagcctcaatccaagattattgaaagttaaattttggatcactcttggaggtactttaaggccccatttgaaatacaataataataaacatatgaataagaaaaacttaatgttttgataggaatacatatgaaaaacacaaagaaatacaaaacaaaagaatgaccatttgaataaactagaggaaatatgtactcctaggaattagacggaattagacgagagagagagagactaagaataatagctagaggttaaagctcttgctatcttttttttaaaatttacgcacaaagccattcctaagaaattttgtaggatttatgaagttccaatcttttgttgcaaagggccgaacagaaaaaaattctataaatttagatcctccaaaacacatccacaaatcccttgaaaaggaggtctaagaatcgttgctactgtgctgaaacggatttggcccgtcatatcgtcaatcaacaaagatgcccaatgcccgcatgcatgtcgttccggatccccgtacagggtgcatgtgcatgtgtggtcataagcaaacatgattgtcgatagaaagaaacgaaatgaacgtgctattgccagcttgtcacctaaagcaatagagcatgaaaagttcaccgattgaaagggaaggtgctaattggatctaattcttattctaagcatcctggtatctagtcatttttcatcatgagataaataccatagagataatgcaaaatatatgcagctgggatgaactatacctaattcgaactatatcttttttttttgtgcaatattgaaactgtacaaaactgtacataccagcaaagcgctcacaacttcaaatatcaagagtgtaagttccattgcttaaattcatatacgtatcagtagattgtacactaccagattgtgtttgctgcgtagattttggtgggagtgtcttgttatgttgttcgccaccgtcctcatatggtaacacgaccacaggagcagcatgtatagattcccaccgttccttcatgaagctcatgaacgccttgaccatctccctccggaattctagttccctcgtgaattgatcaaacataaaaaatgcaagaacatatttgaaaggaaccacaagaagaacagcagatgatgctagaagaacaagagcaacctgagtcgttacctgtcatatgatcaaacaagaattatcaagaattacttactcgtatttgttatttttagttgagaatgagatttatttcatcatacctcaggttggcctgctaaaaagattgtgcgtattttaagaagagagagattcaggttctgaagataattctccactgaagccattgcctctttaagagctataatcttttggattgtgtttgaaggtggttgatcttttattgtcactttgccaaaagatctacccaaccgaccttgttctttcagccctttcagggcaagcatggaaagagccaacatcatcaaggaaaatggaagaacataagaaagcatgttcctacatatcataataaatacagagaaatgttagaaaaatgatgcttgtacaatactggaagacacaatatttagttggaaataaagataaaacatgtaaatgaaccagcaaatgatgatcaatgccctgccaagcattttgtctataattgctcaaaactttcattttggattaactgtacacagtttggatgcagttggcaaatgtcccaatcagtgaaatttgaagatattcaatttatatggcagggtgaattttcaaatattgagtatattttcctattaatgcagcaatacttttgaattataatttacaaccaggcacaacaaaaaaaaaaagaagagtcaaacacgataactaccttagcaaggaaaacaatctacaccccttttcacaacacatataatccctactctgaattactttaagttgatattcaatgcattggagcagtacaacaactcaacaagaaaaggatacatgcgttaagtgaattacctgaagataatagtataaaccacaagtagaaaacaagcggttgtacgagaattttcccagcgtttgagcttgtagaatttttcactcactattgcaaaaggaagtataagctcctgattcatgaaacaagagatacattataaacatgaaccccctgcctaagaacaagagatttccaactcaactgaaaataaatcggtattttttctaccaaaacttcagcaaagaaataatatttccaaagctaaatctctgattgaaatgagagtaaccatgccaggacaaaccacaagtataacgaaacctaaataaaccatattgtttttgtaagccatgcaactggatgacagacatgtaccttgaagaggtcaatgttgcttggaataccttcaatagtagcggcaacaattgtggcctgtgtcctttcaactattttgctcttctctttacaggcaaccatagccttttctacaagatttttatcagctacaactaaagatttgctcaatattacaccatgcttaactgaggagtttctccaaaagttggccgagtggctggatgtccaactgggagatgtcatccacttgcgcaagtatacactaccatctatgtcaaaaatatgagcatgggcgctagatgagtcttctgaaggtctatgccactgagatgctctttgacttgctgctttggagttcgtaacaagtggcccgccccagaacttaaccgctaaagtctgaagcacaacatcaccaaaaggtgcatttgacaggtatgagaactgtactaacttggctggatcttcataaagtctacgtataaattgcagagactgaagccttgcaatactatttgctgcactacttacagctcttttcttgcctctgtgggcaccatatacatgatgaattgctggatcatcatcccttggtccatattcattaatgaacctatacacagaaatgatttcactaatgaatgcgagccatacatctcgtctcatctctccaccaaaatcaacaaactccaatgtccactcatttgacctgtcaacaatcaatcagttactttgagattacactaaatgcattttatcattacaattaaatagcgcggacaatatgctaacacaaatctacaatttataatacaactacaaaccaatagaataatcaatatgtttaacaatattgcaccaatagagaaatggtaacaaatcaaagaaataacagatcctcctgactatagtgaaatgccaagtatttgttagctaatagtggccagcagtgatttcacaaatggagtactatggtgtagtttggtatggttacaccaatcaatttggcagtaatcagttctagtgttctcctagcaatttgtagatagcaacttaatagtgaaaatggtcaccgtggggtcattttttttttcaatagtgaaaatggttcctctagagagtaaccaggcatactcacactgaaccagatgaaacagatacggcagagtcgaacaatctggatccaaatggtccaacctttgctttctcaacccttgaattacgatctgtaaggtcaagcttcaatggtttattggtacttgtcagtccaatggcctgccaatatcaatgtaaaggtggaggagttgggcccaaagtcatcacatcttgcgaaattccaaaagaagccacaagtagaattgttaaaggggaccatgattcacaaattacatgatcaacaaaactttcattttttaactgacttatttgatgaaagaagaagttctatcattgtacagctatctatttatatttacgtgagtgttaaaacaacatcaagtggtattacagaacatagaacatttttttcctttgctatcataacatgggaaatattagagagaaccgagatcagtatgatgcttaagcatgcttgacaaaagggccatctgtacggatagcaacaacaagtgatgcatatttttaaataacagaggaaatcactcttaaaaaaatacacacattccaagtattaattcatacctcaaaatagagtgccttgttggtcaaggttaagtgtccaggccacgcagtgttttcttcccatttcagaacaggtctttttctactagagcctatgcataggacttgctcatcggacaaaaaatgatctccacttttatgtgtttgcctcccatgatgaactctgcacaggtaccagtgatcacagaagccaaacattcagcatatagagtaatactccctaggagcatatgaaaatgatagttgaaattgtgaactataattaatagttcaaattggacacagaatctgacaacatgatcacgctttaccagattaaagtgacatataaatacattattattttgatttatgatggtggtaagagccatcaacagccaagcaatcaaatttcttgctggcctaagatctaagccaaaagtctaaataaagagatgtatcatgtaacctgaagttagaaatacatttcctgaaacttgagaagcttaagtgtgattacaatcagaaaaatcagccgaagatgtaaaggtgatcttacttcagaagttcaccaaggtatgttgtccatatatctaaagaaagccccttttcagaaccgacaagggccctgaagagataatgagccgttgaaacatcagctacacctgccacagcaggggcaattcggacaaaggcatcttctccaacaagtcttccctacatgttaacatacaaactcagaaattcatttcttgtaattccagtaaaggaactcagtgatattgcatgaatttaagttttccacaaggacaacaacgcgtacatatacagatgaattacacctcaccagtatagaatagttatctagtgaagactctgtgtcatcatcttcaccatatggatcttcccacgcaagcatagtcataaatattagcctttggaatgcaagctcctgccgaacaattcaagtaaaggtacttaccaaaaactagaactggctaaaaaataacaagtgcaacaagcatgcaataatgttgtgttaactgacagggaacttggcttaaggagtgtggagcactgtagcacatattacacttcatcgaaacaacaatactgaattagtaactattttacctttaaacttggatgcaaatcagagttatctcttgacaaatagcggaagcaacaatactcaaccagatttcgagcatcattctgaacatgactaggagcaagagcttcaaagatcctctgcaccttcctccccgttaacccattcaacctgaaaaaaaaatcatgtaaatgggtgaaattcaggacagatcccagaccatccatgagctcatattatatatatacttctccaactgcccttttgaactgttaccaattgaatccatttctcacttacccaatcagcaacatacacgaaatttagaatgacaagaccatacatggaccaatcaacctgattccatatgtaaatttgtgggatgcaagttgctaggatcaaagccatgccagtgagcatggctgctcctgtcatccatgctgctagtccttgttccacagacagcaaggtaggtatctatcaaaatctaccatctgaatttagccaaaccaaaaattgactgtcgctacatactaagtcacatactcacattgatcatgggatctagcaactctcagaccatcataaagtaggtgaagcataactgtaatgatatacgaactgattgagataggtccactcgtttttctacaaatctagtcattactattatcatcgtggctacaatgaacaatcaaccgtggaagcgcaatcggagataacttttaccaacctggcaaactgctcgatggtgacgacagcgtctagcgagagccagccacgaccgacccgccgttcgacggtgatctccggcaccgcgacgagcgcctgctcctccagcgcctccttccgccgcttcttcctcccctccgcctcctccttgctcctccccttctcccgcgccgcgttcgccgcgtcggcgatggcgcccctcgcccgcgacagccacgaccgcacccgctcctgcaccgcatctgccaggcccaccacaccacaccacaccaaaccccagcgatcagcgcggcgaccgacgcacacacaaacacacatggtgggggtggtgcgggcgctcacctgcgtcgacgtcggggatccgccactgggagcggagggcgaggggcggcgggggtgccgcggcgcggcggcgacggtggtgccccccgccagcgaccctgcggcgggggagcggcgtgaagcgcgggggctggagccgcagctggagcatggtggcgtcgccgccgcagccgccgactatcggtgggggggagctagtggtggtactgaggcgggcgtgccaaactttccctcaattccattggctgggagtgggagctgcacattatctcacactgcttgcttgcttgctaca

SEQ ID NO: 18325 - DNA, 6347 bp, Oryza sativa
gtccgcccacgacacgccgccgctcctcttctcccccttctcccccgccgccggtccggccgctgaccggccgttccgcccacgacacgccgtcgcttcggccggtgacccgccgccgcccgcccctctctgcctccgccccgccgtcgcccgctccggccgcgcccaccccactccgccggctggagacagagaagagggagagaggggtgacagagagaagagggtagtgaagatgacgtgtgggtcccaccatttattattatttgtgtgcaacatgtgggtcccatggattttttttttccgaatcgaattgccacgtaagcgccacgttggacgaagacctagtcagaggagcgccacgtcagccaaaacaagggactataccgccgagggacgttgtttgcacggttttgtaagttgggggatgcgttgtattcggttttgtgctgtagggatgaaaattgaactgggcgacaaataaagggacctaaagtgaacttgttccttcccgtgaaacatccacaaggtttgggcctcgtttctaaatgggcctgaatcccggcgttgttgtgtatgggctgtaatgttagtgggctgacacctaaagaaagaccagcgccggggggggggggggggggcatagattccccgaggccgcgacaaaggaagaacgccaccattcgtccaggtccaaagcagatgccagtatgccaccaaccaattattaacacaacagatgcttgtgctaaatggttctttcctcatgaagactcagattttatttcaatttccgttagcacgtttttcaagctacaaagttgctttaaaatgttaaatttatccatttatcatgtttataataattaaaatttaattaattatgtgttaatagttttctcattttcctttgagccaacctttttttaacggaaaacagcattagagtgctttttcattgaatagagtaggagaaaataaacacctaataataaaagaaaaagatcaccgtaagctgtacatgagcgcggagccaacctaatttttatctccatcagtttcaaacaccggcgttgtggaatttttttttccaagttcacttggcaaacggaagcacctgtcgctgcgtatctgtggaaaacggcccggggccggggaaggcgacgactgaggagggcgtagccgcgcccgcgcgcagaggcgtccatctcacccacgacagcagagcacggcatcgcgcccatcggaaggccacacaagaaaaaacggccgcgaaaatcaccctcccttccttctcgaagcgttcgtagaaaaataccgtctctcgtctcgtgtcgcggtcgcggatgccggggtcaaaaccctccccgcctcgttcccgttgagctcgccgccgctaatatcctaacgaactaactaaccatctcatcctcgaggtatccggccaagccgccaccggggtcaccaccatcgagctcgtatggagcggagggcgcagccggtgtcggcggcggtggcgccggtgacggggaggaggaagggtgcggcggcgagccggaagtggatggtggtgccggcggtgggggaggagcggagggtggagtttgggaagcaccagatcatgaagatgacggggctccccgggcgcgacctccgggtgctcgacccggtcctctcctacccgtccaccatcctcggccgcgaccgcgccatcgtcgtcaggctccagggcgtcaaggccatcatcaccgccaccgaggtgctcgtccccgaccacgacgacgtcctcctcgcctccttcctcctcgacctccgctcccgcctctccctcccggttggtacaccgtacaccatctctttttctcttctgttttctcatcatcaccacatccaggttcactctgttgcattggttgtactagcagattgcatctgcaaactgatatgacattgaactctggaatttgattctgttatcgtcgtcgtgattgactctactgaaactctgatgatgattattctgggtgaaggatgcggcgcctagcacgaatccggcggcggctgatcgcgggaacgggacggagcagggcgatcaggggagcgtgccaggtctggcgatcagcggtgctggcaacgccaagatcccgccctttgagttcaaggtgctcgaggtctgcctcgagcacgcatgcaaagacttggaatctcaggtatactgccagaaaatttgtctattgctgctgatgatgaatcaaaccaatggtagtatatattaagggggtgtttagatctagaggtataaagttttggcgtgtcatttcgggcattatatatggtgtcgtatagggtattcggatactaataaaaaaattaattacataatccatcattaaaccgcaaaacgaatttattaagcataattaatccatcattagcaaatgtttactatagcaccacattgtcaaatcatggagcaattaggcttaaaagattcgtctcgtaaattagtcgcaatctgtgcaattagttattttttaacctatattaaatacttcatacatgtattcaaacgttcgatgtgacagggtgaaaaattttgaggtgtgatctaaacagggcctaattcatgttcatctctgtctctgcaaatggtgtcagacacgctctctggagaaggaggcgtatccggccttggacaagctgggatcgaaggttagcacgctgaacctggatcacgtcaggaatctgaagagccgcatggttgatctctcagggcgcgtgcagaaggtacgcaagaacagtggactccgttcgcttgagtccgtttaagttgcagctgaaagcgatggcacctaagcattttggccacctgttcttggtctcgcatgcagattagggatgagctggagcacttgctggatgacgacatggacatgtccgagatgtacctgacgaggaagctgtcgttccaagggctcagcggatcgctgagcagagcggattcacacaagtacgcatctgttgatcatgacgacgataggtatgtcacctgaattttgttctttctggtttttggcaggatcgaaagactcgaagtaggagttgttacctgaattctttaaccggaaatggatgttgattgttgatagattgccgatccgtggcttttgttttaatctttcatttgcgcctgtattcagggaggaggaagaccatgacgatgagacagagagtggccgtgaaagttctgtttatgttaagcctgatatagaagagttggaaatgcttctggaagcttactttgtgcagatcgatggaacgctgaataccctgtaccatgtatgttcatcctcctcctttactaagggcttcatcttttgcctataataaatcagccattgccaaattttaatataaaagttaattttagagtttattttgggcacttttaacatagtttcttttttagcaatagcttttaaatcactaaaaacacgcatctaaaagtttcacctacaaactattttttggttgctttgttttatacattttttagttgctaataagctgttatggtttataatcagctctcggtcaactgatgaagttgaacattgccatgcttagattgttactgaaatggttgtcatgctaatatcaactgttttagtacaatttagtgatactgtccagtttggaagataaacatgcgatatttagcataacttctgtaaaagtctctgcagccaaaatctgacgaaatcttgttaatgtttgccattgaaatcgacactggttttatcaaacagttaaaatgtatagcctgcattgtcacgcacttgcatcgctcactactagcaaattccatgcattgcttgatgtttcattgcccccctgacatttgcctattgacatggaacaaagatccgtgaatacgcggacgacacggaggattacatcaacataatgctggacgagaagcagaaccagctgctgcagatgggcgtgatgctgacgacggcgacggtggtggtcaccgcgggcatcgtggtggtgagcctgttcggcatgaacatccacatcgacctgatgaaagacccggagacccccgagatggtgaggatgtccaacatgcacttttgggagaccaccttcggcacggtcgccggctgcatcgccatatacctcctggcgatctacgctgggaggaagagcaagatcctgcagtgatgcttcccaacagaggaagctaagcgtcaggttgcgagttctgcagcctggctgcgattttgctgggcagtggcgtagttgataggttgtgtatggatgtgatgcatttttgttgatttcgtatggtgtgggagcaataataatcgaacgatctctctccatttcctgctcttattagaagttagcacttagcactactatgttaaatttcggccaaaggaaccactatgttaaatttcggccaaaggaaccctttcagaaatgctcttgccacatttcgcattcgaagtaaatccaaaaaaggtaccagtaattctcattcaaagttaaaacacgtgctctgacttttactgactatgctgaacggctgtgccactttttccagtggccgatccagaacaaaacgaagtaacaaaccagtgttgcctttgtcaatggcaaatcgcctaaagatcaacaaatgatatatatgctcatctgactatctattttgtatttacaaggtgatatggtgatgcaaacaagattttttgtaaacgccacaatactcattatctgatgcacaacaggtattcccgacctgagaataaatattctacacaaatcagctatgtttagacttacagttgcaccttccttgatctagtacaccgaacctggccaaaaaaggggagtcattgacgaaccaaagaagatgctcgagttttcaaaaaaaaaaaaaaagctcgagaaggtaaataaaagaaccaaagaggaattctgcgtattcttctcaaattgacttacgttatctaccgggttaaaagcagttaatccagagctggtctgtgcattactcgaatccaacgctctcttgctgtttttcttgaggccagcgactcctaaagaaattggaatcgatgggtcagtatcgatgtaaatatgaaaggagacaaaagaacttcccaactggtcagtgctgacaacttaattgactgtgcagcattgccatttccaaatgaatgctgattggaacatttctaacaattcaaggcttcctagctcaaaaataaattatggaaattgttctgaaaatgacagatatttatcacttcaaaacatgcaggcattcctagaaaaccaaattggataatgccactctaagtactgtttgcttagacattgtatatagagtaactcatttacctgttctgttatttgaaaaaggctgcttcacaaaattgtcgtcaatatcaccatcttcatcaggatcactgttacaagctgagatgtgagtaccctgtgttgcacgttaggcaaagttcctaaataaatgatacataatatttctcaccagacaatagaagagccaggaagcaacatctcttgccttttgttttgagaatcagctgaacccttcccacgaactctcttgaaagaactattgaggattcaggacaagtatcaccataagttggataaaaccttgaaagcaacggctcactacagttccaacagccatgcatcttactagtgctacatgcctacatcacattgttgattctgccagttttgtacaccgtaaacaacaagagcagtttcttatagaataaattgaaaacccccttttgaaactaccaagctatatatgcaatagtggaagaataatttgttatttcattttaaaggatgaaacagattggtagagatgcacttataatgttgtacacgaaagtaccaaccagctttccagaaacctaggcttctgaagttcactcaatttcgttctgggttctagctatgcaggccaagtccagatgaatgtgtcaagtttttttttttaatgttaactgaatgtgccaagttgttattgcatgctgcaagtgcgtgcatattgtatctctccttgtgtaaagtgttttatgtaacccaatcctttgtgctataccgcaattcaagtgtgtaaatgctcatgcactaagacgagccatgcatgtttagatcaattttacccatttctccaattaccgtgtagacccaataactgacatttgcatagttaacttacaatggcaatggaactattataccaccacaaaaaagatgaatgaaatcacacagcaggaaaaggaaaaggt

SEQ ID NO: 18326 - DNA, 961 bp, Oryza sativa
tttactgaatttacttttatatgtctaagaaataacttattgaaatttaaaagtaatttagacatatcataaaagtaatttgtgatttttcatcaaaatataatcatgtgagatcttgttataaagatttaattattacgaacacaacggtgtaatcgtattgtaaatcggatgagtaatttaagagataattttatttcaagcatagatgctcaatggattaatagcaaccaaaactcctaaagtatgggtgtctctggttaagactaattggatgtctctggttaagactaattggagaggcatctccaattagatttaccgcagcaagtagctaaatctcacgttaattttctccatgggcattaattaacaactaattaaacaaggtacgtctttacacctacacgtacacagtacatatacacttgaaagaaagtctcaatgatgcgcaagcacaacaatggcggcgaaacctcggtagatcgatcgatcctcgtaattctactcttcgtcgtcgtcgctgacgaacttgccggtgccggggttgatggcggcgatgaagaagaagacgacgttgaagaggacgagcggctcgatctcgttgatggggacgccggtctcgatgttgagctgcgcgagggcgcccttgccggtgatgatctcgccgatgatggagaaggcgatgccgagctgcgcgagccggccgacgaacagctcgttggccttggtgaagccgaacagcgggccgccctcgctgaggcccagcgcggagcggaagcccttgcccggggcgatgacggccttgtcgaggcccgtcaccggctggtcgtcgacgaagctgccgcggtcgccgagcgcgccgatggcgccgaggagggtgaagaggatgaagaagaggaggaggggctccgcctcgtagatcgggatccccgtctccaggttcagctgcgccaggatt

SEQ ID NO: 18327 - DNA, 905 bp, Oryza sativa
tgcatcaagcaaattggacattgcttgctctttgaacaaggacaaagaaatatggacaacaagaagagttcaagacatgttgcatttccaaagttacatgagttgcatcttaaggggatgatggaatggaatgagtggacatgggagaagcatgtggaggccatgcctgttctaagcgtgcttcatgtcaaagactgcaacttgagccatcttcctcctggacttccttaccaggcaagggctttgaagagattatgcgtaataaatgctcggaacctaaactccgtggagggtttcagctcggttatcaagcttgaagtctatggcaaccctaatctcgagaggattgttgatcttccaagcctgcaaaacctaaccattgtgaactgtccaaagctgatgttgttggatggtgttgcatcagttcagatcatggaacttggggaccacgggatggaaacgctccccgagtacctgcgacatctgacgttacgacatttgaagattgtttgcagcttgaatctgctcaggttgatgtcgaccaagcatgatgcaagcaggtcagagtgggagaagatcagccatatcatgcatgtggagggattcgctagcgataacggcgacggcatcttgagatggtacatgtcctacacaagagatccatacaacctggagacaaacattacaagcagatagctccacaccaccaggtacatgcatggttttgttcattacgagtaaattaactcccctttgccatgcaatacatatggcattctcattatatcaatccagaaactaagcgaactgtaaatttattctctatctgttctatccgtatgtgttcagaaggtgcatcagaataaaatgcgaagttgagggaagaacgcgatcgtgatgggaag

SEQ ID NO: 18328 - DNA, 5942 bp, Oryza sativa
gaaccatgaaatttgtcatgccaaataatagatttttagttggatggcaataatctgcttcttacagcaaatatcatatctttcttatagtatttagagctgattatcttttagaggcttcgatattattgccattaaaacaccaattagtttgctttgatattattgccattaaattccaaaagtaaaatttggacgataaaaatatcccctagaagtcaaacttacatttccacactccaccttacaaactgaacttcataaaaatcccctccaagttaaactttattgtctactccctctgtcccaaaaaaactcaacctaatatgggatgagacataatctagtataatgaatctagataaaagtctaaccagattcgttgtactagattatgtcccatcctatactgaattaagtttttttttgacggaggaagtaggcctctgctgcgctatgccttcctcgccaaggcagtgtttggttgcctccttggagccttccatagttgtagtgtaagggcacctttgaggcacagcaattttgtaggattttcacatgaacagttcaattttcgtgaaattcctgcaaaaatcctctgtttccatggaggaagtgtttgatctctgtttctaccatcgtttgagtagtgttccagttctcaattgaaccaagtgcacttctctctagtctccacttgtttggtccattttggggcaacattagaggttgcctgtgtggagatggcatcagtgtcacactagttagttttgttatagggaacatcctgtttagcttttggtgatcttccttaattttcttaatttgcttgtgttagaaaggctatatttgactgaaatatatattatacacacatatgcttgatgtatgggtgcatcagacatcactcagcaactaaccactaatcacaagtgagtatatatcactgaaacaaggatagtgaaagctcttgaagaaacaagagagaaatgggaaatttattcattattaaccctggtggcccttcttgatcatatcttgaattcaatgtccataatcctgggccttcttttgatctccattttggggcaataattaataatcctaggcagctttcttgcttcttcaccagctcttgacacccttcgttaggaaattgaatgctcggagaagcggcttcggctcattcataaaacttggaggatcatcaactggaggttgatgaatgctatggagatcggaaggatgacgaggaacagggatagtaggttttcctggcttgaaccacaggttgcccattaattactaatagatcaacgatactagtatacagatgatatatgcctatggctgtgtttagatggtggaaaagttaggaagttgggagaaagttgatagtttggagaaaaagttaatagtttatgtgtgtaggaaagttttcgatgtgatgtgatgtgatgaaaagttgggaatttgggtgactaaacacggcctacatatgaccggtatattagtgtttgtgttttgtgttcctgtctgtgggaggagtggttctaacccactttaaatactaatcaaaggatcaaaattattcggcgcagaataaatctgttcacattgacttgactagcgtactaagttaagttaaggtaattttaccatccttaaaaatatatcgaaagataccatattttataatacaagtatcttgaggtattaattttttatgtaaaatttagttacctcaaacttttttgtaatgccgtaatttctccaactaatatgaccggctggtcgatcactttcttgtaggtaggggtgaaaatggtatggaaactttctggattccggacctattttcgaaaaagaaatctatcagtcggaattttttggaacgggaaacgaattcagaaatattttctcggaaatggaatcgaaaatgataagggtattttctgtccggaactcggaatcggtcggaaacttttcgaaaattttctcggaatttccagaaattttgtgactgaaatagtttggattctttttttaatcactgaatagtgaataatatagtatttggctgttattttttaaaaaatatttgttatgcaaatctaaaattacataagaatatttttttttctgtattggaatttatcaacatcattactctcttaaatatagataatttatccatagattgtgttttgttatataatgttgatacttaacaattggacttatatgattgtattttatgattgattagtaaccattgagacttgagaattggatttatcagtttgaggggttttttattccgataaattttcgttaccgtattctcgccgattcgttttcgctccgttctcggtttcgataatattcaattctgttttcatatccggggtttccgattccgaaaaagatatgaaaacgaaaacgataaacatgttttccatccgtttccgtaccgttttcacccctacttgtaggtataattttaattctttcttgatgattatatatatgaggtgaacttttgactgcatgaccgttagttttaatgcaatcaattgcatctccttcgtctaatttgatgtttaggtttgctcgctgtaatttttttttaataacacgcaataagtattttttcttctaatagataagtccatttgatgtatatgagcaataagtatttgatgtatttgccccctccgatctcaagctgcataggcctcggccagcatacatgtatacgatcatggataagtccatttgatccctaaactctttgctttgtcgaaaacacatgaagacacatctcgactctaaaattgggtatttgacaccatctaactttcaatactggtaacacccaaacttatgggctttcctcgaagagggaaatgctacagtttctgtcttttatctctcgagttctaactactctatgattgagaacttcctcttctgcttccgtttctgccatagtagtgtcggtggcgactgatactgagtaagagaaagtaggaatagaaagaagaggtggatgccggagatacgggcccgggggtatgtgaggtaaagaggagtcaccttcctgtccagccacgtggcactgcaagctggccccactcacgcacctcgtgggtcgcgaaagcggcgggggaggggggggcgtcggggggccgcatccccccctcgggctgtcccgctgcttcgccccgaggccctcgcgcagctgccgcgtgggggggggagagagcgagagggggacccaggctggacaaccataaatgcgcggcgcgccaactgtccctcagtatgtgtagcgcggggagggcagacgtgcgggacgcctaactgacccctatgaatcggatgtgaccagtctgtgactggcctgttgccggtcacgtccgattgaacgggcggccgtgctcccacgtcacctttgtatccggcggagtgggggtaagtgtgacccgtcacatcggagcatcactcgaagaaaggctgccacaagtcttcacttatttatgagcgaatgacagggctgtcccccgtgtcaggcgggggacgacgccgggtcccactcaaggaccggttgctgcatagctttcgggagaaggcatggatcgagactcggtcaaagtggagtggggtccccctcccattggggggagtaggtagaggcggcgcatgtggtatccccttgagctataaaaggaggaccttgcccaccgagataaggggacgactcttagaaaacctgaactctaggagaaggaaggcgatagcgctctccggagtagaggaacccttgtaaaactcatacataatcccaaacgcaggagtagggtgttacgctccatagcagcccgaacctgtataatccgattgtgcgcaagctagccggcagtttcagggcgaacgcgtgattcccaagaggcgagcttctgcccccggccgaactcacgaaaggggggtctcacgactccccgctatcgagggtcttccctcgacagctggcgcgccaggtagggggcagttgcgcgtttcgagaagaagtcgttttcttccgccccaagtttctctgggccctagacgatcatggtcgaggtcctggaggtggaggaggcggtggcgtttacccccaccccgtccgggagtggggattccggcgaaagccgtggccctcgtcaccaccgccgtgattctccaactcctccgcgccgcgaaccctcgcggagggaggatcccacccgttcgggtggttcggccctttccccgccccctagcggagggaggccacgacgcgtcggggcacggcgccgtctcgtttacagcgacggcagttcgccccaaggcgcgcttcaggcggcgggcgcccttctgcggcatccccccgtaaacccggagccagagactcccgtttagcgctggttggatgacgtggccaacttggtcaccgctgcccagcggcatttggccacgggtggccgatccgccgccactggtacgtcgcgtaccccggttaccctctcctcgtcagcaaggaggagggctcgtcggtcggccacgacctcaaggcggtccacagctccaacatcgttgggggcctcgggaagccggaggcgtcatgacgatctctacgaggagcaggacgctcggatcaacattgagcgatgccgggatgagcgccgagctgcccgcatgggggaaggcgcctcctcatctggagtgccacgctcctcctcacgaggcggccctccccccacgctcacccctggggggacaggttgtagggccttcgtggcgagtcttcggaatgtccggtggcccccgaagtttcgccccaacctcatggagaagtatgatggtagcatcaatccctcggagttcctccagatctacaccacgattatcgtggcggcagggggagacgaccgggttatggtgaattactttcccatggctctcaagggtcaggcgcgtggctggttgatgacccagccccccgactccattcactcctaggaggatctgtgccagcagttcgttacgaacttccagggcacatatccccgcctgggagaagaggtagacctacacgctgtacggcggaaggacgacgagtccctccgctcgtacatgcaacgcttctgtcaagtgcgcaatactatttcgtgcattccggcccacgcggttgtgtatgcatttcggaacggcgtgtggcacaatcacatgctggagaagatcgcctccaaggagcccaagaccaccgctgagctctttgagctggcggacaaggtggcccggaaggaggaggcgtgggcctagaactctcccgacaccggtgcagcggccgcggctacccccgagtctgccccccgctctaagcggtgagataggagaggcaaaagtaaaccggcccgctccaatgacgagggccatgtccttgcggcagatgggcccgcactggccccgcgcaaaggaaaggccaccggcgataagccgagctccaccgctccctccggcgagggccggtcggcagacaagtggtgctcggtgcacaatagttaccgccacagtctcgccgactgccgctcagtcaaaaatttggccgagcggttccgaaaggccgatgagaataagcggcagggtcgacgggagagcaaagctcccgcgacctcaaccggtgaccggcgagaggaggccaagaacaaggcccccgccgatgatggcggtgacagtgaggatctggatttccagatacctcaggggaccgtcgccacgctcgatggggggggggggggggcttgcgctcacacctctcgtcggggcttcaaggtcatgaggcgagagcttctggccgctgttcccacgcacgaggcggcccggaaggcgcgctggttagaggtgagggctgcaggaat

SEQ ID NO: 18329 - DNA, 3347 bp, Oryza sativa
cgtcggacatgcccggggtccccagggaggtgatcgagcaccgtcttgccgtacgaccagatgcgtgacccgtccggcaaaaagtgtggcgtcaagccccggagcgacatgccttcatcagggaggaagtggcacggctcctggaggctgatttcatccgcaaggtgatccatccggagtggctggcgaacccggtggtcgtcctgaaggccaacggcaagctgcggatgtgcatcgactacacagacctcaacaaggcatgccctaaagatcccttccctctaccacacatagatcagatagtcgactccactgcggggtgcgaccttttgtgttttctagatgcatactctgggtaccaccagattcgcatggctagggaagatgaggaaaaaactgccttcattactcctgtgggcaccttttgttatacaactatgccttttgggttgaaaaatgcatgccctacttttcagcgcatgactcgtattactttgagtaatcagatagggcgcaatgtagaggcgtatgttgatgacctggtggtaaagatgcgccaccaggacacgttgctgcaggacctggccgaaactttcaatagtctcaggtccacacgcgtaaggctgaaccccgataagtgtgtgttcggtgtgccggcgggcaaacttctcggttttctagtctcttcccgaggcgtagaagcaaatcccgagaaaatgcgcgcgatagagaggatgcgccccccagcaagcttagtgatgtgtagtgcgtcactggatgcatggccgccctgagtcgattcatatcaaggctgggtgagtgggcgctgcacctattcaagctcctcaagcgctctgggccgtttgtatggacggaggaagctgagcaagctctcaatgagctgaaagcttacctcacttccccctatcttggtggccccggggccagaggaaccattactactctacttggccgcgaccccctatgtggtgagtgccgccctagtagttgagcgcgaggaaagcgaacgagaggcccctttggctcgcgatggcccctcgtcccccgaaggcctagtgcccaaagcacccagcccccgggaggaccccgaggcccccgagggaagaggggaggctttggtaagtggccctgaggcctacgatcccgaagtgacccgggatccccccggggctcccgagcaggggcgccccgggtcatctgcccctgacaacacgaaccggccctgccgaaaggtgcagcggcccgtccacttcgagatgcgaaaacccggtacccataggcccagaaaatgctttatgctgttttaatggcctcaaggaagttgcgccactatttccaggcgcatcgggtttccgtagtgatatcgtatcctctcggccaaattttgcacaaccgagagggcactggacgggttgtaaaatgggccatcgagctagctgagttcgatctgtacttcgaaccacggcacgcgatcaaaagtcaagtcctggctgacttcatcgtggagtggacccagtggatgaacctgtttcgtccaatgtccctctcccccgggagaggaagaggacccaaacgctgacattcgtggcgggcactggattatgcattttgacggctccctcaaccttcaaggtgcaggtgccggactcacgctgacgtcgccaagcggagacgtcctcaaatacgtcgtctgattcaatttccgagccacgaacaatatggcagaatatgaaggactcctcgcgggattgagggcggcagccggaatgggcatccaccgtctcctggtcctaggtgactcccagctggtcgtaaatcaagtatccaaagagtaccagtgcaccgacccacaaatggatgcatatgtccgcgaagtgcggcgcatggaacgccacttcgacggactcaagctccggcacgtgccccaacgcgacaacacagtcgctgacgagttgtcgcgtgttgcgtcggcacgagccccactccccctggggactttcgaggaaagactcgcgcaaccatcggcgcgaccgaaccccttgagggaccccaacgacacgccttccgtcccgacccccggcgacccgcacccctcagggcccgagggggtcgaccccgacccccctcgttaggtcgtgtggatgaccgacatccgggcatatctcgacggcaatactctccctgagcatcgcgcagaagttgagaagttcgcgcgcatctctaagtggtacgtcctcgtagaagggaccctctaccggcgtgccgccaacgggatactcttgaagtgtatttctcgggagcaggcatcgagctcatagccgacacccattagggtgagtgcggggcccattcggcctcacgatctttggtcggaaaagccttccagcaaggcttttattggccaactgcattacaagatgcccaggaatgggtccggcggtgcaagacatgccagttccatgccaaacagacccaccagccgacccaagccttgcaggtcatcccactctcttggccttttgcggtctgggggctagacatccttggatcattcaaggcggctcgaggcgggtatcagcacttgtacgtcgccatcgacaagttcaccaagtggcccgaagcttacccggtcgtcaaaatcgacaagcattctgccctcaagttcatcaggggcatcacgtctcgattcggagtgcccaaccgcatcattacagacaacggcacctagttcaccagtgagctgtttgccgattactgcgacgacatgggcatcaaattgtgctttgcctcgcccgcccaccctaagagtaacggccaagtcgagcgagccaacgccaaaatcctcaaaggcctcaagaccaagacgtacaacgtcctaaagaagcacggggattcatggctcgaggagttgcccgccgtgttgtgggcaaatcagactactccaagccacgccacaggggaaacgtgtcgcgtcccaaaacgactctaaaatacatcctcaaaattatgcatagaataagtaaaatccatgtgaaagcctccaacaattaaaatgtgcaaagttaaaagtcaaataaggcttggaggatttttgtatatttcctaaaagcctaaaatgcgtaaataaattttagtggaattttcagagcacaaataataattattaagaaataaacaaagttagaaaggttttataaaaagaaaaaaaaaccctaaaaagtcctttttcccccttcccctcttgggccggctcggcccacctccctccctctctctcctctcccccgtggcccaatcggcctcctccccgcgcgcgtgccgctgac

SEQ ID NO: 18330 - DNA, 12350 bp, Oryza sativa
gaatgtgatccttgggaatgaaattggttggctcaattccaaggagtagtggattgtgcgagacgcactgtcactctgtaccgagggccggaacaaccagttgttttctttgcacccccaacctctgtcagtagttccgaacttcatcagataggactgtcagaaatccccatcgtcagagagttcggagacgtgtttccggaagaactacccggtatgccgcccaaacgagagattgagttccggatagatcttgctccaggaaccactcctctgtacaagcgaccctaccgtatggcagcaaatgaactggccgaagtcaagaaacagttggaagagttgaaagaaaaggggtatatacgtccgagtacttccccctggggtgctcctgtgatttttgtggagaagaaagacaagacgaagaggatgtgcgttgactacagagctctcaatgaagtcaccatcaaaaacaagtaccctcttccccggatcgatgatctgttcgatcagcttaaaggtgccactgtattctccaagatcgatcttcgttccggatatcaccaattacgtattcgtgatgaagatattccgaagaccgcattcaccacgcgatatggactgtatgaattcacagtgatgtcgttcggtttaaccaatgcacctgcctttttcatgaacttaatgaacaaagtgttcatggaatacttggataagtttgttgtggttttcattgatgacattctgatatactcacaatccgaggaagaccatcagcaccatctccgtctggtattgggaaagttgcgggaacatcaattgtatgccaaacttagcaagtgtgagttctggttgtccgaagtcaaattcttagggcatgtgatatctgctaaaggagttgctgtggaccccgaaaacagtgaccgccgtcactgattggaagcaacccaagacagtcactcaagtccgcagtttcttaggtttggcaggatactaccggaggttcatcgaggacttctccaaaatcgctcgacccatgacacagttgttgaagaaagaagagaaatttgtgtggagcccgcaatgcgagaaggtgttcaaaactctcaaagaaaagctggttgcctcgccagtgttaatcttgccggatactcgcaaggatttcatggtgtattgtgacgcttcgcgccaaggattggggtgcgtgctcaagcaggatggtcatgtggtggcctatgcctcacgccagctacggcctcatgaaggcaactaccctacccatgatttggagttagctgcggtggttcatgctctaaaaatctggcggcactatctcattgggaatcgctgtgaaatatatactgatcataagagtttgaaatacatcttcactcagtcggacctgaatcttcggcaaaggagatggttagaactcatcaaggattatgatgtgggaattcactatcatcctggtaaggccaacatggtcgccgacgctctaagtcgaaaaagccattgcaacactcttaacgtccgtggcattccacccgaacttagtcaacagatggaagccctgaacctaagcatagttggtcgcggattcttggctgcgttggaagccaagcctaccttgctcgatcaaatctgcgaggctcagaagaacgatccggacatgcatggactcctcaagaatatgaaacagggtaaagccgctggtttcacagaggatgaacacggaaccctatggaacggaaatcgagtatgcgttccagataacagagaacttaaacagctgatacttcaggaagcccacgaaagtccttattccatccaccctggcagtacgaagatgtacttagacttgatggagaaatactggtgggttagtatgaagcgggaaattgcagagttcgtggccctttgtgatgtgtgccagcgtgtcaaggcagagcaccaacgaccggccggacttctccaacctctccaagtacctgaatggaaatgggatgaaattgggatggatttcatcaccggacttccaaagactcaaggtggatatgattctatatgggtagtggtggatcgattaaccaaggtagctcgattcattcctgtgaagaccagctatggagggaacaaactagccgagctctacttcgctaggatcgtgagtctccatggcgttcccaagaaaatcgtatctgataggggaagccaattcacctctcacttttggaagaagctccaagaagagctgggtacccgattaaacttcagcaccgcataccacccgcagactgatgggcagaccgagcgtctaaatcagatcctagaagatatgcttcgcgcatgtgtcctggatttcgggaagacctgggataagagtctcccctatgccgagttctcctacaataacagctatcaagccagcatacaaatggcaccttatgaagcgttgtatgggcgcaaatgccggacaccgctcttgtgggatcaagttggggaaagccaagtgttcgggactgatatcctgagagaagctgaagctaaagtcagaaccattcgggataatctaaaggtggcacagtcccggcagaaaagttatgcagataaccgtcgccgtaacctggaattcgcagtggacgattttgtgtatcttcgggtcacgccattgcggggtgtacacaggtttcagacaaaagggaagctcgcacctcggtatgtgggtcctttccgtatcgttgcccgacacggagaagtcgcttaccaattggagctgcccgcctccttgggcaacgtgcatgatgtgttccatgtgtcgcaactcaagaaatgctttcgagtgccatccgagcaggccgactcagagcaaattgaagttcgcgaagacttgacctacgtggagaggccagtgaaaatcctggacaccatggagcgcaggaccaggaaccggataatccgtttttgcaaggtccagtggagcaaccacgccgaagaagaagctacctgggagcgtgaagacgagctgaaggcagcccatcctgatctcttcgccagttcttccgaatctcggggttgagattccgtttaagggggggtaggtttgtcgcgtcccaaaacgactctaaaatacatcatcaaaattatgcatagaataagtaaaatccatgtgaaagcctccaacaattaaaatgtgcaaagttaaaagtcaaataaggcttggaggatttttgtatatttcctaaaagcctaaaatgcgtaaataaattttagtggaattttcagagcacaaataataattattaagaaataaacaaagttagaaaggttttataaaaagaaaaaaaaaccctaaaaagtcctttttcccccttcccctcttgggccggctcggcccacctccctccctctctctcctctcccccgtggcccaatcggcctcctccccgcgcgcgtgccgctgacggacgggcccgcccgccaccctcgctgacgggtggggcccacccgtcatcccctacctcccgccgctcccgccgcctcgcccgtgccctagcgccgccgccgccgcgaatcccgccgcctcccgccgtccccgcgcgcaataaagagggggaaatcattccccgtgattccctctccctttccccccatttttccctctctctctctcgcgttcaaacgggcggatttgcccccgcaaatctcgccggcgccattgatggagcccgagagcgccgcgccggtttccttctcccccggccgccctctctcactcccaacactatataaacgctccccgtgcctccctccaccgtttccgccactcgccgctctctctctccgccggaatcgagctcgcgccatcgctctctctctccgccgtcaccgccgagctccggtccgccgccgtcgtcgcctcggaccttctcccgcctcggcgtcgcctccttcggctccgccgcgtcctcgccgacctcgtccacccctccgtttcgcccgccgaccgccggaacgccgccgtccccgtcgacccgtgccgcgccgccgccttcttctgctccggtcgccgttcccgtcgtcgtcgtcgacccggggtgagccgtggaccgcccatttcgtttcccccttccctcccctctctcggccgccgctccgccgtgcctatggccgccgccggcgaccataggggcgcgggcgcgtcgcctcccgtcggctgtgccggcgaggccgccttcgggcgcgccccgcggctgccatgtggggcccggccgtcagccgcctgcgccctcgggtgcggctgacgcgtgggacccacggcgccggccggcgtaagccgcgtgctcccggtccaccgtggaccgagaggctgccgcgtgggccccactcccatggacccggtccgtgcgctcctctctcccggctgacgcaataaatatgtttttaaattaaaatttaaatgaagaaattcgtaaatatccatttaaagagcatataaacttcaaatggccataacttggccatttaaactcggaattggaccgttaaagtctctaatttttccttaagaagccaagaacccatttttgtgctttgtttctgcttgttatatggagtttagtagagtaaaagccgtttcttttccgttggtcgtgtagacgctgcagcttcggaagatccgctcttcgtggaggttgaagccgacgtttgggaaagcgagcaaggcaagtcacatcatctttgaacatattgaatcccagtttgtaaaattatgttgatttaacttattgcattatcgctttatttaaattcccgcgttatcaccgttttatttagccatgcctatttacctttgttatgaccttattattattgttattgttattatttccttgttcaccctagaataaacaaaaccccaactagtggacactctactcatggtatcactagtatgattttaggtagatgcttcgcttttaattaggtaacattaggtgggtttttttcaactctagactttgggaatattcatatcacctggacaccatggaatggtttggttattgtggaattggcttcacaccgctccttctattcaaaatccccaaaaatggttttaggctgggctcggggtgcatggttttgatagtagcacctcggccatataaggaccggtcttcgggcctctgttgcaaagcactaccgtacttccacatgtctagtgggtaaggcttagtttgtggctcagtctagttataaacaaaagttcacggatggagatggaagaagtcgggggtcgatggacatctctaggacaaatgaaggctacatgagctgctgcccggtagtcgagatgtcatggcacagggccggtgtcctgctgctaggggctcagtcctgcctgcctgtcccgggtgttccggccgtaggtgggattgggtcggtactcttgtctatggctaggatgggttggaaactatgtcacgtctttcgtctgtataccgtggtggtatgtggcacgtggttacacgtgaggaagatgtgtcttgtgggtaaagatgtacacctctgatcagagtataatctattcgaatagccgcgccctcggttatgggcaagccgagcaatgtacccaagttagtgttttaattcttaaaacctgcttaacaactaaaatgtggaatggttggcctgggttggcttgggacgagctgggacccagggtcgggttgccagttcggtctgaatcatcgtaggccttgggttaaggcaggttcgtgtaggttcacggccttgataaataatattgtatagtactagaatcgtgtttgcaaaatagccctgagcaactaatgtctttaaatgctgtttactgcaaccctaaccctttatagtataactcctttgtactcccttgcatttattctgcacttgtgggtgtgtcttgttgagtacggtggttgtactcagtcttgctcaatttttcccaaacccagaagaggagttcctggaggatgaaggctttggtgtctagctcgtgcctgccgtcaagtgcctgtggtcgttgccctagtcttccgctgtttctcgtttgtctttgtgtgtgctgggccttcgctgcccatgtaataaattaactatttacgcttccgcttgttaaactctgaattgtatcaacttttggtgtaccttgcctcctgggacaaggattaatgcacgcacgtaaggaacgcccgttgggttatttccggtcgtgacaaaacgccatttttcctgttgtacggcgccgaagcggtcctaccctccgagctttccctagggtcgcctcgcgtcgcgctgtacaatgaggccaaccaggatgaccttcaccgcgacgatctcgattatctcaaagaacggagtaggcgtgcggccctgcgtgccgcgcgttaccagcaaagcctacgacgctaccatcagcgccacgtccgggcccgatcactacaagttggcgaccttgtcctacgccgcgtccaatcgcgcctggggctgagcaagctctcgccaatgtgggaatggccatacaaagtgatcggcgtgccccggccaggctccgttcggttaaccacggaggacggcacagagttgcctaacccttggaatatcgaacacctccgtcgtttctatccatagcatcgagattttttgctttccaggagctcgggccaacccccgcacaaccccttggtttgtgcgggcttggccgggggctaccactgtgtatccttttttccttttgcaagaagtgaatttttctactttttgtgaagaccgtctattctcttcctctggcttgacctggtttaagggataatccgcgtttactctgaaccctaagtgccgtagggcggcctgaaaacctccgaaagggagcacgaacgcgggccgcgccccgggttgcgccgaacctcgggggatcggaagggcctacacacggccgtccctgacccccggtcgtcgcagcctcggtctggctagtcccaatgggcggctccctcggggcgacggtcttgcctatcaccacttaggtaccatggaccgagcgcggatttaccttctcgctagaacaagcccgagggggggaggatggggtcaaaacggcattttgatcacaggcagattaattatacccgttttgctctggttctttcttctctctatgtcacagacatccaatggaaaaagcaaatgagtaaaaggggctaaggaagtttcagttgcagaacaagataggacggcacgatggcctaaatacaagaagtgcccgccacgggcacacaacaaaagggaattgaaagcgcgaatggtcacggggtgcccaggcccccgaggccggcgccgctgacgacgtcgtcccagtcttcgtcgcccacgttgtcgtcgtcacccccacttccgctctcctcatccgaggcgagcccaaaggtgaactggggggccaaccgggcagcctcgacttcgacctcgggctcaggaccgcccccaacctcgaccttgacctcggactcgggaccgcccccagccttgacttcgacctcgggctcaggatcacctccggcctcggctcccgagctgcgacctccctcaccccccgatcctgggtggcgttccgcatggaccctagtctcacagccgcccccgggaggaacgtcgccgctaccgttgcccgcagcaagtcgagtcccggctgagggtcgctcgggaccaggcccggtatgtggcctgtgggtcccactgcgaggctgcgaagaccccgcggccttggattggccgggcccggaccgttccgatcgttcggatttcgtcccccacgaaggctccgaccctgagaccccctgagaaggaatctcgctacaagagaacccagatcgcgttaacaatgaaaaagaaaaggagggaacaagaggccgagctgggtaagagcaccgaagtaggtgccagcaatcgtacctacggggagggcggttgaaagtccacttcggggtctcgatgaagctccctcggctcggctccgtttgccctatctttcggacccgtttcttcttccgtccgacctcgggcccggcagggcgcttgtggcccgctggcggatgatctgccgcgtgctcggtgccccctccacgcgggggagagggcggccgggattcgggcaccttccgcttcccctttgggtcgccgaccaagtcgtctccaggtccgcggctcgagtcgggcgcccttgagccaccaccgcctggaccgcttgtccggctcccacccgcagtcgcgccgccgccacccgcgccaacggcgctaccgctggcgccgcctcggctggaccggctcctaccggcgccaacaactgacatcacggccaggatgctctcccggtcgcggtcgcagtagagggggaggatcccatctgggattagcgtttgcttggcggagtccaggcccagcaccagcaccatctttgcgtcctcctccccccagtcccagcgctcgcccacatgcgtgcgcatggggtcgttgggaccagtgtattcccacgcgccacgggatcgttcctggagaggtgcgatgcggcggcggatgtaatcgccaaagaccattgcccccgtgaggcccaggcttcgcagacccctgaggcgatcccacaccgcgtcgtattcctcgcccagctccgaaaccgctagccatgcggcggatctttcaggaggaccagcgggaacccgaagtcacggatggtccggcaacgcggtgtagaaccagtccttcttccagtcctcccatttcttgcggagatgactctcgatgtactgccccgccgtgcctggccggggctggaagtagcatccccccaccaccgcaccttgcagcagctgcgggatgaagaaggcttggaacagccgcatcgtcggccgcaccccgatgaacatctcgcacagatgcacaaagatggccagcgtcatcacggcattgggtgcgagatgcaaggcatggatttcgtagaaatccagaacctcatggaaaaatctggagaacgacggaattaagcccgccatggcgaaggacaagaggtgcacggaccgctccggatatcgcggccgcggccgcgactccaccgccctcacgacggcgccatccggcatgatcttgcgggggaggctaaggtgcctgtctgccgtaatgcgggaaaaagggagcactgtgtcgccagcgtcttgagccatggtggccggcggagcagtggcgaagagcgtggcgcgcggaacagtgtgaagtggcgagaatgttagggttcgaggagcgaaaggacgagcgggcggttggcgaaaggaaggaggcaaagtccctgcctccgtcccccttttatccttgcctcatccgcgctcacctcctcgtttcacgccctcataattgcccccacgatcctcgcgcccgcagttgtctcttcgtttcccacgcccactcatcacgtgacccgttgtatccgcgtcccgcctttagtgcgcctgtcagtggcacactcgaggtggagtgcgcaacggctatgagcgcaagctgagcgaacagtcaccacaaccgccgcaggagtagcgggcgagggaatcgaggcgtggtctgaccgaccccccggttatcgcgcctcaagcatcctcatcattagcgtggtcggtggcggtcaaaccgctgctatggttggcacgccaacctggccgctcggcaatattcctttcgattccccgccgggcccacaaccccagcttgagaagtcgtgaggcaccatgtcagactgatctcaggaagccaatgtctgatatggtgccgggggcttctgtcagagatatgggcccgggggtatgtgaagtaaaggggagtcaccttcccgtccagccacgtggcactgcaagctggccccactcacgcacctcgcgggtcgcgaaagcgccaggggggggcctcggggtgcggcatccccccctcgggctctcccactgcttcgccccgaggccctcgcccagctgccgcgtggtggggggagagagcgagagggggacccaggctggacaaccataaatacgcggcgtcccaactgtccctcactgcgtgtaatgcggtgagggcagatgtgcaacgcgcctaactgacccctatcaatcggatgtgaccagtctgtgaccggcctgttgccggtcacgtccgattgaacgggcggccgtgctcccacgtcgcctctgtatccggcggagtgggggtaggtgtgacctgtcacatcggagcatcactcgaagaagggttgccacaagtgttcactcatttatgagcaaatgacagggatgtctcccgtgtcaggcggggaacgacgccaggtcccactcaaggaccgattgctgcttagcttctgggagaaggcatggatcgagacccagtcaaagtggagtggggtccccctcccatggggggggagtaggtagaggcggcgcatgtggtatccccttgagctataaaaggaggaccttgcccaccgagacaaggggacgactcttagaaaacctgaactctaggagaaggaaggcgatagcactctccggagtagaggaacccttgtaaaactcatacataatcccaaacacaggagtagggtgttacgctccatagcggtccgaacctgtataatccgattgtgcgcaagctagccggcagtttcaggggcgaacgcgtgattcccaagaggcgagcttctgcccccggccgaactcacgaaaggggggtctcacgactccccgctatcgagggtcttccctcaaaagtggcggtgatgggaggttttactgaatccaagggtcgtcagaagcacacgtcctccaggccttgaccttggagaggcctaatttggcaccctctacttgctagcgagccacagaggttactgggataagaaaggctaaggagcgcggggaggagagggccgtggacagtgctagggagaaggtgcagtggtggcaattgggaggaagaggcagcggtgatggtggtagtgggggaggaggtggtcatgggcgaaggcaggggggcgacatgtgggaagaggtgacgagaagcataggaggtcgcagtatagtgcatgagagaaatggtggagtcaaaatgaaagggagcttttcatggaaatggaaagttttcacggcttgtgtggatcggacgattgttgattttttttactttcattattgtaacttgaattttttactgtttacatctttatgtctcattatatgcaatttctaaaccaacatgtaatagatgcatccccgcaaaaaaaaaacatgtaatagatgcaaggtgaaaaaaaatcaccaactgcaaccatgaatgagagcttatattacacaacgtgtagtttgaactggcccaggaggaaagacagggagcaaagagatggtattagccttaaacactgcaaggaaactctgttcgttcctaatgaagctatttctaccactctagtctctagcctatttcttcaccaaccccattatctcaatcaatcaaaaccattctccatttaaattatttacctactttctcttctcaaccaatcacaacttcactctaatcttttttacccactttttaatacccatacccagtttcaaaagtacttatattatattatattatattttagatctagtatgaagagaataactagtcttagcccaagcatccaatgatatctaataaaatattcaccttggtgatccaactgttgaaagcatgaaagaaacaaagtgggaaaccgagaaaaagaaaagagaaaggaggacggcataaatagcattttatcactactacaaaatcgatttgcgcaggcggttgagctgcttgcacgcattcaggtgtctgcgaaaatcacatttttctatgcggccaacgcaaccacatgtgaaaatctcatttttcgcatgtggtcacctataccgaccacatggaaaaataatttcggcaaaacaaaaattccaaaacgaaaaattggtcgaaaccttaactccccaaggcgtcgtcgtcgttgttgacggttgttttagaccgatttcgaccgtcaatataactggaataaaggagaactagctatacttgcaatgcatatttgttttagaataatctatctctacttgtacttggattttatttgtttgcagggattgccaacataaatgaaggagaatcgacagaaaacaaccgaacgatcactcaaaatccgtcgagaggaaaacttatggttggaagggctcacaaatccaatgaaataacatcaattgggccca

SEQ ID NO: 18331 - DNA, 1558 bp, Oryza sativa
ttatgttaacttcgccacactcgtttacaaaactagctagctaggtagactatatgtgtgacaattttagtaccagtcatgatgtattctggtgcggcatagccctgtgtgcccatcactctagtggagacatgtgtctcgtcttcttgaggcccatctttggccagtccgaaatccgaaagttttgcttcgtagtcctaccaataattaaacaatgtcagtcacaaaatgtcatatgacaacagctaccaggatgggagaagctctccaatatttcctttccatttgataaattgcagcgttttaatgtgtgctccactcatttataattcatatatacagataaagacaatttgttactagcttaatacacatcctctgctacggatatatattgcttagaacaaattagttataaggttttctttagaacaatgcatccttattggtatttttgcatgataaacttgtttttatggatgaaataagatagataaaaacaatatatataagtactattttgaaatattaaaaggatgttggataaaaaccaatgtataaataagctcatatagatagatatgtataccgagttgagtaggatgttggaggtcttgaagtcgcgatagatgacgggcttggcagcttcatggaggaaggccaaacctctggccgctccaatggcgatcttcaagcgtgttgaccacggcagcgacgcagagtactctgcagtttcaatttgcacaatcgatcagttcatgcattatttcatctacaactaattatgacccatcgacaaatcagatgatgaaagcaaaaggcggcaatgcaaattgttaggagcagccaattaagtagtaagtatgtgcatctccactgaaattaattcaatgcaagctttgaatattttttgttgtcttgataccaacattaaagaagattaattgctagctaccagaaataactgagagcatgaattgtcttccattctatcttgtgaagttgacaacattgattaccacattagaatgatatatataggcttccatggtaatgcagatgatgcactatttcttttattatgtagaaaatacacaagcacacaaaagcccctatatgaatgcagctcttaacacatggtcaagagataaagaccaagagtaaattcgtttatactattattgttatcgaaatttaaactctggtagatggagttatacacccataaagccatcactccacaccagcattttgctttccctatctgcactttttttatcttttatgatgagattaacattttgtttgttgtcacatgcatgattggctacttttgacttgtgtggcctatataagtgccttatccaaattacatgacttgtaatcattgtggcctacttggattctccaatttgataaactatcaaagcaattagaaatttatgcttatttttccacgcttcaattcgatccctttatcaactaacaatgggaatgtgtgttgtcactttaatttgagctgatgaccaaaacgaattttaggccacacaccaaatta

SEQ ID NO: 18332 - DNA, 6238 bp, Oryza sativa
ggaatacttctaagcacaatgtaaacgggaatggtcaaattaacaatacttcaaacagaaatgattacttcaacagaaattcgccagtacatataaatttctaattggaaatggaaatggccaaattaacacaatctaaaacttggatgacttgtaatcatttgcttacttcaactatatgtactggcaaatgaagagctaattacctacggtttgattatgatctggtataccttgggagttcatccaatatgtatatacacaaatatttttatgctaaagtagaaaaagtttgattcatcattcctgtaaaacaaatctacaatttcttttgtactgtgttgtatgctctctcatactaatttttcgtagttccattaaccagttcatatttatcagaacaataaaaaatatttaaaagaataatatcatgccctctcattagagatgtggttgggtagttaatagagagggatgttgaatgtggctatttataagtgtgccatcattttgttataagtcgtaacgtttattagtgataacaaatgatttggagggataacttttatatatgttcttagcgacttaaaatcaatactgaaaaataaaataggataaaaaatagtaaatcaattctaaaattaagttttaaaatttaaacttgtgacgtggttgataataagctgaagatgaaataatagaatgcttaattttggtttaaacaattaaatgcctaaaagatgtcttgaattaaaatttctttgtttatttctgggattttggttgaaagaaaaaaaggaagcataagatggaatttgccgtacttttgaagaggtgcttctccaagctgcccctagccatgaactcgtagacgagaagtctgtgctcatcctcgtagcagtatccgatcagcttgacgaggtgatgatgtctcaattgcccaagaaatatgacttcagcctgcccaaattttacataatataatccattaattagttcaacacatgcccatattccatcagtataattaagttatgtcagaatttgaccaaaacctgtaaccactcttaaaaatactaattgtttgaccaaacaaatagcatattgcagtatatatagttagttaggtggctgatcgacattatccttgcctccgggtactaaaggattttaataggagattaagtatgaactaatgatcatgagaggaagacgtggcgactttctgaagggatcacagctaactaagtagctggcatgcactaataattattcaatttgctttggagtaggatttaccacagcattgacaggattcttatgtgtgatccgatcttgtttgttgtcaaatgaagtactaaaatggacgttgcaactgtttgtgtgtgtgctcaatttgtactgaactgatcgaaatcatcgtctataaaagttcaagacgaattaattctattatgtgttttcttaaaagggaaccttgttaaaaatatacaaacgacttctttaaagacaaaataaaatcattgcactaaatcatatatattccctcccatgagtgtgaagtttcataacgtacgtacgtacgtagttaacacatttaaactttcgaccaacaacttatatttgaatattttggttcaacttaattttaagaaatggtatatagctagatttatcttcaaattaaattagtttcatgatattataactttgctaaacaaatttactagttatcaataatcaaactagtgtattcgacagtgtcgctatccaaaatatcattattttctcgtatttcttttttctgttttgactggagccagtaaatgcatgctagataaactggccttcaataatatgaaaagagattgactactgcttaatttggacttttgcagtttggccttttcttttcaattaatgcagtttcccgaagttaaattaaaatatgcttaaatatgaagtcagggttaatagcacagtcaacatcatggcccttgaaatccggtttacgaaagaaacggaagtgtcatactgtacggtatgcacgggcttaacacagcttgataattagtcccaactaattatcacaaacgttacccctattaatttcggtgaaacattaacgactaactatagtaatggggctatatatgctaactcaaatactgcgtgttgattagtaaactatcgttaccaagtcatgcgttcaaaggcaaattaaacgacatgtgtagagtggacaatttccaaattaagaaattttgtagaaaaaggtgcaattcccacaaaattgtccttccaaccatagaattccgtattgactttgcacacaatatggaaatgatatgaaaatatttacctaacaatcagtcacagataaaatatacatactaatcgattgaatttcattttgttgtgcgtcagccattatctcactctttagtcattctttgctctcaccgtcaactaaaatttgctttaaaattagtgcaaatagaagcacgtcctcaagaacaacacccactgatcagtaattagggagttctaatcttagttctagggacaattaactacaatactatgactactaattaattaattacttgacttgaaatcgtactgataatctcagtgatcttaattagtactatacatatgatgagatagtctcagtgagacttgcttaatttacttcatttatagtaacaaaagacttgatcattactttgatgagataatctctctcagtgaaactttatacttcatttctcacaagaagacttaattaattgcattgataagataatctcagtgaggctttgattagtaggtcagtccccacctaagacagtagatatagttttcataagctccacatcattaagaaactagtactagacactactcttttaatgtaaacatcacttttccatacttaaatttaatgctacttatctcacatgatgtcttggtttttttctcttttctcatttattcacttgttacattattttttattttaggtggcagcttatttaatattatggataccatccatcattggattgagaatggccgtatagtaatcaatcaatctaactaattcgccgttaattaatcaattaatcaccgggtaattaataactggatgagaaatgagattaattagtgagagaggaggagttaaactaattaccagccattccttgtggccctgggagccctcgaggtcgagcagcttgacggcgacggcctgcgcgcgcacgccgggcttgagccgctcgtcgacgtaccccttgtacaccggcccgaaccccccctcgcccacgaagttgctcaccgagaagtcccgcgtcgccctcctcagctcctccaccgtgaacgcctccaccccgctccccgccagcgactgcgacaggtcctccggcgacggcatcaccgccgccgccaccccgtcgttgctgttgcacgacgacggccgcgccggcagcggcgtccccgggttcttggccgccgccgagccgccgtcgctgtgggaggaggtgaagcagccgagcccgaacagcgagctccacgacggcgacgacgacgtcgtcgtcttcttccccatgattgccaaggtgtggaatggttgggaggaggatcggggggagttaatttataggaagcacgtcgcggtgttgggaattgggggatgatgatgatgatatatattgagggtggtgtgtttaatttgtgggtggggtgggttttgtttgtaggagtggttgttgtcatggtctatcgagggaggtttggttaagtttggtttggttgagaagggtagactagtatagtacctagctagggaggtaaggtggccttttgactcatggaagatcgatacctgggcttagttttccgatgccgagatagtgttttatttattttattagatacttaaaaaaaatacccgtgcgttgcaacaggtaaaaatatttttggatcgtatacattatactatttgctttagaccaaaagctcatttattcgttccatttcagtcctaacccagcccgctacctctctttgatctagcccacaggtgaagctgtagacccagctagcatagcccacaactgtcttcaacaatggataaaaatatttttggataactatacattatactccttggtttttggtcaaaacctcatttattccttccttttctaacccagcccagtgccttatctctttgcttggcctacctttctttgacatagcccacaatgagagctataggctcaactcgcatagctagctgactgccgtcttcaatcttcaatccccgtaagagtgtcttttctattttttttgtcgttcttccttttttttctcgtcggtcttttcactctctctttttttttcgccgtcacgttcgatctgcctctaatgtgttccgtccttattgcaaaaatcaattccccactactactccatcatttttccccatgatttttcttttcaattccgctttaatttatgggaactaatctctatttagaagtcaccgtttatatcccgagttttatggagttgcttaaattttgataaaaaggaaacagtagatcaagtgtatcaaaaaccctcaaccaattttggaggatcgaacagaaaaactcatttattccttccttttcaatcccagcctagtacgtcatctctgtgcttagcctacctctctttgacatagcgcacaatgggagctataggctcaactcgtatagctagctgactgccgtcttcaaaccccggaagagtgtattttcttttttttcgccattttttcttttttttcttcggtcttttttctctccgttttttggctgtcacgttcgatctgcctcctaatgtgttccctccttcaattgattgcaaaaatagattcctcactactactccatgatttttcccatgttttttttcctttcaattctgctttaatttataggatctaatctctacttaaaagtcaccgtttatatcgagctttatggattcgcttagattttgataaaaaaaaacagatacaatagatcaagacagaatggagaaaaaggaaaaaacacccctaaaaaaataaaaaacagacgaaaaaaaagaaaagaaaacggaaaaggagaaaagaaaggtgggtggaaaaaggaaaaaaaaagtggaggaacggtaaaaaggaaaaaaaaaagggcgaaaataaccttaaaaaagtgatggacaaaaaataccggaatccttatgtattttttagttaggtatatagatattttaaaaaactgctacaagttttttagtgaaaaacttctagatataattatagtataattgaagccactgtatctatactgtaattgcattgtaactatactacaatataagttatataaaacttgtatttaactataaaacttgtatttaactatggtttggctgattagcactaggatcttacgcgtgacatgtgtaaaaatttctttctatagcaatttttttctcttcatgctcaaatcccaaggcaatccgatgattgcaaatctgaaagttttggggggcaaaacacttgcagaagctttccagcaatttcatttatttactctcggcctctatctcaaaatataactattttactttatccgtctcaatatctatacatacaatcttaaaagactataccctctgtaattttacaacatacttctccatgattcccaaattgtacacccaatatacttctccatgacttcctaattttacgaggttctccggtatatcaagtatcatccatctataacgaatgacgtctctaaagagtgaatgagttttctcttttagataaaatgaagtttcctaaattgttcgccattattgtaacacatgggcactctgctagtataaatatatgtctagtttttcatggagttaaggagagatgtaaaaaaaaactagattgccttaatttcgtttattgtctcggttgggagctagggtgaggtggtattttgactcatggaggatcgatacctggacttagtttgcgggttgtggagatgtgttttgtttactctcacatatgtctcaaaatataactactttactctcctcatctcataatataactaatttactccttccatatcagaatgtaaagtgttttgcttttgtcttaagtcaaacttttttttcgaaagtttgacaaagt

SEQ ID NO: 18333 - DNA, 3500 bp, Oryza sativa
ggaagttctagcttctttgtaatcagctgcaatccaggcagactgagcttgttcgctaccgtgtgaaccgggttagatgccttctgagtggcaacggacaccataacatttgctccgaaaaacctctccgagaagaatacccagaaaacgtcgtacacaaacaggcagacgagcagcaacgcgcagatctttatgttgggaagcctcacatggctgacgaacgctatgcatatggatatccccagcaggttattcaacaaccagtgccccgataccaaccaggcaaccaccgtgccgacgcagatcgcaaccagcaacccctgcaaccgggtaaacggcttcgagcagcacctcgacacgaacgggtccccaacgccgaggcgcgacctgacgcagtttacgtacggcgacaggcagaagaagagcgccatcgccgacgccacggcggtgaaggcggtgaccaggtgcgacaccgacgagaacaggtagaacatcagcagcaggctgcaggagctcgcgagcgggatcatgagcgcctgcgaccgggcgagcgtgatggaggcctcggagaagtcgaggttcctctccatctccctgccatggtccagcgcgcgcgacgccgacgcgtaggcgacggagacggcggtcaagatgagggcaagcgacgctggctcgagcaagtagctcagcttccacagcgattccatgtgatgtttttagcagtctctataacatggcacaatttttttttctgggtgaacgaacgaactgctattagtatcaaggtttaaggtaaattgagagaacatagcttctagatctagaactgaagctagggtttacgcccgtgaaattcgaaggatagagagaggatgggtggatgctctcaccagtatgcgatgcggcggaagaagcgggagaacggcgccgggggcggcggctgcggccctcccctggtcgctcgcggccgcggagggatggggatcggcgcaggcggccgaggggaaagggaagtatcctccagccgcacgacgctttcctctgccttgtttggcacaatttacgtagggatgcccgggagtatgagatatttggtatctttcctaactttttggtattgatttttatttcttttttcaagtaattttttgtattatactcagaaaaaaaaatgtccgtgtgttattgggagttgggaaataacttgaaacattagtattgctgtacagtataattaaaaaaagttaatcaaaatcttttcttagctttgagcaaaagctcattatttttttttccttttcagctctaacactgtcagttctctcctacctttctccactcgacctacctctcttttcttcggcctagcccacaagtggagccgtgggcccagctagcacagtcggctgcccacgcgcttctgtagcgtcttcaacctctggaagataatcccatgtgcctgcacgatgctggagccagttctccctcatcaaatccggcaagtctttctcaatcacctaaaattgattgaggacttttgatccactcgatctcctctttctggtttccccaaaatcggagcgaatccacaaaactcagataaaaagggccaggagaagctcgtcgaccggccatcattggtgaccgttcaacagacattaaatttggcgaattaaagccgaatttaaaggagaaatcatggggaaaatgacgagggaggataaggaaatcaatttttgcaatcaattggaggaggaaacgcatgcgtaggtagatcgatgtggcggcggcgctagggttcggcctgggcggcggctagagattaaatccggtgaattaaagtcaaattaaaaggggaaaatgatgacggaggagtgggaaatcaatttttgcaatcaattagaagagaaaacacatgcggagacagatcgatatggtggcggcggcggagactgaaggcatgtgcctatcgagcgacgtacggacgatgtacaaagaaaagaaatacaaaatccttatgtattttttattaggtatagaattacttccttcatccctgcagctatttttggacagagggagtaccatttcctatgcgttgctgtcggagcccaagctctaataacgaaaactagtggaactccattttagattcagttagggaacatgtgtgcagttgctaagtccgagacatgtgagacagtgggaagcagagtggtgaaaatgtaataccctactctagtttcattcttctttggatctcttattccaactcttaattacaaggggtgaaactttgctagctattgctagctaaaactacgtggagcgtaatatccttttttttatgtgtgtttgtcctctctaagcagccctagctctctccttatagtccacgcaagaacagcatagtggttggtccatcactagtggaccctagtataggggttagctattgaaggtcatgttacttattgacaaatgggcctggctgttgtgcccaactagggtataggccttgccacctggctgcgcgttctgagtgtgcatgcaaggtttggagtagaagcctagagcattgttgacgccagcaggaaccttctgttaattagtctcaggtagaagaaagtgtgaaaaggttgtgcccgatagagtggcatcggcaaataaccatgctgcctaatagcccacactctttccccgcaggggtgatgatggtgcacgtgactgttgtacaggcaccatcccatcacatgtcgcctcggttgcaccctaagttggtaagcatcgcctagcattttatgcaaggcttactttgttgatgatagctatagcaccccgcgtcctatcacggttaatgcgctggcgctaccccaagctcagccttgcaagggccaatctcgagggcaagcagcaaccatgccccgagaggcgaggtcccaagctcgggttccagctagcggccatagggatgaacacgaggtcacccctaccaggggcggtcctaggttcttgttgtgtttctcctcaagtgcatatcgaccattgcatgggctagttgatagttgtgtgggctgcctgatccgatgttgttcattgggttccccaagcagccagtgatgggaagcctggttccaagtttaccaatatagcaattgaaaaaacaaaaggtggtgatataaattagagtgctatatgatttgatcacggtttaatttttataatgaaatccaaaattagctctatgggtccgaaggggccttaatcacaacctagtgcaggacaacaacatcaagtaagaaaataaataaatggtaaaataacaggaatgaaagaaagcagatgacccatcaatttttatgaacaaaagaaaatggtaaaccaatgtaaactctaatggaattggtcctaacggacctgctgaaccactcaaacaagttgattctgcttaggctcgcgcatgggttacgttcttatacaaggttaggttcaataatccg

SEQ ID NO: 18334 - DNA, 8066 bp, Oryza sativa
aaccccttgagtagtgtaacacatttccgagagtcatgaatatatatattttttagggaaccgagagttacgaatatgatggtattgttagtatccaaaaaggacatttgctttggttggaacgtggatcccggatgtagaaccacaatgtcatcaaacatgagattgatgactacggtatggaaacggatgagaacaaagcacattctcaggcatggggattcccttttttagccattgaaaggaaatgtgttggatgtgctgatgatggcgtcggccatggagacagtgaggcacacaagagctcggtgtcggtggtgcgttgctatattcatggagaagaagcagagggaaactctttggtatcaatctattaggaatatgtttacatggttattatggttcatttacattacccatctaaataattacataacataaaacctcactggtaatagaagattttagtagtgcaagcagtggggaagtatcaacggttatcatcatggaggctagggctcggcggtgtgctcaattttgcgagaaatcgatcaagagaggaatgatctgagtggcgtgacgatagaagatatgatagtcatgggcctaggatgcaacacaagtttaggctgcaaacggtcaaagaggctcacgtacgtgaagcgaggcacatcttgtgatcggattaacggatgatggagtcaagtttcacatatcaagtagtacagaagagacatgttaggtctttttggcacaactctagatccaaatttttttaagctgggtattcctaaatctacaaatccatgatctttatatatatagatatatatatatatatatatatatatatatatatatatatatatatatatatatatatgattatgttaataacattcggataaattatcttatttcattttagattaaatttttaatttttaattcatcaaaacagtggtaactatatgtcggaagccacaactttgatggaggccatgcaaacaacatcctaaaagttcttttaaaaaatgtcaaaaaaggtgatattagagaactaccggtatgaccaaacttgacttcgtccgtgagataaaaaaaattacaattactagtaaagaaaaagatgcaaatcagcaatattgtttttccatagccatttgttaattttgtatctcacgaactaggttgaattaggttgtgcaatttcgtatggttctctcgaatcatcttacctgtatgtgtgaatttcttttagatcttttgacaacttttatgcaatcgtttttaagttgtcaccaaatatatggtctccactgcatagttttctctaaaatagggtatatgttgaaagtaggtaaatttttccctagtaatggtactcgatttattcttcctgggtgcagtaaccgcgtcgtgtggtgcaaccggaccgatggcagatgacatggcatttccatgggtccgctttagtatatacaaggaaaaaatatgaattaccccctaaactattgcgacagtacgaattacccctgaaactacaaaaccaaacatattaaacctcaaactattgaaaccggacgaattacccccccccgactcaatccggagcggttttagtcctacgtggcatacacgtggcgccgacgtcgaaatcccatcaacaaaaaataaaataaaataatgtagggcccacatgtcatattaatactttttctgtgtgtgctcttatcgttggaggcgagcggctacgagcccggctgggcgagcaacggcgggcacggttccggccggcagtaggcgcggcggggaaggggaaccggtcggcggatgggagggcgcaccaggcaacggctggagcggcagggagggggcgcggctaggagtgctctccaggtcgcgacgggagcggcggggaggaggaaccggtcggcggtggtcgcaggagaaggtgccaaccggagccgggaagtccggcggcagagacatgttccactggagcgacgctgacgcgccagaggccagggccagccgatgggggatcccacgatgggacgacggccagtgttggcctcctgacaactgggtcggcggagtagatcgaggcgatgaagtggcatctgtcctccgacgacagcgaagcagggcggggtggcggtggtggagacggggccatgccggcggaactcgggcagctgtccttgaccggagtggaggagttggtcggctaccccgggcccgggcatggctagagggcggccgacggccgggcatggcgagagagcaatcgacggccggcgggtgcgacggggagggcgccgtcaccagagccatcggtgtagccaagtcgccgcatccttctcctcactgccatcatcgttgacttgctggtccccttcctgcgaggtcggccggtggcgaggagaactcatagagggcgccgatgggcatggataggcagcgaggttgcccctccctcctgctcctagccccacccccaccctctactacctctctctctctttctctctctggttatggcgggtgtgttgtagagaagaagagaggaaggagaagatagggccatagagggtgtcaggtgggccctactgccaggtaggattaaaacaaaatttcattgccacgttggacgccaagtaggatcaaaaacagatgatattaagataggggggttgtttgtccagtttgaagaattaagggtgttaaatgtccggttttatagtttaggggggtaaatcggacgaccgcaatacttcaggcgggtaattcgtactttttcctatatacaatgatgtggagtggttgtaagactcgccattttgccacactgagaagtgagaacattgtatgacatgtggactcgatgcatcattaaggtgagagttataacagggctataattttacaataatttcggccccatcaattgggcatatgtgcgcataatacattatacggcatattagccagccaggggcggagctacagtaaagggccggtgtcaggcgacactgatgactttcggcaaaacctatagcaaaactgtttatccatatgttattacactatgatctaagtataattaatatactatgacaccgatagacacgttatgacaccaacgaatcgattttctatattcgccactgatattagcagaataataggtaccggcttataggtgttggtttatttaaaaccggcacttatactttagaaaaactaggatctatacttatattacaggtgctggatctatataaaattaaatcgggacctatagtatttgtacttatttttttttaaaaaagggcacctataataaactatgggaacgggcacccgagccgagctgaaccgagcgcctatactccactcttagtccttatccatctggccatactccactccttcattcttccctccctcctcctcacctctgttgcgaggtggtggccggagtcggtggaggtggttgcggtgttgcctccatgtctgctgccctcccctccggcccccactcccttggcggaggcgaaggaggactgcggcggccgcctgcggaaggctacatccagcggcagcgatagagaagaccagcgcgggcggccattctctgctgcatccgcctcccccctcccccgccttctcctcctccagatccaccgccggtgaagaagaccgacggtagagggcgaggcggcggccggatccggcgatgacctctcctctccatcaggcgacgatgccggtggtggttttaaatttaatttttttttgctttggttggttccatatagagcaaacaattaatagaggcctccatcggtagtcgttgagttaatatcactttgggctatgttttatcgtaaaagttttagtttggaccaccctttgtccatttttttactttaggctaggtaactttatcttaatttgttgtacaatagactacctcaaaccacatctttagcacttcaatgactttgagcaaaacattaatgacatgccggcgaattttcatacttatatgcatgtcatacctttatcaaggagacgttagacatggtttgcgaagagagctagaatggtccattaattatgcaacaaatataaagttacataattcaaagtgaaaagattggatatagaatgatcatgagttaaacttcgacgataaaacatggtacgaagtgcaattcactcttaaacttgtcatcctctaaaatttacttaaaataaaataaatgccacacctatgagaactgatttggttttatttgataacataatatagatatgcgcatagaaatacggattcgaatcggaaagtcatgtacgcaagcaaatcaagaactgtttatgtgatccccagattcctattatatgataggacagtaggtccatctctatcccaagctagtgcaccacacatatcacaatatcagccaaaactcatgcaccccactcctctctgactccgtagtccagttgaaaagacaattaatcaagtgaaaattggaaccatgtcattataattttataaaatttaagatatgatatcctgacccacatgtcattgactcatatgggtcctcatatcattgaaataccgatggcatatctcaaacattgcaaaattataatggcatggttccaatttacccattaatcaacgggaaggacgccgagatgtgttcggcactgcctgctagtaactttcagaacggaaaagagttaactcattttcatataattaattatgtattagctaaaagagtaattttattggttcttgagaaggtatcagaggcaccatattttctacagtgaaatctggtacctccagggttaggaggtatggaaatttatggtaaaatttttcttacctctcagtataatttatctggctaaaaacttaaaaattagattaatatgaatttttaaaataacttttttctgattttctctaattctccacagcatcttcatgttagtacagtagtatatttgtgtagatcaaataaattatggaaagtcagcgcgcgtgcagcggcggctcaagaaatttcgctgtcacggctctctcacggcattgatcttcccaaacccataatgccaccactcgatcgatcaccacactgctgcaaataatcgactttctctctctctagtctctatatacaatatcgatcagtggagcttaatttgcaaattaaccacattcgaatttctctctctctctctctagtctctataaacaagattgatcagtggagcttaatttgcaaattaaccaacattgcattgcctacgcaagagcgagcatacatgatttccatggcgccggcggcgccatttccacgtcgtcttctactctcgctcctcctcggcgtgctcgtcgtcgccgtcgtcgcggcggccgacgtcgagtcgtcggccggcggcggcggtggccgccggcattcgccgcggcggacgcgctactcccgcgtgttcagcttcggcgactcgctcaccgacaccggcaacgcggccatcctcccggccaccgccggcgggcccttcacgcggcctccgtacgggatgaccttctaccaccaccccaccggccgcgcctccgacggccgcctcgtcatcgacttcctcggtaaacatcaacgatatgatcccgattatttttttcttaaaaagaaaaaaaaaagaaaggtcccaatcatctatgatggagaataagtgaattgtctgcttttcctcgtcgattttgctatatacttatccataaattttttccttaaaatttaacatatgtaaatatagtacaatctcagtgtaactaaggtgatgtttggatacatgaactaaattttaatccctatcacatctgatatttggacactaattataagtattaaacgtagactaatgataaaactcattccataacccttaactaattcgcgagacaaatctattgaccctaattaatccatgattagcctatgtgatgctacagtaaacatgtgctaattatgtattaattagacttaaaaaatttgttagcgaatcagctctcatttatgcaattagttttattattagtctacgtttaatacgtctaattagtgtccaaacatccgatttgacatagactaaaatttagtccccgatccaaacaccacctaaatacagtaatttgcatgtaactaccatttaactacgatataattttaaaccgttatatttgctttaaaattcgtgcaaggacggtaggaaaaaatcacaacccacacacatgtgggaggattcggtaccgttacctctgttttcacagaaatagcatgtcacctagagatttttaaaaattatatacaagttatactatagttacttgcaaactataatatattcacatcacgattatactacatttacatctgtcaaattttttagttaacaaatatatagctagccccgcaatcttagttttctgattgaacgtgcatgcagttttacttaaacaaaaccatggattaattagttaattgttatcatgtatgtaattcatgtgacgtcgtcttcatcgatcgcttgtttgtgtggactgtggagcgcatgcatacagtgaaggcgctggggctgccggagccgacgccgtacctcgccggaaagacggcggcggacttccggcgaggggtgaacttcgcggtgggcggcgcgacggcgcttgacccggcgttcttgaagagcaggggaatgacctcctccgtgccagtgtctctcagcaacgagacgaggtggttccaggatgtcctgcagctgctcggcgcatcagcgcacggtaattaagctagcattgcacaacattaatttcatgcttctgatgttaatagttacctagttgattgatagagtgaaagtaattaggccgtgtttagttccacgctaaaattaaaagtttgaaaaaattggaatgatgtgacgaaaaagttgaaaatttgaagaaaaaagatggaaactaaacaggccttaacaaaattactcaatcaggctttggtaggttattccctgatagagagagactttttttggaaagtctttcttttttgagagatcggataggagctctgccatttaaagacttttggaaactctcactgttaatcacgaaagtttaatactttctctatttcacacactgtaagattttttgggtgttgaatagattcatacattaattgatctatgtatatgcgctttatatatgtgcccaaatttaaatgaatattaataaatttagataaggcgatggagagaacaaaacattttacattttacagtacggaaagaaaaggagggagtgtatctaaacacaaaatgaacaattgggttgtctatttgaaccaatggaaaacacagttttgaattttgactgaacaattgggtcggtgaattaattcacatgtggcttctgatcgatttgggttgtcaaattgtacagttttgagtgaagtttaacacgaagaaatacaaatgtcttgcttgaataattttttaagcggcgtaacttaatttgatcgcaccgtacgtccccaccataacatgtttttaccaccaatattttctactacttcagagaagcacacaatcgcggcaagctcaatcttctatttcggcgagatcggattcaacgactactctttcgccctctccgccggcaacggcaccgtcgacgttgcggcgagcttggtgcccgacatcatcgccgtcatccgttcggccgtcactgtaagagcagcgcatactaccataaaaatattttttctgtacaaggaccctgtaggttatagacggtataacggactgtaactgtctcgtctaaaaaatggacttccattttcacagatgactttataataggagcgcatacaaaaaaaaatctattttcataggcggacctcttaaggggccgtttgtgaaaatgatcatattttcgcatgtggttctcttaagaggcagcatacaaaaatctattttcgcat

SEQ ID NO: 18335 - DNA, 1584 bp, Oryza sativa
aggacagcgattgcgaggtctggtggcgagggtggtgatccggtgactgcaacgacggcagcggcccccttggccctcccccgtgcagatccggcgacagactcgagcaggaggccggtggcggctctcccccgccctcccccgcgcggatccagagttgggcggcacggtggtggcatgtgcgggctccggcggcaggcgcggatccactgtcggcgacaacgggagctacggatccgccggcggtggagatgggagaggcggatccgccagcgatggcagcggtggcgattagctagggttagggttaggtttttgtgttttggatttttttttttgcgatttttcatttttcgcttgcacacggcttaagcgcttgcattccgcatgcggtgcaccacccgcatggaaatattatcatttttatatgccctattgggcaggcagttggtacaaccgcacgcaaaaaactatttcgacagtttgaaaaaaatatgtttttgtagtagtggcccgctcgatttgattcgtggccggttgctttgcttacatgtcttgcaattgagttgtgtgtgtgtgtgtatatatgcaggccgtgatcgccgccggagcaaggacggtggtggtcgccggcatgataccaattggatgcgagccggagatgcttgccctcttccccggtggcgcaggcaactactacgacccggcgtccggctgcatcacgcggttcaacgacctcgccgagctgcacaaccgtgagctgcagcgggcgctccacgagctccgccgagcccaccccggcgccaccgccgtccgctatgccgacctttacggtccagtcgccgcagctgtcgcttcgcccaaagaatacggtactctccccgttttatattacaagtgacaacgatatctttttatcctttttccagacgtgtatatttctataaaaccggtagaaaaagatatatattttcaatttctttttcaatcggcgacagaacaatctccgcacgcgagacgaatccatcatcatcgtcgtctcgctgctgatatgggtggatgttgttttcggcagggtttgggagctcgccgttggcggcatgctgcggcagcggcggtgagccgtacaacttcaacgccaacttcacgggattctgcgccacaccagggtcgacggtgtgcgcggacggcccatcatcgtcggtgtcatgggacggaatccactacacggaggccaccaacaagctcgtcgcccgtgccatcctgacacgaccgtgaaatcatcaactatatactccctccgtcctaaaaagaccatcgttttagttagtccaggcagggacggatccagaaacagaaaattggggggcctcggttacatggtttcttcgacctctagccatctaaaaacctttaatttagcatttacggtgaaaaaaatcaaaggggtgctccgaggggtatccataggtcttgtgggtgtaggggggactcgagtccccctgcacccatgttggatccgcccctgagtccagacatattaaacatgcattttgttaatatgctctgcattaatatgaagag

SEQ ID NO: 18336 - DNA, 8548 bp, Oryza sativa
  unsure (1)..(8548): unsure at all n locations
cgccgactggatccacatagccgactgccgcccggttgaccggttccccctcccatcccgcccgagcctaccgccggcgtcacgggcgccgcgtcacccccatgaggtaaggaaggcagtcgtgtcggaggcgctcccactcgagtgtccgccactctcgcttccgcgtccctcaccgccgtccgtcgttcgccccagcgcgccacagtccgccgcccgcccctccacgccgccgtgcgtacctgcacccgtgccgactgcccccacccacctgcgcccgcgccgaccgtccccgcccaccacccatccccgcgccgttgtgccgccatacgagagagagaggagaagagtcgtgcgagagagtagaaagagaggaagtagggaagatgagtatgatatgtgggtcccacctttttttaataaataaaatgctaactggattgtcacgcgtacgccacgtagaacaaaaccgctctgaattgggttaagaggggtaattcgtctggtattaaaagtttaggatgagcaatgtctggttttttttagttcaggggtaattaggtcgaccgcgatagttagggggtaattcgtacttttgctaaaataaaaataaggtcacatggtcgtaccgttaaaaaaaaaaaagtcatggccgtgtcccttctggaccgcgtcggctttattggttgtgggccaaacccaggctagcccaaccctcctagcttcattaattctaacacggcatcaaagggagcaaaatgtcagggaaattaaatttggtttgcagtgttcgcgaaataaacacgattattacatgactcttcctccttgtcgtcgacgacgtcgttgatcctgcgtcttgcattcttgtgttggacgtgtgccattttaattttggaagtgtgaaatcgtcaattcattgagatctcggtcagttagtcggtatccgtcacgtctctcgtcgcaatcccatcggtgtccacaccacgccggaggtgtttcgttttgttttgaattttttttccctttgaatgaacgttacctcattttgtacccctcgcttaaacacgattgaacattttagagtatgtttttataacactacatgaattttgatgaaactattgtaaaattacagatttaaataattgtatcctaaactataatttagcggtaaattatttccaaaactacatattctagaaatcgtattataaaattagacctagaaattgtattataaaattagacttagcgatattcaagtaactattaagattacaaaagttttagttttctttacaaaactgatgttaaatttgtagttttataatacgatacctttaaatatgtagtttactgaaaatataatgttaaatctataattttgtgatacacatttttaaattgataggctaatcaaagtcttgtagttttgtaaaatttattcaaaactttaaaaaaccatggtgagatagatcaatatgtgtgatgtgttgctttacaatcatgtaattttaaattcaacttaaacaacaagaataacaaaatatggttgggcatgaactatagagtatagacaatctcatttgtttttcgattctgaatttgtcaaaaaaattatgacttagaatggacagctaaaatatatacataaaagagagagaaaaaaaagactttcctactggacgccaattacaaatagatagaaccctcgccgagccggtaaccacgggaagcatatcgatgacgccattttccccgcatctcgtcgccgccgccgccgcgctcctcggcgtcctcgccaccgccgtcgccggaggcgggacgggcgcctacacccgcgtgttcagcttcggcgactcgctcaccgacaccggcaatgcgctgcacctcccgtccaccggcggcggcggcggcccggccagccgccctccctacggcgagaccttcttccgccgccccaccggccgcgcctccgacggccgcctcgccgtcgacttcatcggtagccaaccaccaccaccacacattcattctcaaaaccaaaatggcaaacttctgatcacgacgtgacgacgtgcagtggaggcgctgcggctgcggcacccggcgccgtacctcgccgccggcggcgagacggcggcggagttccggcacggcgtgaacttcgccgtcggcgggtcgacggcgctgccgccggagttctacgagggccgtggtctcaagccgttcgtgccggtctctctcgcgaaccagaccgcctggttctacaaagtcttgcagattcttggatcttcagatcacggtaaaaaaatcaaaaaaaaaacattagaaataattaacgtggatcgcgacgtgccatctaccggccgaaatgttcgatcagtgtatcatcgagtgcttttttatttttctctgacatcattaataaacgcacgtgccggaaaaatgcgtgttggttcacttttgatagggaggaggaagatcatggcgagctcgctgttcatcgtcggggagatcggcgtgaacgactacctcgtctccctcgtcggcaacctcaccgtcggcgaggtcgagacctccgtcgtgccgcacatcgtcgctgccatccgctccaccgtgaacgtacgtaagtttaattggtacgatcgttgcgttgtgaacatcaactctctgacgtgtaatctttttgcgcgttcacaaaaaagagcagatcatcttgatcagtaatgacacatcgaccagtgtcacgacacgtaggttttcgatcgatctcatgtgtgtgtgtgtgtgtgttgcaggaggtgatcgccgccggagcgacgacggtggtggtgccggggatgatacctctcggctgcgagccgcagctgctcgcgctctaccagggcggcggcggcgtcgccggcgacgactacgacccggagtccggctgcatgacgcggctgaacggcctcgccgagcaccacaaccgcgagctgcgccgcgccgtcgccgagctccgcggcgcgcacccaggcgcgtccgtcgtcgtggcctacgccgacctctaccgcgccgtcgccgacatcgtcgcctcgccggggaggcacgggttcgggggcgcgccgctcgccgcgtgctgcggcgccggcgccggcgcgtacaacttcgacatggcggcattctgcggcgcggcggggtcgacggcgtgcgcggacccgtcggcgtacgtgtcgtgggacggcgtgcacttcaccgaggcggccaacaggcacatcgcctgcgccgtgctggaggccggcggcggcgcaccgccggccgtggcaacgccgctggcgacgtggtcggcggcggcggaggctggacgtagtaggatagggtgctcttagactgagtatacgtggatggctgggatagcttccacgtggaggcccacggtgagcccgtggccctacgccctcttgctgaacatgtggatgaattgatccatcacctttctgttttgttgaccagtgaagcagactactgttggctgttgccgtcagacatttgggcaaaagatgtattcagtgatgtcatactgatatattggaaattactttgtcacaatgttacaaaatcaactgataaagactccctcgaaattaattaaaaaaacattagttgtgccctatggtagatagccagctgggtaaaacattttaattgtctaagaaagaactactctgaattaaagtgatttgaccgacgtatagcaaaccttacataaacgtttagggctcattcatttcaataaaggaaacatataagaatatccattcgtttcaaaggaatccagcaaagaaaaaattttctatttctccactttttgggggaaaacacacgaaaaaaaataatccacttcaagacaatgttttcaatatcctttggttggcttgctaaataatcaaagataagttttctatgtttttaatgggtgaatagctaatacggtccctgaagtttcgcttcgggcttaatttagtcctcgatgtttcaaatcgtccaaacaagtcctccaaatttattatttgggttaatatagtactcagacccacaaaaaatgtaacgtaagcatgccaagtcatccttacatgcagtgggtatgaataaaantgatcattctaccccttatatatcatatacaaaagaaagaaaagacacaaacaaaaagaattgtggagggtggccaacaaaggaatttacactatcagtgctggctacagcaatcgtaaatgacgattctaaaacaatcatacacgtgtgaaacatttatcttcttttttttctttcttttctatatggtatataagggtacaatggtcatttcattcataccgctgcatgcgaggatgacttgtcatgctaacgtggcactttttgttggtccaaggactatattaaccaaaatgattaatttggaggacttgtttggacgatttgaaacctcaaggactaaattgagcccgaagcgaaacttccgtgactatgttacctattcatccatttttaattctcagacttgcacatgtattttcatactatttctatgtttcaaaatcctataaactaaacgagcctagacccctttggctcggtgaattcataaggaaaattaaggataattcaattctatatttctcattgaaatttctatagaatgataatcctatgactttagaggaagttttccatgaggtcataactaacggtttctttcctttttcttacttcaaacaccttttttgaagttttgtgtttttcttttttaagcaatgtagaaaatggagaattgacaaagaatgtttggaagattcaattttctatggacttttttcatatagaccactttaattcacgggaaaaagattgaaacttttccatagcatttctatagtcaaattccaaatgaaaaccagcgaacgtttagtcttcttggaaacattttttggttcaatgtgtcttatggcacaatcaaaggtcttctcttcttgttgggacatggccgggaccagtactttaaccatgggtgtacgtaccaagttaattaaaaaaattatcaacaatgtattgttatatgtagaaaaactaaaatgacagcagtttactacatgctttgaaatcggttttttggcagtgttacgacaactatctagcctgttaggtccaaatgtgtgtgtgtgtgtagttttgtgcaaatctggatttgaaaagtataattggatttgacatccaattcttgttttcacttttataaacagatcgaaccataccttgtacacaattatactgaccaatttatgtttttataaatgcaattgtagtttgtatacaaccatatcgagcaatgtacaccgttataatctaaatccaccacaatcgtatagggcatatgttctttttttattattatttcacgtggtaatcattagagaccttgagatctatttttttgtatttatgcaatttattaacattgttttttaacatttagtacacgtttaaaaatatatttcgtttatttggcctctgtataaaaagcacacgggcactacgctgcggtcaaaaagagaaaagtaacctcattttcttttcttgatttgtgacgttcagttaatcagtttgcatgagtatcgtgtctaaatcaacctaggctagctaccaacctcatgataaaacataaagctacacatgccaataaatattgatcgaccaaaagtgcacactacatatatctccatactaacttggagaagaattctatcaccaattaattaagcgatgagttcggcatgttgctttttatgcacatgtgcatgcatccagcttaattagtggaagaaaacgcatttaggcatcttagagtataggttaaagtgcaacctctatgtggatcatatcactgatcttgaggaacttttggatcacacgagctctttaaaatcgtgttttgcagaaagtttacatcacgacgaccatggcacaaacaactttcacaaccaaaaagaatgtttagggccaactccctaccttatcggtgcaatgtttctttacaacaaaaaaattcggcagatatatatgcatgaaacaacatttgccttatagggcaagcaacacgtgacagtgaggatataaaatgcaattggatgtacaaaagttattatttattgcgatggatgaagttgtttgcttgtgctgtgtaagcatggatgaagttgtttaatttgcgtcgtgtgctgtatgagcattattctcttgaccatctagtacatatgaatattatagaattggaaatgtgggatgaaaaataaatgtagtgagaaagtgaatggctttttcttagcagaaaaggaaaattctaaacccatgtaaaagccatgatcacgtcaaaagttaaaagcattcctcttatcctttttcatccatgaagtagtcaagtagcatacacaaaacatgtggggaaatgtaacagctatattgcaactcaacatatgaaaagattatgtacaccatatgagcttaaaaagttagagcagacaaaacgacagcacatgaaaagaacacaattaggatatgacaatctaaatcatgcgttggaataacaaaaaaaaagttgaaagacaaaacataagttgttgaaaacattcagctgttcttattgctggaattgtgcttcagtacgttttcttattgtaaggttgaattaatatttaaaagtaaacatacaaaacatattagaacaagtggcctaagtaatgcacaataagatctttatttttgagaaatcatatttttagaagcatggagcaaataatctacggtagtgatataatgaagaagctgaaaaaaaggggctatgttaccatggacattctgaagatagtatggacccataatgtggcaatcagtacatgaattcaggaattaaagtaaaaagattttgttccacaacacgattcatttttatatagctttctaatgaattcatatgaattagaggtccaagctaagtaaatcccttgcttttgtataaaaaaaaattggcggccggcagaagccaacctgagcatattcaacaatagcccctatagtttaaatggaggctgccccatttattcaagatctaaaagatgcctccaatctagtagtagtctccatttctcaatccttatttttttagttttctctttcatttcaatatacactctatctttatgactagtttaacactacaataattcaaacataaatatttctaacacatagaattcaaccatatttaaattcacaattgtaaacaccatgttcacaatttatattcaaccatattcaaaatcaaaatttcaaatggaaatgaaaatgacatatcataccatgaaagtctcgacatattaatcataatcaggtttattctaattaataacagatcaaaacactgaacaaagttttagacacaacatgaagttcgatcaaaaattaaaagcaaagccatgtaacactgccaaggacatgcaaaagatggcatgggcagggatggttcaaagggcggcggccatggagcacacagctggtgttcatgtgcccggcggcatgcagcctgtcaggtgaggacgataccagcgcctacgcaggagatcaccaggagcggtgaggttggaaacaatggcattgtcgcaacgtcccctggatggaggtgacacaacacgaaaaggaaattgtcatctcgtgtagaaaaaatagatggggattgtggctagagtctccaaaactagaggcttggaggtgagattttggtgccttactattctagaggttgtaataaggactctgctggaatttgttttctacgctcaaccctcgaaagttgtttaggggctctacatttagaatccttgctggagatgctagctctctttgcccatctattttgcagaaaattttagggaataaatttaatttatttagttagattaattagggatgtgctacgttctaggcactaaggagtactacgtgctcgcgaattagccgatatccatcatatccttagggaaccaagcactatctaaacacgcaattgtaaagcaaagcgttctcgattggaactcaaatgatagggaaatgacataacatgagctattgcagggaaaactgaccaaagctaaatacacataaacttttcttcaacgctacacttcttttcagtctgaatgcttgagatttttttcagtactgaacgcttgagatttccatgattgctgcctcttgtacacctgtgtttgtagagtgtgtaacatcatatctctatttaataagcccagtggtttttgtacggagggggggaaatgattcgattcttggggtcacctaacgagttggaatgcagtagatatatgtcatgttcccaatcagaggaaaacaaacaggtcttgccaacaaaactgacgcacaacacgctgcgaattaatgtccggcggaaaatcggcactgtacttctcttgtactccctccgtctaaaaaaaaa

SEQ ID NO: 18337 - DNA, 9620 bp, Oryza sativa
aactaggttttaagttttaaattttagcatgcatatatatcggctgattttgtacagagggaacgatgcatggagacgttaatgcacggcagacggcagatgcatcggcgcatcagcgatggacggtgctggttgattgtgatatatgccgatcgatgccgccgtccccttttctctcgtgtagtcgtctggtagcaccgcacaagactatacacgccgagaattaaaggcaacgcatgcgtggccggggcggctggaaagtttgtgctgctttgctagggcggaaaagcaaattaaacagccggccggtgcacacatacaacgcacgcggcaacggcggcgaggcgagacgcgcggacgcttgccgactggcgactgatgacgactcgattggttaatttggccgccggctcgatcgcccgctgctgcgcctgcgtggtgcgcgcgggtgagcaacccacaaccataccacgcttgctcgatcgggcgcgggcgggccggatggatcgctcgattttccccggctcggttgggcaggcggccgaggtcgtgtgcccaccgcggcggtcttgctctgggccgaattggacggtttgaatgttgaaaggtttgcaaagttgttgttggaaacacgttcattttaggtccctcatcaagttcgaatttcgatattacgtttttctcaacttttaaaaccagtgtacccaagatcccaaatagtatagtacctggttttagctaacgtggcgggtgagacccacgtggatcccacaagtgaggcctattttcttcttcctccaacttaccatctcttttcatctcctattcccccaccttcgcccctcccccactgtctgtcgatggagaatggaggagagagaaatatgtctaacatgcaaagcccagtcatcacgtcagccaaagctggacgctatactgcttgggatctcaagtatatcggtgcaagttgagagactctttatatatgatattacggtttgacaatgaaatttgaactcgatatcaagacgagaaacctaaagtaaacttattcctcgctggatatatcaacacgttgtaggctgagccctgtgcgttgtattgtactgggccggtcgctggtctgtgctgttggcaaagctgcatgggctgccccgtatttgccaaatcacatcgggcatcattccagttttttcagcggtttggtttgtcactaatactactttacccaatgagaacatttacagtgcagtggttcgccgagtggtctcactgaccatgcaggctctgagccggaatggcctcgcagaaggtatggtggcttactgaaagaagtgtggtcctcccagtgaaaggggaggaataaggtgtgcaccttagtcatctgcacgggaagagcgattggcaagccaataaatggaggaagaagggaagccgagggcgaagatccaccacctgcgccacctacaaagacgactccaacgacctgcgttaacaactccgatgacctgcgagagaacgaatggatctggcatgatctgtttagctcgtggccagtaccagtgattttctagtttgtgtcgcagtgcagggagtcgagacgcaaggtagtgtgtgcgagaaagatgggttcggagtgtagagagaggaagggaagggtggaaagagaaaaaaaaggtgttatgccaatgacaaatggggcacaggtctaaaaggggtatatgtgtgattcaattttgttcaagagggttcctcatgtaaaagttgtaatcaactttggtaatagaggataatacaagggctaaagcgaaaatttgtaaaggctagaaatgcaaagatgcctgtggcctttggtaattatagcacactttggccatacgagtctactgtactaaataccctaaggccattcacaggcacctaggtgtcattctcccttatacagccagctcaaagattctcctccacctaggcatagctcggagcctcgccaagaacagggagccaatttttgctccctattattcgccagaatcgcagcttttgggccacaagagaatagatgaagaagggaggggaggggagaagcgccgatgccatcgtcctccccgatctgcgtcagccccccctcccccccaaatctgcgccggccgcgatgccccccgatccatgcctgccgccgagggaggaggccggacggggagaggaagcggcggtgcgccagacggggagctccgcccggtgtggtcgaagcttgggccgtgccgccgcctctggccccgacgaggagagatggaggcgtggagttcggtgccgctggcgctcggacgatgacgtcgctgccttcggccccgatgaggagagatggaggcatggagctcggcgtcgctgccgctttgcttcgtctgcccgagagagtgagtggtggggaaagtgtgagaggagagagagggagagataaaagtgagtggagagagataggtgggatccactccaagcaacatgcattgtgaagtatgtagctaatatggttctttagcccagttagaagcccaagcgcggcattttccaggacacactgtgagtagtttgcaagatatgaacatgacaaaggtaattgttaggaaccttttcatgtcagcacgtaaaacaaaacgatttattagctcatatttaattaaatgttagcttaaaagtttttaaataaattaatatatatatatatatatatatatatatatatatatatatatatatatatatatatttaaaaatatactgttaattgttctagtagcatgtgcgtgaaaaaagagaaagcagaagttgtgcagtgtgttgtcatacgggaaaaagaaaacttcaagattcctttgaatcatagaaatgaaaaaccaaaggaatagaaaaaacataagattccgatagaaatacgagtataaaacataggattataaaacactggaaaaccataggaatggatatttaattgaaccgcaggaaaaatatatgaatttaaaaagagataaagactcaaaggattctttccatgaagttctatctcatgttaaatttccttcaaaacttgcatggaaaaatacatttcatagaaattttgtagcattcattcctttgattcaaagagctaatctctccatcccaaaatgtttgacgctgttgacttttttaaaaatgtttgaccatttgtcttatttaaaaatttaagtaatcattaattctgtttctatcatttgatttattgttaaatatacttttatgtatacatatagttttacacatttcacaaaagtttttgaataagaggaacggtcaaatatgtttaaaaaagtcaacggcgtcaaacatttaggaaaagagagagtatattagaaaaattcatataggaatgaaaccatctaaaattccataagtttcctttgagtcaaagagcgcctcaaagtagctatcccaggacatcacaggagtggttgacaagtgacaaattaactaaacgcgttggtcgatgactcgatggccgccgatagtgtactaccatgacaagtcacccaaaggcccgcaaacacactagcatggcgcctggggccattctccgagtgacggcgcttctccgcttcatcctcctcgtcgccggcgccgcgacggcgacggcgaccgcggcaaggttctcccgcctgttcagcttcggggactcgctcaccgacaccggcaacctggtgctcctccccgccggccgcgatgtcccggagcgccgcctcccgtacggccagaccttcttccaccgcgccaccggccgcgcctccgacggcaggatcgccatcgacttcatcggtgccgcccgccaatctctctctctctctctactgtttcttcttgcaactcggtcaatcatttgataaactaacgtaactgtgcagcggaggcgctggagctgccgcgcctgaagccgtacctcgccggcgagggcgccgacggcttccgccacggcgcgaacttcgccgtgggcggcgcgacggcgcgggacgccgggttcttccagcgccgggggctcaggtccgtgccggtctccctcgccaccgagatgggctggttcaaggaactcctgccgcttcttgcctcctcctgtcctcaaggtgttcgacgacgaacactgaatattactgaattttactaatgcatcagcaatgcaatattacctgatctttctcccacgtagagcaaaggaagatcacggcgagctcgctgttcttcgtcggcgagatgggcggcaacgactacctcaacgccatcttccagaaccggactctcgacgaggccaagaccttcgttcccggcatcatcgatgccatccgttcatctctcgccgtacgccgtggcacgccatgatcgatcaccaatgcaattcaccttgattaccatttaaatcgtgatgattatatatgcaggagttgatcggggttggagcaaagacggtgttggtccaggggatgctgccgatcggctgtgagccgcgggtgctcgagctcttcaagctcaagcacggccgctccaccgccggcgacgacagcgactacgacgccgcgaccggctgcctgaagagcttcaacgagctcgccgagcagcacaaccgcgcgctcaccgccgccctggacgagctccgccgcgcccaccctggcaccgccatcgtctacgccgacctctaccgcgccgtcaccgacatcgccgtctcgccgcgcagatacggtaacgtgcattgattcctcgatctcctcccacagctacatacaacttcgcagtggcgaacttggagcaaaaattaccagggattctatacatatcaattatctaattattagttaatatatactaattataaattagctagcattgagtaatttacccggggtcaaggacccggtaaacactatgtaggttcgccactgcatcttctactctgtctcgtaaaaaagcaaatcctaactacgaatctggacacgcatatgtccaagttcatagctaggattaaattctttttgggatggagggggtacatatcttcgtaagtaatgtcttaagctgtttgtctactaaaaagggacaccccatcccccaccacgacaatgcatacaacctacgacaatgcatacggtaatttggaggccaaaattcgatccgcctataaagtgaaatgagtctcgtatgctaaaatcatttttctagtagagtctccttcttgcttcgtgttcatggcggcgtatgctgcagggttcggcggcgagccgctgttcgcgtgctgcggcggcggcgggggccgtacaacgtgaggctggcggcgaggtgcggcgacgaggggacggcggcgtgcggcgagccgtcggagtacgtttcgtgggacgggatacactacacggaggcggccaacagggtgatcgcgcgtggcatcgtggaagggcggtacaccgtgccaccgatatccttgtccgtatcttcgagcgattgaaaaaaacatgcccgaaatttggagggattttacgggttttttaaaaaagtgccacgaaggtacgagcgtacggctctaagggaataattaatgattgtgcatccattagtcaattatgtgtgtgatgatgatgtcaatgcaaaggggaaaagaacattgttgtgtgatgggctgatggcaatgtttttgtttcctttgtataaaatgtactccctccttccgtattataagtaactaggaaggcaacccgcgcggatgcgcgggaatcttgttgattgtttttataaaaagaatgtgaaaaaaaatcatattgatattaaatgataggaatatttctcaaattgaaataaaaacacttttaccgagtaacatataaatcactactatctccgtcccaaattaattgtaattctaagttatttagcatatattaaggtttgagaataaaaactatagtaccccttattaaacggttcatatgtaagaatgaaatagtagttgagagtaaaataagaataaatttggatgagatgtgttaatgggtatcattagtactctactgtgacaattattttgggacaaattcaaatcctaaaaatacaattatcatgggacaaaggtagtactacttattttgtttttaaagctgagaaagatgaagttgcatatgcgccaataaaataatcacaatacatcattaataaattacaaatatccactacttggttttcatgtctcacttatttgtaaatcaatacataaatatggtaaaaataccgttacttctacccattaatgggatagcaccattaaagttaaacatgaatgctactctaatagataaaaccgatcgtagccgccaagactttctttctttattgccttgaaatatggtcctgcatcaatatagttgtgttcctcaagatcagcttggatcacaattttaatatctaattcatgattgcatgctcataaattattacatcgataagtacgaagctgagcactattagctatcgcggccaccttaacttagtcgtatgttccatgctatatacctatatagcgaactctgttgttcatgcttggtgccctttaggaaaggacaaagagaagatggaggtgatcaagatagttctttttattgttttcagtgtatttgtggtttagtgtagacacagtttgtttttggtattcatcattattacacaaatttttatcatatagataaaatactcactattgaaaacgagtgaggttaatcattcgatgatattttaaaaaattaaaattaaatatgcataacaccacgataatatccagagcaccatattattgattatattttaacaaatatctatagtttagtgtctatgttttaacctcatagtcacgtcagtgaagtttatggcatatatccattaattatgcctgaaatattgaaatttcttaagtataagaaaatatattatgagtagtttattatacatgttgtttcactcttcatttgtgttaaaaatatttggcaaaaaaaatatgtgcccataggtctcataatggattatagcaagatctttggcaggaaatattgttgatagttttttttatatctatgcagcatgtatgctacccacttctcaaataccaattaaatagttctgaaaatatccaaaaaaaaatactttgagaatcttaatctcaaacaaattacaattaaatctcagacatactttaaaaaacataactaaattgtgatgttttcattttttttaatatgtagatttaaattagattgtatatttgtgtagtgatatttcacaccctaaaatatgatgtgaatttgttttgaaaaattatcatacaactaactattatatgtcggtccaatgtgtcgtgatgtatttaagatcacaatataaattttataatttagtttaaataatacatcaggatcacaaattagatatctgatctaaaataatttaaaatacagtttaaagaacgttgattggatattttttatattttattatagatcttagtttaactacatattttatatttctgaagtaatatattttatctttatattgtagaaaaaatcctattttaaagaaggttaatttttttcccaacagtatcacatacgtatgttttttttggctttgtcttttttatctacgtgcttttcttcccttccgtcaacagtaggtaaggtcattatattatattgtaggaaaacaatattttaaagaccgtcaattttttccccgatggtttcatggtcgcatgttttttaaatctaaaagtaatttaaaagatggtttaaagaatgttgattggatattatacatttttattatagatcataggttaactacatatttatatttgtgaagtactccctctatcccattataagtgcagctaaagtttccgtgcctaatgtttgaccgtccgtcttatttaaaaatttatgaaaaaattttaaaagttaagtcacacgtaaagtactattcatattttattatctaataacaacaaaaatactaatcataaaaatatttcaaataagacggattgtcaaagttaaacactaaaacccacaactactcttatgggacggagcaagtaatacagatctttatattttgtagaaaaagctattctaaaaaccgtcatttttttccctacggtaccatagacgcatagtgctttccttccggtaaatcaatcgtaagtacgaacggtaacggtagtactgtttatattgtatatgcaggaggaagctattattttaataataaatctaatctaatgatgtaaaataacgggtccaccaatttaagtgaaaatcgacggtgagatttaactgtgcctgtaggatcgaatcacaataactaagccaacagagggggtgaatggttggtatacccaaaaacctaaaacctaaaacttttagcggaaataaaagttaccctcgaaatcgacggatcgcggtctgactgaaggtgttgcgccggtctaaccgcctgatgaacgtcggtctgaccgatgtagatcgatcggtcgaaccgccgaagtcgcctgtcgtgcctgtcgccgccgccggtctgaccggccgtatgtcgtcggtctaaccgccgcttgccaccagtctgaccgccggtatatcaccggttagaccgccgaaatccagtaaacacaaatcgaagaactcttaaagtagatgacgactttattgattctctctgtgtttacaaagtgcaccaacagcactccttgcaaaaatttcgactaaactcgaaaccctaactcaaaactcaactcaattgctctcaaaagcgatactgggaagcctcacgctccccctctatttatacccgaggtaggcagcctaaagccacgaaccaaactcatactaggagtcctaaacaccttaggaaaccctctagtacaagaaacaaactttacataaccaatcataccaaatttggactccttccaaattcgactcagcatcccatacgcacacaatacctccatcgtatgccatatggaatctccatcaaccacatgcatcaactctagcctaagtatcccgcatgatctctgaccaccacggacgtcgtcttatccccaagccgactcttggtccatcaccgcaaatactctcctgaggcatcgagtcacctacacatgaaataaacaaagaaaccatattccgagactaagttatctccaacttgactcattagtagcaaacaacagtattacatacggatatccaaacaaacaacccgaaactgaaaccgacacagagtcggccggtcagaccgcaggctggccggtctgaccgcacgcatactgccggtctgaccggcaacacctgcccggtctgaccggtcacatgaaataaaagtacctgcgattcacctgtaaattcaatcatctccaaaaccacttcgtgaataaattccaaataacaaaaccaataatctccaatgccaattgttcatcacataataataatcaaaaacacctttgattttacagtgccatgtggcggcttgagagcgtttgtaggagtgccacatggtgg

SEQ ID NO: 18338 - DNA, 2799 bp, Oryza sativa
ggatggtgctggccaacaccgccgccagcggggaggagctcgtggcggacagccacctcctccccgccgtcgcggtggggaagctcgccggcgacaagatacgcgagtacgcctcgcgccgcgccgccggcggcgccggcgcgccgatggcaattctgagcttcggcggcacggttcttggcgtccggccatctcccgtcgtggcggcgttcagctcgcgcggcccgaacaccgtcgtgccggagatcttgaagccggacatgattggccccggggtgaacatcctcgccggctggtccggcgtcgccgggccgacggggctcgtcaaagacggccgccggacacacttcaacatcatctccggtgagcattccattccattccattccacactccatgccaagctaggagtagctctctcacactgctcagattcaaatggttctgaccaccatgtcatgttgctatcaagtttttggagttattttactcatttactgccatcacagtatagacaatccagtgggacaaaagaaaaagagcaagcaaacagagcctctttggatttagattcagccatggatggaccctgtttgcagaaaggcaattttcatttcaactttcttgttggttggatgaaatggcatttgctttcattcactgcctccctttgtcaggggatgcacatgtgatgctcttgcagatgtgaaacaagggaacagcagctgagacaagttacccttttacttttgtttcttttgattgcccgttctgaaagtgataaactagcatgagatggggagacaatagtacatcactggtttctaactttatactaagctggatcttattaaagatgtatagttgcattttcattactagcttgaaacgagagtgttgcatagtaccatataccattgcaattcttgtgcatgtttgttagtcctaatgtttgcttatatatattattgctagcaaatcaggaatacactgttgagctctgtggggataaatttcagtagacagcaaatgggaacattttgatatatgaggcttatcttgtttgtgcctttcaatgcttaaatagtggttgtgtcctatggctatgagataagtaagcatgtaatattgttgatttgcatgttttcatcagccaagatgaaatgctacatttttctcaatgttttgcacgtaacaatgctgacttctatttgatccattcaggtacatcgatgtcgtgccctcacatcagtggagttgcggcactcctgaaggccgcacaccccgaatggagccctgccgcgatcaagtctgctctgatgaccactgcttacaccgtcgacaacacaaactcttctctccgagatgctgctggaggcttgcttgcaaccccattcgccttcggcgcaggccatgtcgacccgcagaaggcgctatctccaggccttctatacgacatctcgactaaggactatgtttccttcctctgctccctgaactacaccacaccacatatccaagtgatcactaagatgtccaacatcacctgcccaagaaaattccggcccggcgacctcaactatccctcgttttcggttgtgttcaagaagaaatcaaagcatgttatgaggttcagaagggaggtaaccaatgtcggcccagcaatgtctgtttacaatgtgaaggtcagtggccctgcatcagtcagtgtgaaggtgacaccagcaaagcttgtgttcaacaaggtagggcagaagcagagatactatgtcatattcgcgtctacggttgacgcaagcaatgcgaaaccagatttcggttggatatcctggatgagcagccagcatgttgttcggagtccgatcgcgtatacatggaagatctgaggggtgaggacagtaagtaaattatattggagatgttgaattattccctggagcagatgaaagatagatagcttgatgatgtagtttgctgattgcttcacaaagagaatcggcgtgaagctctctctactgcaaacctggagttctttcttcgcagtgtcggttactcgccgaacttctttttccccccttgtagttgtcagtgcggttgcccgtcaagaaacttatgtgctattaacatgtgagatttccttttctttttctttctctagtttcatgttctcagacatgaaataaccctgaaatgaatcggttgttttatggcaatgatcagctcacatcagctattgttttatcaatgttctgattctgatcctcctgagttaactgaagaattgaaatggctgtttcattggcaatgtgttctcttcttttacatgtatccagaaattttagctttgtgcataagtaggaaccaatttcagcaggaaaggaaaggggaacagagatcagttcagggatctggtgaagctgagtctcacagacaatgaactgtaaagtgatggccaaaaagaaatcaaatgatctgaattctttccgccgaccgtgcgtgtgcatccgtaacgcacgcgcgttcgctttcacgcgctggcgcctgtgtacatgattggtcgccctgcctgtttagtgtttactagtagtagggtagtactggaggactttacataacacccacgagagactggcccaagttttggcccagtgcagccgaagcatgaaaagaataagttcactttcactcccttcaaagtgacccaaatctaattcgtatccctcaaccgcaaaaccagatatcttgacccttaaactgttaaaactggtgcaattttactctcttggcggtaatgaaggg

SEQ ID NO: 18339 - DNA, 12272 bp, Oryza sativa
ctaccaatgttgcggggcagttcagatatatctgtgtaccttagctccaagtatctcaaatgtttaaggtgacacaaggagtcctgcaatatagaaaaattggaactccttacatgtattgtccgtagagatggaagaattctcaaggaatcgccaggtttcaacttgatgtttccgaacaatatcaatgttcttagacaatgctgattctgtaaattgctccactctatttgctctgctgatatagataaccgacgaaattttgatgaagagagaattccattgttttgtgggtcccgaagcaccagtgcttcatccctggcaacatgctgagcaaaggagtgtacaacatcatgcatgatacaatgttcttcattgtagtagtcattctgaggttctaaaagattcctcttgattaactccttgtagtaatctagaccagctgactgtgcggaatatccatctttaccaatgaatccttcagctatccacatggaaacaattttgtcaataccaatgatttcatctttaggaaatagtgagtaatacacaaagcactgtttcaagttatggctcagatcttcatagctcaggtatattgccttgtttagttcttcaggaagtcccatttttgaccatatctgattgcgtaaaacctcttcccaagcattttttgttgcatttttgttgcatttttcttgcataagacaactcctattactttaattgccagtggtaaaccatcacatttttctgcaattttcatcccacattcttgtactatctcgatctctgatacactcaaggcagcctagacaaacaaaaacgtataatatgagcaaaatagaaccataacttgaaacattattgtgtaaaataattgtgcttatttccttgtctacattattgtgtaaaatttgagttacagagagccttaatgtgcttactcacttttctcatgatgagaaacagttatagaagttccttaattaatcaacaattccacattctagagtaaaataaaaggcacaatttgttaaaagaaatataagccagacttgtaacagtgccgtggtgacttttgatttttgataatttgccaaggggaaactactttatttcataggtgctgctgaaatcacatatctgagatgttcaacaagccaccaatcaaggatatatgcatcgaaggcaccattcagtcaactattttggccatccaaaagaacactatatacttatgtaccttgtgtaaccatgccaccacctatcctgccagccatgttggcgatatgcccatagaggcagtcaatctatcacgaatcatatttatgaatctcttccaattatttatactgatctgtgagtatgacttatttgtaaactatttatatatcaagatgctatttctaaatcatctctgatgatcgtgtttcatggaagatagatatggatatatcatatcaatcagacaataatataagcatgcttcgagaacataagttagatcgatccaccatgactccatgagatatttaccgagattaatttagttgtaagtgttattaatttgaatctagtttctatggttaacatttaggataaattccaaattacctccaaactattgtggtagtccgatttattcagtccagccacactacagcagctagatcacaagtaaccccttctcaggatgtgtatggttttggagacatcaggtgcaattttgggctacaacaataattgctattcattcgattctatacccttggcaaaactgactgacatatagaactcaatgttatatcagagctaaaaggtcaatagttcgaatctaacctgcaacagcattacagaaagtgttgaagtgctcataatatgttaagaatttcaatggttactctcattgagaagaggatggcactcgagatggggcaattttctggttttcttcattcacaaaacacaaagccatatcctcccaaagaggattgggtacatatttatagctgcttgtagcagccatgctagggcaatagggtgctgtcctagagcatcccaacaaactgtcctagagcatcccaacaaaatgtcctagagcatctcaacaaactgctgtcctagttgtcctagagcatccaaactgaaagtagagatgctgtcctagaaagctaaaaagcaagaaaaagcaccacaagaccaagaccaaccagccaagacttattcctacactctccccctaagtcttgtgcgtcgtcttgtgggaaagttgagccatcccgatccgggagcaaagctcaaggaacttgatccttccaaggggcttggtgagcaaatccgcaagctggtccttggtgttgatatagctcgccttgatgctcccttcctccaagtagcttcggatgaagtggtacctcacccggatgtgcttgctccgttcgtgaaaaacggggttctttgccagggccagagcggacttgccatccaccctaagctccaccgctccagtatctctgccgaggagatcactaagcagtcgagcaagccagagcgcctaggtcgaagcggcggaggccgccatgtactcggcctcgcaactagacagggccaccacctgctgcttgactgactgccagctaacaaggcactcgccaaggaagaagagaatcccgctcgtgctcttgctggtgtcgatgtcgccggcgtggtcgctgtacccgacgaagtgtgccttgccaggacaccttgggtagtagagaccgtggtcgagagtccccgcaacgtagcagatgatcctcttcacagcctgctggtgctccgttgtcggtcgctgcatgaaccgactgacgtagccgacggagaaggccaagtccggccgtgtgtgggtgaggtagcgaaggctccccacaagacgccggtactgtgtagcatccacttcctccgtcgtgctatcgcggctcagcttcagtctctccatcggagtgagagctgggttgcaatcggtgagcccagccagctcaacgacgcgcttggcgtatgcggtctgtcgaagcgtgatcccggagtcatcctggtacacctcaattcccaggtagaaagagagaggccccagatcactcatctggaaggtggccttcatctactccttgaacgccgcgacctccgcattcttggtgccggtgatcaagtcgtcgacgtagacacccaccagcaaggcatttcctccattaccccgctggtagatggccgcctcgtgcgggctttgctcgaagcccatccccttgagcgtggaatccaacttggcattccacgccctcggtgcctgccgcaagccgtagagggccttgtgcaagcgtagcacattgccctccttgccggggatcacaaatcccggtggctggtgtacgtagacctccttcaagtcgccgttcagaaacgccgatttgacgtccatgtgatggacgccccagccttcctgagcagccagcgcaaggagtcgcacggactccatccgtgcgacgggagcgaaggcatcgtcgtagtcgatcccctcctgttgcacgaaaccgcgtgccaccaagcgagccttgtgcttgacgatggctccggcttcatccctcttcagcttgaacacccatttaagggtgatcgcgcggtgaccacgagggaggttagcaagctcccaggtgcagttctcctgaaccgcgtccatctccgactgcatcacggcaagccacgcggcgtgtttctcggcctctgcaaaagaccgaggctcaccgtcgtcgcacgcaaggtgcaactgcgcctccaggtcgcggggcaccagtctcggcaccggctggtcgccgagaaggtcctccatcgtacggtaccggagctgctcgccgtcgtggtacgcgtcgatgcgctccccgtcgtggagagcggagtagctaactccaccgggctgcgctcaacacgagctggcgtcggagtagacatgcccaggggagtggctgttggtgctggagtgcgtggggtcgccggctgtggtggtgctggcgaagaagtcgtcgcagccgaagtcgaagctcgagaatgtgtcgctgccggagttggtggaggctcggggactggggtaggcacgctcggtgaggaagagctgcctactcccccagctccctcgaagtggacgtactcgacagtgaagtcgtacgtcagagtcgaaccatcgtccaccgccttgtcccatacccaccctcgcccttcgtcgaacactacgtcgcgcgccgtgcgcacacgctgtgtctccgggtcgagaatgcggtaggtcttcgagccctccgcgtagccgatgaacacccctggggtgctcctatcgtcgagcttgccgatgtggccaagctccttggcgaacgcgaggcagccgaagacccgcaggtgggagaccgccggcttgcgcccatgccaggcctcatacggtgtcctgccgtctagggccttcgtgggcgagcggttgaggatgtagacggccgttaccaccgcctctccccagaagatggccggcatccccctctacttgaggagagcccgagccatccccacaaccgtctggttgcgccgctcgacgacgccgttctgctgcgagctgtacggcgcggtgtagtggcgctgaatgccctcatcagcgcagtacgacacgaattcagccgccatgaattcgccgccgttgtcggtgcgcagcacgcacagcttgcggccgcactccacctctgcagcagcctacgcgcgcctgatggcgtccgcagcttctcccttgctgccgaggaccatcacccacatgtagcgggagaggtcgtcgacgagcagtaggaagtaacgtcgtcctcctggtgtggccggtgtcactaggccacacaagtccccgtgcacgagctcgagccgctccttggctcggaagctcgtctgctggggcaaggggagccgcctctgcttcgtcaccacgcaaacgtcgcagagctgctccacgtggtcaaggcatggcaggcctcgcaccatctccttggcgctgagctgcttcagggcctcaaagtggaggtgcccgaaacgctcgtgccactgccacgcctcgtcgtcccgacgagcggcgagcaaactggttgtgcgacctgcgcgctgaggatgtagagtcgattagtgcttctggttaccttggcaagaaggcgacggcggcgatcccaaatcctcatgactccgtgcttgaccaacacgtgtgagccgttctcatccagctgccccacgctgatgatagagttccttaacgcggggatgtagtagactccggtgagcagcctgtgcttaccggacttggcgatgaaggtgacggagccaacgcccttgatctccacgccggaggcgtccccaaacttgatggagcctcggacgctggggtcaagctcggtgaagaactcccgtcggccggtcatgtgatgggtggcaccggtgtcgaggtaccacccatcagccttgtcattgctggagctgttgcagagggagacgagcaccttcggctcatcaaggtggaggaaagccgctgtggccggtgtcgctgggggtagctcgatgcttgcgtatgccaggagcagagccggctcttcctcctctacctgtgcgacgtgggcctggccatgtcgtggctgtcgacagtctttggcccaatggccaagcttgccacagttgcggcaggtgtcgtctcgtgccggcttgtggttgccggcggcgccgccctgggcgcctctgcgagcgccaccctcggcgcgtcttcgcgcccaccgcagctggacacctccacacgccttgcgcggcttgcggccgcctgtcgagggagaagactcccccttcatcccgtcaccttgagaggcctcccactgctcccgagtgaaatggagcttcccgccaatggtgataggccccgagaggggctgtggctcatcaccgtcgacgaccttgaggcgacctaacgcctcctcgatcgacatcgtggagaggtccagcagagactcgatcgagcgagcgatctgcctgtacttctctgggacgcagcggaagagcatctcgacagctctctcctcgtcgtaggtgtcgtcaccgtactgcaccatcttctgcaaaagagtgttgagacggagggcaaagtcatcaacatcctcacctggcttgaaggccaggttctcccactccttgcggagtgcctgcagtgtggacttgcgggcgcggtcgctgccgatgcgtgccgcaacgatggcgtcccaggcctccttggcagtccgcttctgggaaagcgagaactgcatctcgggcaagactgcagcgatgagggcatccagtgcccgccgatcctcgtcgtagtcgacgtcgccgtaccggactgcctcccacatgtgctgcacctggagcctcaccctcatcatcgcggcccactcaatgtagttggttttggtgagggtaggccacccacagccgggaccaaagtccctgaccaccgtctggacgccgtggtggccatggcgtcggtcaggggagggagagccgcgctgcctgcgaagccgcgcgtgggctccgggctgctgccggcacgcccgcgcccgtctgggttcccatcggcgggcgcgcggtcccttgggccgccgccgtggaggtgggctgctgcccaccgctctgcccgctcccgtacccttcctcttgccagctcctcaagctccctgtcggcggtgctgtcgccggtgatggaaccgttgatgctactgcgcaaggtttcaacctctacctccgccacacgtgccgcatcttccgccgcctctgcttccgcctccgccctggctgctgccaactccattgccgccagtctggccgccctcgctgctgctgcagcggtctaagccgttgctcgcctgcgctcttctactgcggcgagctcggcgtcctgctgacgccgagtgctcgaggcgaccgaacgccgagaccgaacgtcggacatggcgcaccttcggggggctgctgcctggagagggggaagggaacggggaaggaggagcagccagtgctgctgctgctgctggctgagagctcaaccgagcttgggaaggggtggaacaagagatgtttagcctacaggaaagtgtggctctgataccagatgttagaatttcaatggttactctcattgagaagaggatggcactcgagatggggcaattttctggttttcttcattcacaaaacacaaagccatatcctcccaaagaggattgggtacatatttatagctgcttgtagcagccatgctagggcaatagggtgctgtcctagagcatcccaacaaactgtcctagagcatctcaacaaactgctgtcctagctgtcctagagcatccaaactgaaagtagagatgctgtcctagaaagctaaaaagcaagaaaaagcaccacaagaccaagaccaaccagccaagacttattcctacataattggaaagcattcaagtgtgagtttttttcctcgaaaacagcattgaaatatgaggaaaattgagtttttggtgaactggcttgtgtatataattcaataaattttttcctcatggaaattgaatcccaaattaagagaaacctaaagagtgaaacctgtgcagtactattaatctgccccgtggtagtaaatatagtgtaagtattatctatatattaatatagcacagtaagaggctctcctgctgttttaagtaaaaaaatggattacacgattctttctgtgcgttgaagacaaaaattgggacgaatttttcagaagttctcatggaaccacctttaccacctatgtccggtaatatctgtaaaacgtgcagaggtaatcttactagttttattgattacgtacactgcttgactttgatgaagccggattgactacaaaaggaatgtgacacagaaacatttataaaacaggagtcatactgaccaagcttgattagaaaagaagtacctagctaaccatgatattcttttcttgtgtgtgcagagctaaccatgatattgaatgagctagctatcaagcagagtcatataattaatagatctgctgccctaacctgtttctggagcaatgtccaggaatcatcgagtcttagtttggtgacttggtgcgtgtgagcagctttcatcactttagcaacatcttcatttcttgtggttacaaggacacaagtccctggagcacaggctttggtgattgggactctgagcccattgtcccatgccttctcagtccacatgtcgtccattaccagcaacagcatcttacctctcagggcttccaccagggcatcctcaagcagggccatgtcttcaacggcagggatttgttgcttatctgactttgccatggcaatggcggttttgagaagatgagcctcattgaagtcctgagtgacactcaaccatatctttacatcaaaggtgtcttgaatcgcctgatcatggaagatcttcttggcaagggtggtcttgccgatcccaccgacgccttggatggcaaccaccagatacttcttgtcatggttgatgagccagtccaccagcatcctcttatcttcttcaatcttgtcaccgacgatgtcttcgtggatgatcccgggggctgtcctcctagggttgccactatgagggttgccaggggttgagctggatttgagtcggtcagtgtcagcctgctggtcagcttcagcctgcttgaagaggccatccatcctctcattgagctccttcactcggcttccgatcctgtgggcgaagaggggatcctgcaagcaccagagcaaggaggagttggagcagctgcctggatacggagacgcataccgctcgcgccgctgctccgacttgagatgaacgtcatcgacgatgtcggtggcgtcgtacatggcatccttgagcttcctcacccactcatgcacatattctccttccttggcatcggtgatgtgccgcctctccgcgttggccaggaacttcttgagcctgctcagcatgcctgtcagcttctcgacctcgccagaagcgccaagcagcatccctgcctcgtctttcaccatcttggcgaactgctcgccgaggtaggatgcaagggcatccaggatcatctccatgatgtatgtcagcttgctcttctctcagatttttcttgctttcagcttttcagggtggctctgctggtaactagcagtgtttaatgttggcttcttacatcggtcagctccgttgatgtatgttatgggattatcgcagcaaaagcagccaccgtgcacttggagcgatgtcttccttgaaactagagcatggaaccgatgcctgtcctgcccagctaccttgccacaacatcaatcctcaggaatataggcacacactctctccgacatgcactcaaccactcttcttttgctttggttattctgtacaaaaagaaaaggttatcttcgtgtgaaaagcatcaaaaacaagaataacataaagattcactaatcaaagggaaaaggtggaaaagggttattgtgcttatcttcgtgcgatcacacatcggtttctcgtctgtaaacgggttataccatagtagaaagttgtatctgtagtattattttcctttagtacactgatactagattatggggatttcatttagaaaaggaaagcatccggcttctacaccaaagcacacacgaccaaaaaaacaatcacacagtggaagaaggaaaatgtagtagtagggtaacttcttttaattgcactggattaaaactactaaataactggcctgcttgggataaactggaaaattttaacccttaataaacttaccactgcaattgttggttaccaaaggtaacagtgaaatgaaaatcaaacccccttgtatacatgctgtttgggagaagaacatcaacaaaggtcttaataactctgtggttgcatcaagccatgaacattgcattatccatcataaatatgcagtgcacattaagttgaaactatacagctataaataaatatactagcatcaagaatcagaggaacaatctaatagttcaagaccgaaaaaacaaatggaacaggactattgatttgggggaaggggatcatcagaaggtggatcgaatctgagcgacgccagcgacgagggcgaggtgaggtgatgcgagcgaagccaagccaccacaccgacggtgaatggaggctgagaagacgcggatcgggggcgggcaacccgggaggatcagttcgccggagttgcgcatcgcggccggcgatggcgagggggggagaaggccggagagcgaggtcgccgccgactcgccggtggctgcgcacgtggcagggctggtcttgggcaatgcggcgagacgaggaggcgaaaaggcttttacggcccatccaagcgcagatcttttttaccgaataaagtttattttacctccctcaactataactggagtttgattttgctctccctgaccatagacctgtttagggagctttaaattctaagaagcagttgtttgataaccagcttctgagaaactggaaaagctctaaaacccagcttctccagcttctagtttcttggtttatttttcagaatctgtaactacagattctcagaagctgtggactgtttggggcaacttctagcagaaacagcttttgggaaaagctgcagctgggaaaagctccccaaacagggcccatatatgcctcagctattaaaatcagcgtaaatcaacttctcaaatattttcagaatggtttttggctgaagtgatgcgttgaccaggtccacagtgttggcttatcgatctacgtggcatttagctagcaaaagaaaaaaaaacttgtggggctcacgtgtcatgcaccaccactttctcccccaactgcttgactgcttgcgcacggtgctaaatctagagtgaagtttgaggaattggtgtgctcaatcagagttagggcatcgccagcgccatagaaaaggagtagcctcactagaattggaggagaaggcctagaaaccatattagttctgacgatcaaaacctatcaagatacaaaagtaaaacccgttaggaaaattgttccttatatgtcaatgtcatggaaattccatcaggactatctgcaaggatgggctgcagctcaagatctggacatagatcatgtccataggggctgcagctacagatcgatgcatggacgacctctaatccaccattaagagtaatccctacttagtggagggctacagaatataggagattcgagggaaaagacgattcgaaggaattgtaatatgggaaaggggaagaggaagaagctaaaggggatgagaagagaagctagcttggtgacaggttttgtgtccatccattttctcatgatgttataagctcgtcatggaaaattgaattttgctgataggaaactgtgtacatgtaaaattaatggttgttggggttagtccctttttttttgttaattttgttgtttgcaacgttatcattgctaaatttcaagaaaataattttccttgaaatccatctgattgacagaattaattaggagatgtggcttcttctcagccgtagaaaaaaatatatagtagagatttagctaaatctaccgcttcaactccactggatccaaacccattacggtcttacggagctcttctctctctactttcccccatactaaaaactaacttttgacaaacttgaaacaatttcttctgctaaattacttatccaatccaccaaccaattataccattatattctttgcattaaatatctataacaagatcttactcgaatatattttgctgaaaaaatatgtccgttgtttcatcagttgaaaaaaaattatttcagatcactacataattaagagagaagtaacatataaagtatacttactgtaacatcagcaccattgtttctaacattgaatctcaattggtgaaacatatgaaaaaataatacaaataatacaatatatttgcaaaaatgtaatattgttgaaacattttttatcacataaaaactttaaattgtaactgttgaaacattatattcaacattataaaatacctgatgaaacattcaaaagaacaccacgtgaaatatttgcgaattaagtagtgaaacatcatatgaatacttgttgaaacattaaataactcctct

SEQ ID NO: 18340 - DNA, 2245 bp, Oryza sativa
gtcgcctcccatatacaaccctctaaagctggcgaactcccccctcttcccccttcccctcccaccctatcccaacctgagaccctaactcgtagggtcctctgcgggagtctacggtgttaccggcaccggagaagaaaagcagatcatcgaagttggagaagacctggagcacgaatcatgaaactcatccggtggtataagatctgcaagatttgaagatggttttatgtgggcagaagattagctattcccttttttattcctaagattacatatggattcgtgcctaaaaacaacaactttatcctttccctttcttcttctcatcctgcgatctagacgcgtgaatgagtttagctggaccctgagattattgtcttaagaataactgttcacatgttaactttatgtttactttatacttagactagaaaaaatacccatgcattgcaacggatgaaggctattgtaatcgtattattgttagatattttatatgggatttttattttgatagtattgatatctaattcggaatccttattgagatgacgatcatatcttgtacattgctttcttatggcctggcgagaattctgaagtaattaggagtccgactattaaaataagttagcatgtgagatttttaagatgatttcttatacgactccttatgtatttttcaaaagcgaacgaacttaaaaactgactcaaatacggatgatgtaccaaagtaagtatcagtggaaacatctttaatttttataatagtagaaatagagataccaataccaaaagtgaaaaggaggcaaaaagaaaggagattggaaggagagggtaaggattagaacgaccgagagaaaagaaaaggagaaaaagaaaatagagcaaaaaaatgtcgggagaggcacgtgcgctttgagtggagacgcgcacgatggtgtgagccgattaggttgggttgggttgggagggaggtgtataatagttattttaaactcatgtcgaattgggtacgggagacgtaaaaccaactaaaaaccactcaaacacataccaaaatttcagcgaaaatattttttatttttataatagtagagatacaaacatttaaatcctaatcgaaatcttaatacgaatcataatcaaatgcataaactttcggtgggttaaattaacagaaaactaaaagtgtgtggtgaaaataaaaggagcacgacgagcgtgttacaaataaaatccgaaaatccttctatccaggcgaccgatcgagtaagaaaaaatcgggtgcttctcctctctctctctctcatctctgacgcgcctcctctccccgtgctctctctcgcccctcctctctctctctggtggagcggcggcagccaacagaggcctctcctcaccggcggtggtggcggcagcggtggaggggttaggcggcagcttccgtctggcttcgtccccccgcacggcgtccatctgttgcagctggctccggaggcaatagccacctcatcgctggccactctagggtttcgaggaggctgtttccgcttcgatttcgccctgcgtgtgacgcccctctggtgcagtcgacggcgaaggcagtggcggcaccggcaaaccgaggagacttcgcgcagcgtcgacgacggcgaccgagctccgtgcggcgtcgacgacggcggatacgcaaatgtggccgagctccgtggtgtcgacaacagtggctatgtagatgtggtggagctcggcgcggcgtcgatgcggatgtggttgctaatcaccagagtggaggaagaggtagatctaggttttcctcttaatttttttaatgtttcagtccatgtaccgtgatgtttcatcggttagatttgaaacgttgtagtgggttttcgatggtgtttcatccttttcttggatatacttggattcttttcatattttagtacattcggaaccgttgttttatacgttgtagtaaaatgtttcattgtgtgatttgattgtgtttcaccattttcagcactaaacattttcaattcgatggagtttcattcttttcctcaatgtactcggatttgtttcatgttttaatatattcgaaactgttgtttcatacgttgtagcaaaatgtttcatgatgtgatttgattatgtttcagctttttaaaagattgaaacattttttatctacttggtaaaatattttcgatctacttagtgaaatagtacccgattt

SEQ ID NO: 18341 - DNA, 2900 bp, Oryza sativa
ggagttgtcagcacgtcctcggccgtcacgtggttcacccgaccccgaatgacatccttcccaccgttgttagagcggggaggcgcttggccttgctgacgcctcggctttgggcatttatccgcaaagtgcccgggctcgaagcagttgaagcacagacgctgtggaccttgagcgtccctgcggccttgaccaggctgcacagttggcgtaggaggacggggcgcacgagtcccttgttgattctgctgctgctgcggctgtgggacgcgcaccacgaattgaggtcgaggcgcggagcgaggttgctgctgctgttgttgctgctgcgaggaggatccccctggatagggattggtgtagcggaccctttggttagcaccctgttgattgcggaaattcgccaagcggcgcttgtgcgactccagttccttgtgcttggcttccaagcggatgctcttgtctaccagacgttggaaatccggatagtccccggagactagacggacggacagctcagggtccattcctgccaagaacttctcttgcttctcctcatcttcccgcacatcctccggggcgtaacgggccaggttgttgaactcatgcaaatactccgtcacggagcggttgccttgcttcaactcccggaattcccttttcttaagggccatgactccggcgggcacatgggttctccggaaagcggcggtgaaacgggcccaagtaataggttgcccctcgggctgcgtagcctggaaatggtcccaccatagagatgcgggcccctgcagctggtgggcggcgaagatgactttctcctcatcgctgcactgcacagtgtctagctttttccccacggcatgcaaccaatccaatgcatccacggggttgttggagctagagaaggtaggtgggcggatgcggaggaactcggcgagtttagagtgttggggaggtggtggtggagcattatgttgtggcggattttggaggtggtggaggaaagcagtcatcatgttggcctgctgggcgaggatttgggtgagaatggcgttggtgtctggtggtggtggtggaggcggaggaggaggtggaggtgggctgccctggttgtggtggttgctgccttcaggttggttgccatcaccggtggcagcacttctcctggtcgtcaccatctgaaaaccccacacagaaccagcaaacagagagagctgacaattaaagctaaccatccacgactaccataattcttgaatttattactgctattaaattggttcattaaagttcaagttgcttaggcaaataaaataaagacaggctccgacacagttataccacacaccggcataaccatgccccacacgactccaacaagaagacaaacgagaaagaacacacgcgcaagcctactaactgctcgtctaccgctgcgacgggccaggacggaaggtgagcaatagcgcatcctccgtgctaccaacgccggaggcttcctcctcctggggaaccatgggcgcgggctcggcacgaggggtctcgacgaagcaagtccacgccagggactgacgaaaaagctcgggcctagaggtgctcttgcgggcggtgatcttctggctgcggcagacgcggcgacgcttggggcggcagacctctccctgggcgatcttgagctgatgcagctgcgcctccaccgcgtctaggtccttcttgagctgcaggttctcttgacacagctccaggatcttcatgttgttctcgaccatcccagggtgcaccatctgatggaagtcgatacgagccgcgtcgtacgcctccaccatgcgcgccaggtgcatgatggtagcgtcatcctccgagctagcatcccggaaggtggcgtagtcgcgggctcctccacggcgagggtggtagcggtagggcgagtgctgcaactcgtccgggtagcgctggtgaagagtgccgatggcgaggagagcggcgctctggcaagcggcggggaaagaatctccacccgcggtgactgccagcgaagtccgctcgggagagccagcgaggatcactgcagtgacctcccaagcagcgtggggctctgcatcgtcaccctcctgctccggaagcggcctgccctggtagtccactccatgtggataccccaggacaacgcacatgccccgcagctccaagacgaaaccaatcatgtccaaaccacgacgggtgacgctgccggccatctaccaacaaaaacaaaaagaaaagcaacatttaaaaaggtcagattttggcgataaatgaagcagcaagacagagaaagactagagggttttcacaaataacagaggatttttatttcgaaaatactgctaaggcttgggatctacggctcgtcctagggtcaagggggttctgataccaacttgtcacgaccggaaataacccaacgggcgttccttacgtgcgtgcattaatccttgtcccaggaggcaaggtacaccaaaagttgatacaattcagagtttaacaagcggaagcgtaaatagttaatttattacatgggcagcgaaggcccagcacacacaaagataaacgagaaacagcggaagactagggcgacgaccacaggcacttgacggcaggcacgagctagacaccaaagccttcatcctccaggaactcctcttctgggtttgggaaaaattgagcaagactgagtacaaccaccgtactcaacaagacacacccacaagtgcagaataaatgcaagggagtacaaaggagttatactataaagggttagggttgcagtaaacagcatttaaagacattagttgctcagggctattttgcaaacacgattctagtactatacaatattatttatcaaggccgtgaac

SEQ ID NO: 18342 - DNA, 643 bp, Oryza sativa
tacgcggcgacgcgcgccccgggcgccatcccgcgcgccgtgccagtggcatacccgagcaagctcgcgttcgccaccaccgcgcccgccgccgtcgtcgccgtgtgcgtcccgtgcccatccctatcccgcgccgagacgaaccccttcctccccacgccgccccttgcaccaccaccaccaccgccgttcgccgcacggagcccgcgcgagaagctccgcgcgccgacgagcttcctcccgcacacgctcggcgagaaatcgacgcccgcctcacacacccccttccacctcgcgggaggcggcggcaggtcgccaccggcaaagctcggcgactcgggccaaacaccagtatcaagaaccccaatgaccacgtcatgcgtggcggcctcgaagccatggatggcaggctggtacgccggggagagcagccccaagaactccggggtgcgggtggtgtgcaggtcgaacacctcgtcgggcaccacctggagcacgccggggctggcccggagcagcggcaggtggtgcgggagcagcgccgccgcgaagccgtgcgcggcggcggagtaggagtagagcaggtgcctgtccgggtcgatggcgagcgactggaggtgcgccgcgtgccccgccgccggca

SEQ ID NO: 18343 - DNA, 2172 bp, Oryza sativa
ttccctataaaaggcagacattataacaaaaagaagatgtggataaagagaatatcataaatcatatgtcacctcacatcacataaataaaagaaaaggagaagaagaaaaaaaatattaatttaattcttttttgctctcttttaactcctctgaccagtgacccaccctcaccttcttcaagctccctcctctgaagcctcttcttcttcctctgattcctctctccttccatcagcttaaacctctctctctctctctctctgttgtgtcagtgtgtgtgcgtggcttcgaagagcaagaagctagagcttggcgagcgttgacaatggcggagcataaggcggcgaagagcaagtccaagtcaaagagcggcggccatggccatgacgcggcggcggcgtccaagaagtcgaaaggcggcaaggccaaggcgaacaacgccgcggcggcggcgccggcgacgtcgctggacgcgctgttcaggccgtgcggcgacgtgaaggggctccggttcggcgcccagctcgtcacccgcgcgctcaccgtgcgccgcgccgcgccgctcgagctcccgcacctcctccgcgtcgccgacgagaggcagcgggaggcgccgctggcgttcgcgccgacgacgacggcgtacatcccgaccaacttcgccatcctggcgcaccacgcgtggcacaccctcacgctgggcctcggcaccaggaactccaaggccgcggtgttcgtcttcgagtccgccgccatgaaggccgccgccgacgccgcgtggccgcaggtcgtcccgctcggcgacgccgggaggcgcctcatccgcgcggcgcccggcgcgccggagatggcgaggttcaagttccgcaagggctgcgtcaccttctacgtctacgccgcgcgcaccgccggcgcccgcggcttcgcccgcgccgacgagctcagggccgtcgtcgaggccgtcgccaagctcaaggacttcctggaccacaccgccatgctcgcgctgccggggcagaggagcatcgacgtcgccgccgccgccgacgccgcggcggcggcgccggtgggcgtcgtgcattaatgcattgatgcatttcggctgcttttgtgacgaactgtgaatagagcttttatttttctttttctttttcttttggtgtgtaataattaattaattgattgatttcttgatgtgagttttttggttgagatgttgagcaaattcctttgattatgccttgtcaattgctgcattggcatgagcagatgtcaagtaattatactagcttgtaataagctgataaatttagaagttttcaggtagaaaactggaaactgatctttgcatttttttttaaattttgactcctttttgtttagttttcatgctgtgatgacttgtgtatttgagctgtataattttgtcagagctctgttcttgaatctgatttactccctctggacggaggtagtattttgtattatgtgggaagccatggctcaagacacaaatttttgcaaatttatgtgcaatcatggctcagaagtgctcagctgattgtgcattatgaattgaatcttccaacagagatgctttaggtggggagagcatccatgttgaattgaaccgaactgaactgaactctctaattgcttcaagttgagctgtactttacagccatgagattctaattctacggtcactataaataattgctttaccaatgtgaattatgtgatttgcaaggttgaaaactcgaagtctgtcattcttgctgtcgattccagggcaacatttgtgtgaccatcatggatgaatgggagacctggacagctgcggggttgattccaatagagtgatctgtggttggggcggccctgtttaaggaggggttttagtagctttttctctgcttttctgctcctggagttctgttcctggggcgttaggaaataatgtacattctcgctttctttcttaatatactttggccggcaagttttgccagctcggcgaaaaaaagaaatacacagctcatctaaacaaaagctggagtccagcagtgagggccattgatgctttggaaacacagatccaagcatcaagaatgacaacctgtccatccaaaaggcagaggaaaaaagaacagatcaagaaccaaatca

SEQ ID NO: 18344 - DNA, 1706 bp, Oryza sativa
tggagtgcttcaggaacttctcagcgcagcggcggacgcaggattcctcttgcttgtcgagggtcttccggcggaaagtgtccacgcagtctgtgaagcatcgttccacgagggagttgtacattctcaaactgtgcgttgacaacccaaaaaagtcagcatctttcagttgtaatttgacaagtgaaaggcaaatcaaagagttgatcagaatttacacatcgagaatgattgaatgaatgacataactttcatgaacacgggagaaagcatcggtaagattgcacagtgatgaggtagctgattgaaaaagcatcaaagaacacatgaaacatactaaagaagattgttttactgagctattttattgtactctatcttcagaaccatcctgtttattgactccattggttttgcctatgtcatgcatggtgacaaaccagctaaaaagacaatattccaagttccaacctatgtggttagttatcatgtacatgaacttaatggaaccatcccatcaatagacttcaacatagatttcgcaagctctgcaacaacaacaaaacattgaaaaataacatctacatttacatttctggccacagcatacagaccatgaacagaacttagctatcagaagagacataggtgtagaactagccatcaaatgaatactgccaaaccagcccaaaataaagtgcttctactcgcagaatacacttggtcacaacagcaactaggcatcagtatataatactccatactttcctattagagattatgatcaccatggctaatttgagtaaatatgcaagtaaatgaaaagcatccttagctgatactacaatcagacgggcaaataccaaacccaagcaagaaaactgggaccgaacacacaaggatgcatctttcagccgcactacagtaataaccaacatacataatcctcactacaatcaatctctaaccgcacagctgaaaaattgtagaatcctaaaactaaatccccgtggattcggagtgtgtaagttcaccaagatcacacaaatctgtcagaattttccgcacgcacaacacaaacctcacctcgcaccgtatagtataatcgcgcgcacaagaaagtagccgcaaatcggccatcccgatcactcccatccatcgaggccgcaaaaaaaaactaaggaggcaccgccgaacgaatcccacatgcaagcagagcagccgcaatcgaaagaattcattcgttaattaacatgtagtgagggggcgcgggtggacctatcgcggatctggagctggtcgaccatggccgccatgcgcatcttgtcctcctccgggagaccgtcgaggtcgccgagcatgctcttgtccatcgccgccgccgccgccgggagaggaggaggaaggctagggttttggaggaagagaggagaggaagcgagatctaaaacctcgggaaattcctttttattttctttttattgatgtaatgggcttgttttaattgggccgggccacatgggcttcgaaattaagcccagtatgagaagtgtgaggcccatttgggatggaatcccacaagtttgtgtacaactcgaatgaattcttgcagataaaaaaaacgattctagtatatatttgttgacaaattttcttctaaaaattttgtcaaatgtaaatgtagtataattgtagcttacatttaa

SEQ ID NO: 18345 - DNA, 1088 bp, Oryza sativa
gcttatccgaataagttattatcaaataaaagactatttatgtgcaaatcttttatatacatattcttagcgactcaaaagcaaatgctttaaaataaagtacaataagaaaaccaaaaattcaaattcaaaattaagttctaaaatttaaactttggcttataggaataagcataagccaaataacgagacttcaaacacgagctcgaattgtcgtccagctttacttcaaatcgggcaagaaatgatgatggacggaatcagcagcttcgatcatcctttatttcagttggcatattctttttgaaagtaaaattgattcttatggattatttgtaacggtatcctgataatatgtacgagcatgtgtggagactaacttgaaatcatgctaacatgtctaaggaatcgtgccatgtaatacgaatagaatcggatgatctatgcaaaacgacgtacgtgatatccgcacgaactctgcaagtttcattcgcttgtgacggagcgtggggctcctcaccgggagaccgcgcaggcccccctttgccggttcggccgggggcgctgagtgagattcttcaccctcgatctatggaacgttcgcgagagagcaaatgcacaagacacgggcgatgtatacaggttcgggccgctgagaagcgtaataccctactcctgtgttctggtggatctgtgtgtgaaggagttacagagcaaatggagagcaagagagttcaagctctagaatccctctttttccttctcctctggttctttttctccctcgatctccccctcttccttctcctctagttctttttctctctcccccctctttttttctcttcttaggtgggcaaagtcctccttttatatctcaaggggataccacatgcactacttctatctactcttcttttgggtggggacccaccctatcttgaccaaatattcactcgcgcctccgcctggaagctaaatcaccgcttgtccttgagtgatgcccagcgccgtcactcgtcggacacaggggatcaccctgtcatttcttcattaatgggaggagatctgcaatggccgctgtctga

SEQ ID NO: 18346 - DNA, 1316 bp, Oryza sativa
atgagcagtcgatatcatttaacatcgtaccatttgtgatgatgggtaccaccttaccatgttcaagttgttctattatactcctatatactagattatgatgttttgtcccattctttatttccctgcctagcaggtaactcgttttattatgacctatattaaaactagaaaatggattttgtaacttatgttgttattttctcttgcttattactccctgatatgcttgtgcatgtaaaaaaataaacataagaccgtcgttggaatgaagaaagtttgctggaatttcacgagaattcaactatgccaaaaaattcctgtattccaaaggcgctttaaaaacaatcgtctggttcaattccactgaatcttattcgaattcgttgcagatagtgttgttgcgagaaattttgtttcaaagatcctacagaaccatttcatcgtgatgcgactcatttggcccatgcactatcccaacacaaaaccacagagtaaaaaaacttatttccattgcaatctactgctgctcaagatattcttttgtaaccattttggtttgcaatttggtggtccatttattattcaatagagctactagtaggaaacttggaatgatcaaaagagactcaaaagattacatatttctagagagaagtgaattccaacagttgtaaaaaggacacgagaagaagaagcaagaaagcgaggtgtccaactacgcatgcatgcagcgccaccgtccggcggctcaccggccgccgccggggccgccgccgccgccgccgttgatctctacgggcggccagcggcggcaggcggcgacctggtcgaggaacttggcgaggcgggcgtgcttggccgcccactgctccgccatcttctgctccttggcctccgcgtcgcggcggaggccggccatcttctcccggtactccgcctccacccgctccaccgcagctgcctgctcctccctcagcgccctcatcttcgcctcgaactcctccgtcgcctcccgccgccggcacgccctctccgtctccagctgcatctccaccctcttcatcctccacgccgcctccttcctgtgcgccgcccacgccctctgcccttcctccatctccctgcaacaatagatgcgagtcaagcgacgacacataaaagaggagatccaatcgatgatagtgggtcaaagaagacgaatgagatgaagaaatcccccatttaacgccgttaactttttaattatatgtttaaatatttgttttattaaaaatttttgtgaaatatgtaaaactatatgtagtatacatata

SEQ ID NO: 18347 - DNA, 1532 bp, Oryza sativa
tcaaatcagactttcctgtaggtatggactcaatggaatcaggctttggggtactgacagtaacttcacccagtaagctaccattgtcagtggaagcactatcctgctggctttcagtgttgctcccgcagcactcatcgccctgatggctctgcacattgctctcactgcaagtattattctgctgactgtctgtgttatgaggggagtcctcggtgatattagtggtaagtggagacctcggggactgatgatctgacactgattctgggagctcatcatgatcaaaagagaatggttccagcaagggtacatactttggtcgcgagaccggtggaaggaggaccatgtgtgtggcaggaccacttcctacagggactacacacattctgcagataccaggaagggaacgcatgaaatcactgagcttaggataaccaagcgtgccatgatcaagctgcattctgcaaatggctctgaaatcacccttcagggagctcaatgggtgcctatctccaagtcgttcggtagcatctgcaagaaatcctggcaaccacttcctgaatataaagaaccaagatggaagacacttctctggcaagggccggcgcttcctaatgtaatgttcctcctttagctcaccatccaacagatggtgagttacctttggaacctcctggctgtggtgcctgaatggagcaattttctggatttctgcaggcaaggatcctctagcaacagcatcctttacctccactctcttcccaagcatgtacacatgatgagtttcctttgcacttatcacatcctcttctcttttgaactttacaaaaccaaatcctcgagattgcacccgatcacccatccttatcccaatgactactgcttcctccacaggtccaaattcagcagtgaagaactcagtgaggtactctgccaggaagaacaaaacaaggtaagtgttagaacttagaaacacattagttctaactttattaagtacaagtagttcaggattctgaagtttaccagcgcccacagaaggtgggaggcccccaacaaaaattttccgagtgtagtcgtgcttcggccaatgattaggctaaaagaaaatcttataagaggcagaccatgtgaagaaaaagggaattggttaatataggcagagtatgtttgtttacccgaggcacaaacttggaaccttgcttgggagcacaatggttcttactcttgcccccttgggcagaaccattactagaccggaaatcccgatggcttgctgatgttttaagcccagtaaagctgccacattatcaaaataaatatattagtttgaaacgtaggatgagaagcaaaggttctagtatgcaaaagaatggaagatctaatataaatcatgcagtatgcaccggacatacctttcatttaaatcatcactgtcataatcaccaaaatcttccaggaactctttgcagctttccttattcgtcacacttttttttggatgtgagctacggttccctacaaacaga

SEQ ID NO: 18348 - DNA, 1654 bp, Oryza sativa
caatagagtagtagattgatttctttgtcctgacgccgtctagtgaggaacgctgactggtgccgatatcttctcttcagccaccagaagcagcattgccaacacagtaacacgaccttccatggcatatctgtaggccacctccccaacctctctggttttctctgccaggagcctcactgcattcagatcctacacatggaacaaggtgacatttttgtgtgagaagatctatggaccaattatgagacagtgaatgaacattagtagtactagtaaccatacaaaccttttcttgcagagatgacagaagatcttcaatggagttgtccagtgaccatttaacttgagctctggataagaacatcagtcagaaaaacagccattgcatggagagaacttgagaagtgagctcagtggtcaccatcaccttctgcttaagagagcgatctcgagcgcgacaagagggcggccatcgaccagcttgaggtcggtgcgcgcgttcttggagagcagcagctcgatgcaccgggccgagtgcgcctcggcggcgacctggagcggcgtccgcgtgagctggtccctggcgtccacgggcgacgccgtgatgccgtgccctccctcgaggaggagcctggcgcactgcacggcgtcgtgcttgcaggcgaggtggagcagcctcgtggacatctcctggtccagcatccgcgacgcgtcggagcccttccggagacggcccatcgcctccttcctgaagcttcccaccgccgcgagcagcagcgcggtgtcgtcctccgcgacggcgcgggacacggcggtctccttccccgtcgccgccgccgccgccttgtcctcgcgcgccgctgccttggcgcgatccatgctcccggtctcttcactcgcgccctgacaaaatcaaaccacaaaacgaactcttcaaacacagatgaacacaacgaacacataaataaatttcgctcaagtttgcatcaaccgaaaattcataggcacaaataaacgaatgcgacgagctgagtatcatctctgtgccgaaagaatcccagaagcgcgagccatcgccgcactgtacgctcaacattttcaaacaaaagcagcaagcggaagaagcaggagatgggactgaaactgcagacagatacacaagaatggaattccacgaatccatcagtcgcctcggcttttaagcaggcacgacaaggtgcaagaaaacaagcaggaaagggaccaaaatttgatgagcgccattgcaatttcctttcgcttccaaagacaaaagccctcgtaaaatcacggggaatcgaatcgaaagctcagagaatcacatgatgtcgcagacagaaacgaatgacacgtcgtgacgtgtgacaagacgcccgagattgaaacgaagctacggaagatggggaaacaccagcaaggaaggtttgctcgatacgaggaggaacttggaatctcgctcggattgcaaaaaaaaaaaacgtgggaaaaaacaaaacacacgtcgaatcgcaggctcgcagcaaaaaaaacaacgaaacagtatgaaaccacaaaaacttttcaaaaacgcgctgaaatttcgcacgcccgctgaaattggtcgaatcgtggcaccacaaataggtggaataca

SEQ ID NO: 18349 - DNA, 1312 bp, Oryza sativa
gaagggcgccgctcttcatattatggtatttttagcattagtcattatttgtgataaggcctttcaaaatgcatatctataaatctatgccttttttaactgtactgaggaaatatgctctcgtcttatcacaacaaaattccttcagtttttctcgagtttcttctgaaaagttctgtttgctaattcctttagttgccacaccaaaattactgataggctttattgtttcatacagggaggtctcgttcccgttctcgctctccccactatcgaggtcgtccacggtcaaggtagatgaataatgtccatatatcaatcctcaagccattcaccttgtactcatgaatccggtcgcttttaaaaggtcatactctcctgctccaagacggcgagatgactactcagcttccccaccgagaaaggatacgcaccccacaaaatctcctaggcgtcagccaaaagaacatgatgaagagaagaagcggagatcctactctcctgccagtagagatggcgaccctcgcgatgctgataacggttatgagaagtaagcatagtatttcatacttccatcactttttccttaaatgcaatatttgttttcattattgcaatagggccatttacacaccaatctggtgttttacgagtagtaaccttctgtagacttgtaaagtatgatgaatatgaaaggatgtgggccttagggtcacttgaactatgggcagcattttaatctttgctgcatactcacgacagattttgttagtcttattctgtattaattaacaggaatacatagagtgaaagtgctaactatggtttatgttcttcacaggaggtcgcccccacctgacagcgatggatcccctccacaccggaggtctcctaggcactcctcagggtcgcctccaggatcccgctctaggtccgccgatgtttcccctgcccgcagcgactgacagaactttgaaccaacgaaatgggatagctgcatgatctccacagcacctccaattctagtcagtctccatcttccttcctggtccaaccaagctgtttcaattaaaccgaagccctaagcggcgtgttgtattattgctaagtgtgcttgccatgagtttggtatggcacatcgcctgtttgtgtgctcatatgttgggagtccaggatgttgtagtcttttgagagctgctttgtttggtggtcatttgctttttgctgaacattaacttgaaacaatgtgacattggtgttgtgtactaccactagtgagccttgaactgggtaaccgcctatttccacatct

SEQ ID NO: 18350 - DNA, 2027 bp, Oryza sativa
caaacgcagattggcgcacaaattgctatgagtattgtaagatgtatttgatttttcgcttcaaaacttgtgcttacagactaacttttaaaattttacagatcctgatggccgcattaaaagatgtcgaggaccaactaaattggcaaatattgaaaatcttccagagggtgttaagattattgtcagagtggatcgtttcaatataccttgctcccaatctgctatagttcatggatcctagttaggaacacttgtcaggaagccacatctagctccactgaacattcttcaatggaatcataaactttataagagagcatatcatccaaaaatgatttctgaagtagaggtattgctctttaattttcacagctttttaaatcatattcttatggtgattccaatataattccattcactctttatttttcatatgcactagagaaagcttgcaattgatagaagagctaataattggattctccactagttagatggcaaatggaggcagtacaagtcaaaactgaaaaggggctattacaagcctaacttacctatggaacgagtattgcaaaccgtgcccaaaattgttgctaaatctcaatgggccaccctagtttcttactggtacttagaggactctaaggtaaatatatgttgggactttttagtgactgaatgaccatcattttgatttatatcagctcattgatgctatatgttgtatcattagaaaatcagtgacaaaacaacgagaatgcacagaatattaagcatccacacatattaggaagaaagagttttgcaataaagaggaaagagctggtaagattttaagcaattttcatatattaattcactattgcttcaatttcgcccgcccttccaatgcaactaaagatgtataatctgcaggaagttaatggagtggaggtggactgagcaaccttctttgatgaatgccataagacgaaagatggcagatatgttaacgatgctactgaagaagaaatggtatgccatattgcttttcttatataaactctttgtaaaacaaaatacactacattaagagtctacaatcttttccaacgtagaatgaagtatatatgaaattggctgagaaaagagtggattgccaagaactcagtgaagctgattttgaacaagctatgttagaagtgcttggaaaggatcataggggtagagttagaggcatgggtccaaccattactccaacaaactattatggtagaagatttttgaatatatcaggaagcaatgaagggaatggctccagtaatgtaaatggtttcattagttttatagtatcatatttgactgagaaatatccagaggataatttgatttctaggttgccaccatcagttgctagggtcattccaagacaagaggtatggccacaaaattactaattttaaatgttgtaacttatatagccataagcttccagaataacaaattcatgcatgtatcttcaggttgatcagaatgaaggaagtcagccaccaaatactgctacatcctctcttccatttgatcagaaccatgaaaatcagctaccaaatactactccatcctctagtgctagagcatcatctcagtcttgcagtgaagaagagtgatttacaatggcaattgtaccattccgtactacttgctgcattagaatataattattttttgtgttaatttgtttgaacctattgtttcattgttatatcagaaaagatgttgaagtattttcattgtgaacaatgtatagatattgcttttgattttaatgacaagctactggcgttaaaagtcttgttaatgtggtctgatggtaattcaatctgttggtattgttttgtttatgggttttctgaatgaaagatgtattgattgttggcatgtggccaatagcggggttataaataataagtgtagatacaggcacaaccgtgtctatagaagcagaaattgtctctaggaaagaaataagtaataaattcattatg

SEQ ID NO: 18351 - DNA, 9243 bp, Oryza sativa
gcgattttcttgagccaatcctgacgggtgctatcatggcagacattgatcaattcaataacatggtccataaagaagaacaccagcccaactgttggtattttgcaagtacaaaggttggtggtagttttgtagaagggctcaaggtacgagtgcaatgagttgacggctgacttctctgtggaactcagaacccagtcccttggtccaaataccccttcaaacttcttgatggtgttatccattgcattaggggcctggatgaaaaaggttttgttttcatttaaatgggcattaaagacatagagcatgatggaaaatgaattatacgaagtatgagctgtatggtaccttctttaccacatcaagcatattgtaatcaccactccagtttgatgaatggtcaaatggaagtttccatgagccttcttgataaacttcagtccagtgcataaaatcttccatcatgtcctggtttgaattggtctcaagaacaaattcacggatcttggacaatactggcctcacattttccaggccatcttttatgataatcttgagcatccgagcagcacaggggatgtaacagaaaggaagtttacgggactcaagctcctgcctgagctcatgacaagcatggattgcatgttggctgttgttatgtgtgcaagcaaggatctttgaatcaatgttaaactcgtgcagcacattcattagaacttgcagaatctcagggccagtgcatgggtatgggatacggcggacatcaagcaaaactttccgcaaggcccagccttcatcaatccagtaacacttgacggacaagtacacaatctgttcataagaagtccaaaagtcaagagtaatggagaaccgagagctaacgcactgaagagatgccttaacatcctccttcatgcttctgaacacttgaaggacaatttcatgagccttttcttttggccatagctggacaggcgggttcaaatacctgcaactgtcgataagcatactatcttcgagggtggaagttggaagggaggagctgataagccacctcagaagtaaccagttgacatggtcaatatcaattgctggtttcgctttaggttgatgacgaactttagatacagtttgaggttgaggttgatgttgaacttgggattgaggttgaacttgggactgagattgagcttgtgatcgagttcgcgctaggggttgagatcttttggctcgagaaaccatgctggtaggcgttgtactttgagttgcttcaccctcagaaagttggcagtaaccagggtggcggttattaagatgcttcccaagattccctgcacacaacaatgtagcatattactgaatgtggtgttcagacttgacagttggaaagggtgaaaataaggcaactaatactgacattatctactgactgaaactgaactagagttgtgggcatatgtcagaaagaaagattgaatcttcttggagacagaatttgcaaaacgcccttcattgttacagtaaagtgcttgtattgtattgtattgcagagtataataaagtaaaatcgtttcaattggattggatgggcgttaagagtaacagatgtatatgtataccggtggcagtggtcatgcagtagctcttcttgcagagcttgcagacgcgggacttgccatcgggggcagtatcgaagaactggaggtagagggacttcatggtcttcttcttgggcttggctcctgggcaggggcagaggaggtggccgccatcccggacagcgcgtcgtcagggtctacgctgggcaagagagtcatatcagtgagagttgcgttccccatatcgatcctctctgtggcgttgcaagttacagtagagagtgtcagcaagaattgaaacaaacatacttgtgcaaatccaatctgatgatggtgcaaatcttttgacaaggtggtgtgttgatttagcagagagatcagtgtgagcatgtgattcgcgtattgattgattgtttggttctttctactactcctaattgcggtgcagatcggagaaagcagcagcgggtgtggggtgtaccttggggagcgagccgaaggagtcgccggagagccgagccgcggcgagagctgacgcagcgcagactgcacgtgcccaccgccacaggcagcacaggggggagcgagccgcggcgccggcgccgatgggagattgggatccagccagccagccagcgagctagggtttggttttctccctgaatcggagcggctcacccagccggctcgtctctgccttactactccttccactactggttttggttgggttgggccgagtcgagtcgcttttacctttggacggctcggctaattcaagaccattttccttttttctgatttctcttaataaatactccttagtatcttttttgtgattaaagatgccaaaatactgttcgcgcataggaagagtaatactgtacatgttttgtgatgaatcttttgcaaacaaaaaaaactaaggactcctccgtttcgattatggacggaacaagcgaaacgacatatttgtaaatagaaaataatttgtaaataaaatttatatatatatatatatatgttctagcaatctaaaagtaaatgctgaaaaataaactacgatgaaaaaacctcaaaatcaactccaaatttaaaattgaaaattcaaattttgacttataagtataaccataagccaaaagatgaggctataagcttaattggccaatatccattttaatctcatcaactgaggttactgaattcttaacactactgtgctagacaagaaacaggtcaggaatacaagtgtaaaactttgacaaagtaaaacaaaaatcatttactactacatgtgttccttggtgtctgtcaatccaacaacatagatcatctctgtacaagtacaaccaaatggcacaaatccaggtgagaaaccgtgcccctccctgcttcacttgatgttcatgtcttcttgtgagtgtgtttgtgtcgcacaaattttgacaatttaaccctttgtaaaaactaattttacaaatgaaccgctgccaaaacttatttcaaatctgacctttttgctcaacgctaaatcatgtggcgcggaacttagacacctcagcgccacgtcagctggcgctgaatgccgtgccacggcggatgggagactaagtcagcgtgccaacgtacattcagcgccatactatttggcgctgaggtgtctaaattcagcgccacacgatttggcgttaagcaaaagggtcagatttgaaataagttttggtagctgttcatttgtaaaaatattttttgcaaagggttaaattgtcaaaatttgtgtttgtgtcgtgtgtatatgtacccagacagctagccagctcaatctgtcagttgctcctttggtaaaacaaattcatcggattgatccaatcagtgagctcctaactcgcactgcagcctgcatcatcacaaattaatttgtgatgcatggtgacttcattttctcttctttgcctttgatctttttctccatagcacgcccagcggaagggtgaacattgggaaggggattttaggcggtggtacgctgcaaaatggggaaaaaaaaggatttgatcttccatcggcagcaatatgtaagaagtgtaaagagtactatgcaggtaatggcagagttcaactgaaccattttgggcgtgttttgttgctcgcatccccctagtattaactactccatccttttgggtaaactagagtctgaattcatttttttctgaaagggtgaagctttagctgcaggatttcgccttctgaaaaccgttcctccctgagctgaaaatggtgaggaggatttgtttcttctatctaactattctagttgtatctcagataattgggagttgattaggtgattgctgattgagaagagaattaacaggtggtagtacaggatagtacttactgcaaattgatggtctcgatttgggtgagctcggcgttgaaggaaccgtcccgtgccgtggcgtgctgcctgatgccaagaaccctgcacccaaccctcctcattcgctcgtacgggttcgtcgacctgacgcaaaagcaaaatttcaattcagttcagttcaagttcagtatatctcaagagaattcagttgagttgagttgagttgagttgaggaatcattttgatgttacagttagagttagagtagaggtacctgtagaggaagctcttgtcgtggaggccgacgacgagcgtggtggcggcgagctggttcaccgtcgccaccaccgtctccccgacctccccctcccgaaccactatctccaccttcgcctgcataccatttcacaattcaacaagatgattaattgcttctttctttctttgttttgagttgacccaactaccaccattgattgattgattggttgattggtttacctccgcgatgccgttgcagagctccctgaaggcgagggcgagctggaagccgccgaggcgtaggctgcgccgcctccgccgcgacctcgccggcgggcagacgtgcagcagcgtgatgcagtcgccggcgcggatgaagttgcgcacggcccactgcagcgccgcgcgggcggcgcccacgtcctccaccaccaccaccaccctctggctctccattactttctctgtcacacaaacacacgctacctacctctatcctctagcctgagattatccatccatccatccatgaaagcatcatcaagaagaactcgccatgaaagctagctcctcaagaagcctctcttcttgaaagagacccggtgaagtgtgtggaaacacaaacaagagtagtagatgacaacagaacggactaatactagcagtggcacagtgctaattagtactggtacgtagttaacttaagtgtgtgatgtgctaagctactgtgcgtgtgtggtgatgagtagctgagctagatacaatggtgactgatggaggattagagtagtagagaatcatcagctgtagatggaggactaaaacaaatgatgaggtggccatgccatgacacagacacatttgacatgggaccatatacctgaggaggaagaagaggaaatttaagggtcccctactgtttctctcaacatgatactcctcctctctcatcctaaccactacttctacaattcaattgaaattgattggatccctagataatatactagtttaacttccgtctatgtcatgactcgaaccatacatgtatatatggcttggctgctggtttttgcttgccattagcaacaacatctagctccatgcgtgcatacaacatggctcttgtttttgtatggttttgtcacgcaatttggaggttaggagtggattagttcattggtttagggaatcttgttaacccgtcttaacaaatttcctatcaatacaaatcgatggactgcgacgtgtcctacctgctgcctatgtatgcgcattagtttagtttagagaggacaatgtttagagattgtgattgtgagacgatcaaacgagaccgggtgcagacccctctaatttcgtgtctggttctattttttatctctttttttattgctggattggatgggtttacaactggaagaacttatgtcgtcgtcgtcttagctagtgtagcagttgatcgattaattaggtgtaaccgcttaaaaaacgtccggtgatggcagcggattatatatgtcatgctagtgcttacggatcagtaattattagtggcatctttttttttgtttgttagctaccctatgctttacatctaaatatactgttgtgatgtatacccattaacactgattgagaagctaattaagcagctgctgttgtttgaaagaaataattattacagtattaagctgtgttcagaagcaaagcagtgcttcctcacgaaacacgaagcagcaaacacacgacgcatacaaggctacagcactagatatgtcggaggtaggaacaaaagggccatatgcaatataatgcagcttttgcctaagcttgttcatagttttggttgcaagtgttgtcttctctccttggcttggcacgcgactgaactggagtagtatttttctttcctggggcaccgtctgcatcatctatagcttccttgtgtacaagaaaataatgctgctcgtttggtgcagcagtatcgccgtgtttagttctaaaatttttctttaaactttcaactttttcatcgtatcaaaactttcctatacacacaaacttttaacttttccgtcacatcgttccaatttcaaccaaactttcaattttagcatgaactaaacacagtctataacatcatgtgaagtttggtctaccttttgaaagcagcactgaaaagggagaatcgccattgtgcactgcgtgctttctcgtgcctaatgtgttgatgcacgtgtgcctgttgccatggtattggccggtatgcaaagtcaagccataggcaaactgaaccacacaccaaggaaaagaagaaaaaaaaaggatacacttgaaaaacggataagccaccgacggacggagtgcaaccccacagccacaccggcggccgaccaggctcactgtttgtacttcactgtgctctcaagtctcaacacaaaagaaaccgccacactggtacctataccacccaccagtttgcagttttgcacaactctgcattctgtctctgttcagcaaaatcaaacaagagcggatcgcaagaacaataggcataaaaaccgttgttcaaattcaacagtccatattaatatgataaacttgatgattaagcacttcaaattcaaagtcaaagcaatctctttagcatataaaggtacaaaaacaaacaacacagctaagtctagaaaagagacaaaagagtcaccgagtgagttaagcccagcatggtgtaccaggaatgagatccgcctatacaaactaaatcccactcgcatggtaacaccctaaagagtaagaggcacactttgcacctactatatatgatgatagagcatcagctgcccccatctactgacaactctaggggtataaaccaccggacatcaaacctatacggcccctgccaacacaaggggcacgctaagttccatttatttggacaacagtaagagctggtgcatcatggtgaaggatacagcaccagccggtatgactgacagtacatatctgctatcatcatcagccccttcagtaggaaccacggtgagggtaagaattaccctgcccaccccttgctcccatgcttccataccctctgccaccgtagtatgacccacgggcgcgaccgccgccacggtaaccacgccccccaccacgatagggctggcgatgccttgggaaatcaccaaaagtctgcacaaaacaacaatcagcaaaacagtgatggtacaacatcaagaaagcaggtggaccttgtacctctgtatctagtttgcgctgttcggaaaatcttgacctcccgttttgccctccacgtccaaatgttccactagtgagggaatcaaaaaagtcatccttgacataaacaggctgcattgaggttgaaagacatgttttagttattgctgaaacaaacaaaaccaaatctatgtccaacaaaatgttatcattaaaccttagcagctagctcaggattttctgtttcctcatcctccaggtcttcatcaaacacatcatcgcccagctcaccatctttgtcccttgaatgggatttcttaccaagatgaccccagacttcatctttgttaaacttctcattcatggccatgaaatcaaattcttcagtaaaatttgttactgactgcgaaaactgcaaaacaacagactcaaaagtattaatacttcaatcaataccagatgctctttaataagcagcatcataatcatataaaaacatgaaacatgatcaagatattcccttacaaggaaacaacatgaatcattccaaggtttgtggagtgtcattttcttaagggcatcttcggctaagtttaaaattaatttggttgctctataaactgcagagcctcaaacacatgtgccttagacttttactcaaatcactaaaccaaagagagaggcattatggcattgccttgagttcagcaaaaaatattcaatattcctccattccaacggaggcctcaagtccaagcctttggaaaaataggaaccatagatttagatgcatcatgttttcagttccttcacaagtttgtagatgctagcatgacacacattgttacagccaacagttttttgaaggtattgcataaaaagatgtgtgcttggagttctttttacaagttttaccaggtcatctttaaaaaggaaaatagtttgatttcacaataaaatagttttagttatttaagtgttgtctgtgggggaggaatagaatctgttaaagatagaattactattataattaaatgcgtagcatacaatagcaaggggagctgcaaacaccagggataacaaaaattgtaagacaatagttaaagacctacaaataagagcacaaaagttaaagagatactcaaaaggtataaagtgtcactcataccgcgctgcctctacctcttccacggcccctgtagtggtgattgctgtgtgaaccagctccattgtactgaaaaagaaaacagagaaataacatactgaagggcatgcgtactaactacaaacaaaggaacactgaaggatacaagagataatcaagacatttactactagcacatttgtgatgttaatatgacaaaatggtgttccaaaatcaagcttgacacaagaaaagatgtaaaggatagcaagtgaactttcagtacggatacagaaattatacgattaggaaggcgtatccaagttttcaagatcagggtagatattgcctacttttctttcagaaggaaaattttcacctcaccttgacccatagatcataatttcaaaattgatccgtgctattataaactcgacgaggatatgcactgaaatactatgtatcactaatttatgtttgagcatatgtttgcagacgagtaatgactggttccttgtcttagaagtagaagaaaagaactaagaccagcatgttgattttatcaagccaaaatagggaagctcagctcactaactcaaaagggcact

SEQ ID NO: 18352 - DNA, 1432 bp, Oryza sativa
tggttatacacataatgagcaggattagaaaaaaaaaaggaaaatattttcttgtaaagcacaacacgggtgtagaaatgctgatgtaccttttgaggtgtttgtttcggcaatggcaatataggctcattattttcaggaagagcacgtgacggtggatcaggtagcaatggttctacaaccctagtttttgattcaactgccttgaaatctttgctgctcatctgtaaaggtgtctgcatggactgagatgatgaaagcatcgatggagcattctgcagtagttgacctgatgatgccaacaaaggtacgggcatatccatatgggctgagctagatgaagcaacagtcgaagaaactgcctgtgacactgattggtatgccaatgttgaacctggaatatccgcagtcttattgctcacaagcgaactaaaattatgtggggccattgcactactttcagcaatggatgttggcaggctagctaaaggaagggtggcgcccacagatggaactggaggagtaaacaaaggacccatgttcggcagaaggggctttgaagtttctggagatagtaagttagcagaagaaggtgctgttgtagtgggcaggatacctgaggaagggccttgggtagtaccaggtggttgcagcaaggggggctgcagttctgacagtttttgtggccctgacgatagagtgggattcaatcctgcatattggagaccctggggaactgataatcctggctggagcaaaggaggttgctgcaaatgaggtggaagcccaccaggtggataatatccctgccaatacattgggggaactgaaaggcctgatgcatttccagcagaaggtggagcagaggatccccatggaacactcccaggttgatatagaggaatattgctctgaaaacttggcctctgaagcccatattgagctgcctgggagctgaggtctggcaatactgcacttccagcagaaggcaaacttgaagaagccgatgctggctgagagtagtgcgactgcagaacagaattgcatgagttgtgcggctctaagaagtatttttcaatgtttttgtttcattgcggtacctgtattatggcaggatcattgtgcggggcagctggttgtggtggtggcggtggaggtggtgatgacttaacttgcaaatcctggagaaacaaataaattggccttaggtagagatatggtgcaaaagcatgttaaatcaaatagatagaagatagtgaaaaggacattttacaggaaacatgtccttgaatctagatacaaattggatatatgcaaccgcgaaactgaccaaacaaaaacacttcacagactggttaatgctaccatagcctaatatgatgttactatcagctaacttaacattttgacgcagtaaacagatggcataaat

SEQ ID NO: 18353 - DNA, 20545 bp, Oryza sativa
  unsure (1)..(20545): unsure at all n locations
tggtgctagcaggaatttgcactccatctttcttgcgcccttcggttccaaatgatcgaactagagaacaacaaatggacagacaggtgtaaaacaaacattgggatgaacaaagcgtctaacagtgctggaagtaaagcaaagcgtagtcaacacttgagttgtacggatacgagaataagcatcaggtggcttaaaaaatcttttaagaaaaactagtcgcgaaggtcaacattgttgcatcccagaaatttcaaattgaataacacgtagctaggttgggggctgagattcacctcacgggggaaccaaatctagcgctgaatcaagcgaatctgaggaaatgagagggggagcgggcgcggggggcgggatggaattaataccattgcgnnnnnnnnnnnnnnnnnnnncggtgttgatgttgtagaggatgccctcgtacctgatctcgctcttggatgtcaaactgatgaggctcccgatgtacgagtccggcgaggccgccgccccgccgccgctggagccggccgcggcggggggccccgcggaggaggaggtcgacgacgacggtggggcttccgccgccatggccgccgcgggcgcgggtgtgggcgagggccgggagctagggttagggatgcgatgcgatgcgaaagagggagaaacgaaaccctaagcggctgatccgtttgggatgtgcgctttggtttggatggtgttttagcctattaaacgggtcgtttgggttagtttgggaattggacaggacgtggcttccatcggaggcccatatgttgccgttttcttgctaccaatgcaagaagatgcctgatcaaatttacctctacttcgatttagtttagtcccttttaaatggcttagactttagagagcccaaattacaaaacaacgaatgaatagtttgctttttcatgatttaatggtaggccacaatgaaaaataatgcccccaactgataacctctctaaaactctatctgacagcttcccatgtagccaatattttttttctcaatcatttcttatcattattattattgttgttgttgttcgttatgatagtgatataaataataattactatttgttgccttcttttccttgatcctttatttgatatttgtttagatatataattgtgcaattactcgtgtttttaaattaaaatattaggttgaaacgtgcaagcccttataaatgtcatgtcttattcaatggactatctttttttccctgattacacggtaggtacacatacaacaccgccctcacgcactccgctaatgtgtcctctaacatatagaagagacagaaaccaataatacatggttgagtttactaaagttgtattgaaagctcgttctactgcctatcttttatgttgttatccttgcacattaaaatttcggaggatcaaccgtcgtgtgtccaaacttcctaggcagttttatcccacttcgattctccaaccaggatgaaatatatgtgcgcactcaaaacgagatagtaagtcattagcatatgattaattaaaattttatcatttagaacttgaaaaatgaatttatttgatttctcatagcaacttctatataaaaactgttcgtacaaaataaatcgtttggcagtttggttcattcagccattatgtttagcagtagattgattatcttgtcaagttgcagaaaatcccaggtacgtcgtcctacgtagcaagcagatggattatcttatccaatccagccacgcctcgtcactcgccacccacactgcgcaagcgcaacgcatatgccaaatcgccatccttgcgatgtgatgcgatgcgatgcagctctcacctctcgtctcgccagcaatgtcgcaccagattctccacacctccaaccccacgctgccgacgccacctcagccgcacaaccaccacccgccggtgccgccaccgcccaagctcggtcgccgcgctgcgctcgccatcgcggccgctccggccatcctcagcgccacacccgcaccatccagagcgcaggaagcagcagccgccgccgcggcgccctgcatcgccgacctgcccgtcaccgccaaggccttcctggacgtgtccatcggcggcgagccggcgggccgcatcaccatcggcctcttcggcgacgcggcccccgccggcgcgtcgcgcttcctgtcgctcgtcacgggcgtcggctaccggcgcaaggagttcgtcaagatcgtgccgggctacgtgcagcacggcggcgtggtgtcgtacccggccatcccggcggtgaccgagcggctggcggcggagatgggcgccgtgcgggcgcaatgcggcggggagaggagcccgcacgcggcggcgggggcggtgtcgatcgtggtgagggacccgagcctgccgccgcccaagcccaagctggtggcgcgcggcgggaagctggaggtcgaccaggagcaggtgggcgtggtgcccaacggcaccgagttcgtcatcaccaccggcgacgcgccggagctggacgcgtcggcgctggtggtcgggagggtcgtggacggcatggacgtcctcggcaagatcgcagccgtgcccaccgtcaaggataacactgcctctccatacttcaggtcgatcactctcactccagctagctgcttgaactgcattttgttgcatcaatcaaactgaatagtacttgcatctcagctaattaagtctggattagactgaacatgtattaatatcactgtgattgtgcagagtagccaagttgatcggggacaagagagcagtggttgcagagcgagggttcaaccgcccatacaccaagatcctaatcaccaattgtggagtcattgaacagcagcaggagcagtagagtgctttgtttctgccttgcctttcatgtctctagtttgtgcaaagggtaattattattggaactctgtttgcaagaggattttgattactcatggactgatataggcgatggagaggattaaaaaggattgtgaagagatgagagtctttgtaaaacgcatgtcacactgtgcttacagaacaccaacttatgttattaaaaagagatggaggatatattgactaattatcacttggggggaatttaatgagaaggttgatgagatcacgggcgacgccgcatctgtctttcatcttctggtcgacgtcgaccatcaccgagctcaccttggcggcggcgaacgccgcgtcgcacgtgtcagcggcgccactcgccccggacaccaggcgcgacgcggcggcgtagtcgccggagccgaggctgtcgtgcgcgtcgatgtcgaggtcgttggcggcgtcgaagtaggcgccgctgcaggcgcgcagcgcttccccctccggcgcgccgccgccgtacctgctggacctgtcgttgatgagggccccggcgtcgctggctgcggcgacggcgaggtcgagcgcgacgccggcgaggtcggagacggtggaggcgtcggcgctgtccgggttggcggtgagcacggcgacgcacttggcgttgtgggttttgttgcaggtggtggcgatgaagccggcgtcggccatggccacggggacgatggtcgaaatggacagcacgacgacgagcaccatagtcgtcgtcgtcgtcgttgcgtaggtcgccactgccattgctacggcatcagtgtcacttccatggtgcagtgcatatatagtaagtaaggtcaagaatggtgatggcgcggtaattaatcccgttgattttgtagaacgcgatcaacctttccgtccgttgatgggaattggggaattccatttgtttgggccggaagtggattgtggcttacgtgcagcccatatgggaataagatcactttgactccctcgactgaccaccgaatctaaatcatatccctcaaccgcaataccagaaatctcgacccccggaacttgcaaaaccggtgcaatttgactccctcgccggttttgggaggtggtttcgctgacgtggcgcgtggcgcctatgtggcgatattgaccgagtcttcggtccacgtggcgttgacgcggcacttacgtggcagtagaattaaaaaatatgcgtaggacctattagtcattcacacaaaaagaaatgtgggcccactgacatatggggcccacatgtcagtcctcttcctcctccctctctcccttctctctctttctctccatctctccccttcttcccattcggccggtgggcgagagggcagcgagagcgagcggccagcccagctcaacctcggtgggtaggcgacggcgcaccgctggggtccaccgacgatcgcaacggcgcacggacgaggggagcggcggcggccattggggcgcagtggaaccagagcggcggcggccatcggagcttcttgggcgccgccagcaccgagttggcggcggtcaagcagtggagcgacgcggcgcacatgagcaggacgaccctcggccttctccagcggcctcctcatcaccccccgtgccagtcgcttcgtcactaacgacgaccccgcgagccgtcagagaccacgccggtaaccgcgaggacggggatgacgagcggcggcaagtcgccgctgccgttcccctcgtcctcccactaccgcgagccaccgccgtcctagccgccgattgcctcccccgatccggttccgatgccgttagccgccctcttgcccgtcggccgaaggggaagaaggggaaagaaagagagagaagggagatagagaggaggaagaggactgacatgtgggccccacatgtcagtgggcccacatttctttttgtgtgaatgactaatgggtccacgcatattttttaattctactaccacgtaagtgccacgtcaacgccacgtggaccgaagactcggtcaatatcgccacataggcgccacgtggcgccacgtcagcgaaactacctcccaaaaccggtgagggagtcaaattgcaccggttttgcaagtttggggggtcgagatttctggcggttgagggatacaatttagattcggtggtcagttgagggagtcaaagtgatcttattccgcccatatgagttccgtaatctgcattggcaatccgggccctaaggccgacttatatgggccgcccggtgaagaaaaagcggaggaattagggattgtgatcagagtccacattggatcccttttaatggtagaactccggggcggcggcgacgcggatggctgccgttggttgtcaacgacagcggcggcatctgcagctactcctagctagcagatgattaaaaaggtaattatgcttggtattgtgatcatcaattgtactcatgtgggggatcgatggccatggctatgatctatacttactattctagatgggttggttggaaccatgtcaccctaattttgtaaaatttaagactagatatattggaccgcacgaccatttcatctcttctcatccatcgccagcccagctgcatctacaaatcgctagacgccatacacactccctgtatatactagtatcttttttgcattgacatctgataaatcgccagctatttgcacttattgattaataattaatttgtcctttccttcccaatccaaaacggcatcatccacgtagtacatactcctacacggtacgcccagatgatgaagatccatatatacccaacaatacctacctagtgccatcgatcggtcaatccttccttgttatcctactagatgatctgtagtagtagtagcagttcacttaattacgctgaatgtgaatgtactagcaccactgggacctagtaccaccaataattaccttagcttgggtctaacatccccaaaaggcagtcaagttctcattaccagtacctcatcatcgtcttaatctcactacccgtaccctacgtacgtacgtgcatgaatactgccagatatgcatccatgatccagccatggagaaatcaagctatcagactagtatcagcaaagcaaagcaaagaagcataatggcaacaatggaacgttccaaagctccatccatcaatgcaatgcaatgcatcatcatataggactcactctgtaactctgggctagcaggttgctcacttcagagcagtatactgtatactccatgatcagtgagcagtgtatactgatgatatactagtattaccaagttacatacctgtactgaatggaatgatgcatgtatgggccaatgcaactcggaaagagaggtccggtccccaacccaaagaaaatcattgtaaatctgggatccccacacatgacatgacatgggtgcatctcatatcgatcgcccaatcgcaagcaccgctcatgttttcgcatgcatatggtcccctagctagcttgctgctctccactccaacactctctactgctcaaccaaaagcacctcatccgatcccatctgctctcttcgcctgcatttcctctcaccatctaccgtcctactgctctgttattactcctgctaaacaccaccacgtcttactgtcctctttacctggagtactcctccttaatgattcttgagtcttcggcaaattctgctgcttatcgttggcttcatcaatgtggatggatgttaatagtagtaatacgtatcatcctttttggctgttgaggcaaagcagatttctacccatctgatcctgatattcttttggcgtttcaaaagagagaacaactaggaatggtctggatatggaacagtagtagtacacaaaggactgcatcacttaaattcagaagcatccaccaccactaatgtcttccctaggccagttaactgtctaacagtcaactgacaagtcagtaaagaaattactcctcctacaccattgcagtgcaggcatggcatgtggttagttaccgaaaaacagtgagaactactggtgctggtgctaattcagggagccagaactaacagtaacctgcatttgcacactgatcagaattcagaaaagaaagacggttaaagcactctctaatcatgatgagtactctcctcctagatcgtctttggttttgtttctctctttctttctcagccttttgggggtggttttgtttgcagttgcagaggtatcgatggcactagtacaattgcaggagtaataataaaagaccagccgatgggtggcccatcatcctccatcgtcttttgcagaaagagcagtgcaccaaaattcagacagatccatacaatacagatactcctactacaggggtactagtcgtaatgacgagctgattgatccatcatcacgagtcaatcatacacttaaaaggagtcgtacaggaatcatggctcgatcaagctgacactgattggtttgcttaatgatagctgctgctaattgaaaagccctaattgcacgggctctttttttccttcctttcattcttcagatgcagtggctgctgccgtgccggttactactactgttgagcaccagtagcattgcgtttgcaaggctttcagctgctggatgcacaacaatatgatactgttctgcctgtgcataatccagacatgtctggcgctcgttggcaaggaggatcatcatagatttctgggttatttggttggttgccttacttgactgatgggcatgtgttgctgggatatccatgtagtactatacttgaggcaaatatgaggtttgactcaagtgtccgaaatggcttttggtggactggagaggaatcgaactgttgcaactcgatgctgagcgaaaggagaagaagatgaaagaaggcggcaggcatcgcgtcgaccgtgccatgccgtctgccgctgccgatgcccccaccaccaaaatgttcgtgcaatttctgcaatgctccgtgcaatggactggaggaagcaaagcaaagcaagatctctgtttgcctcacctcgatcagtgcctggctggatggatggctgcctatgctatctcgtgcatgcatgtctctgtgctgtccttgctcctcgatcagtttgcttgctcatccatcctctgtcaactgtgattttgtgatttgggccccgtttagttcctcaaatttttttcccaaaaacatcacatcaaatctttggatacatgcatgaagcattagatgtagataaataaaaaaactaattacacagttagggaggaaatcgcgagacgaatattttgagtctaattagtccatgattagctataagtgctacagtaacccacatgtactaatgacaggttaattaggctcaaaagattcgtctcgcggtttccagccgagttatgaaattagttttttcattcgtgtccgaaaaccctttccgacattcggtcaaacgtccgatgtgacatccaaaaatttccatttcctcaactaaacacacccttgcatttggtcgccatctcgacctgttaatttctcaacgaatgggtttttgccctcgtctccgatctctcgccggtatagcacgcttcgctagcacaacaaggagtggtagctcgagtagtcagcctgcagtgtcgttacgcgtagctgtgggcatcagatctccattttttactcctccactactcatcaccatctagtgataggagtatgtgtaggatcgataggatagcagcagccagcgttgcatattgcattgggcactgtgattgatgtgtgatgcgcgcccacaccgcaggcacagccacagcccacagcagccgccctaaaaaccaacgattcacatgccccctacccctactatacttttctctgcaaagcggagtaaagccgagtagctctcctctcttcttctcctcttttactctctgctttctttcaccatgggcggctgaagcttaacataagcatacaaacaatttttttgagaaaatgaacacaagcatgaacagttaaacacacatggtgttcatgtgccacaatgttaggagtacaattgaacccacgtcatggcaggtttataggctgccggtgtttcgccttcacagatcgattctaaactcttgaggcatcctcattatttacatattatttaaacagttaaaaaaatatttaaaaaacaataaaatgaattaataataaaatccaataaatcactctacatcaggtcataattaacttatacaagttgcaaaaagaaatttaactgtaactatagatatacgttacctaactatagtttaattggtttttcataacttgtagaagttaaacctctatgtttgtagagtaaggatgtgttcgaatgcccctcttcccaacccctctcattcgttttccatgtgcacgcttttcaaacggctaaatgatgcggtttttgcaaaaagtttctacacgaaatttgcttaaaaaatcaaattaatccattattgaaaaaaaaagctaatacttaattaatcacgcgctaatagaccgctccgttttccgtgcggaggcactatgttcccaacctgaacatgtgaacacagcctaaatctatcttcttttttttaattactatttaaataatatgcaaacaataaggggatatcttttctagagattaaaatcaactcctgattataagtataccgtttattagcgacaaaaataatttatatatacaacttttacttctatatataggagttcttagcaacttaaagacaatgctgaaaaataaacaacaatgataaaaatatcaaaattaactttaaaattatgttttaaaattttaaaactgggttgctgctgataagccgaagaccaaacaatgagaacgtcgatgtattatacaaaaatgccccatacatttctgattgctcccatacgatttgggcgggggccaatctagttgtcaacttctactactgctaggaggagtagtcacatgatccaatctctcctctcctcgcctacaaaaccaaagccacactccttccttccttgggatccccagacccagtgcagggttgcagcgctttgcataggaatgtctcgccttcctcctcctcctcctcttcttcttgcagctcatcgaaagccacatagtataatattcgccacctaaaagcccaccacatccatccatcttgcttgccacacacccaacactccacacaagtcagctcagtgaccgccatggctgctgctgcctgagctgagcgaggagtactatattgcagcgtccagaccagtccaggtctgcttgctcggcagagtgcttgttgcgccaaacaatgaggcaaccacagagcagaaagctcctgcagctgcaggctctttctctgctgctcttcatcatcgccctgcacagccgcctccatggctgctcgggccaaggtgaggcggcggacggctcggcgtccacggcggcggctccaatggaggagaaggagaagagggctctctacgcggccatcgagggattcgtcggcaagggctggaatggctccgccctctatcctgacccctgcggctggtctcccattcaggtttcctttctctctgcacacaccactactacacagttcttgatactagtcgctttgagcaaatttctgttctttctgtgaggcaaattcatggttcaaaggatcttgggagggcagggtgatctgcactagagatttcttcattaagttatgcaccaagagtgcagcttgagatatttgtgcaattatttttgtttgaaagatccaaattttagcagtatccttgtagtatgttccttctttgtttcaatttcatcttcttgtgtgtagcctctgtgttggtgaagtgtttctgcattttgcggctgccctgtttctcaactgtggctgagtgagacctctgaaaacattgggtctccgatgttactcgatataggagattctcttggacaagaactttccactcacatgaaaagaatctctctgatttgaaatctccatgttttcttaacatacaggtactacaggagtattctcatgtcttctcttttcatctcatgatattctcatcccttggttcttttgctgtggagatgctccctcttttttccactacatttcaccgctctgtcttcctttttcccatccctgcactttgagctgctgttactcactcataagcaacagttgctcacgactcgctccttttatggcatggatctaattaacacattagtatttgccctcccagaataccataattacttacattttgatgctgatatataaaactgacgaggaaattggagctgctataaaaaggagcaaatctctgttactacattaatcaaattctgtcaaccatgtgatccttccatgtctgttactaccagtagtgtactacccaaaaattctgtttactggcccgtcatttggtacctttccatgtgtgtgaaagtggtgacagctaacatttgtactgtaaattccaaaattcaggaaaagaaaagctttagctccttttattaaaaagtgtgtttgtgaattcaaattgaatggagaaaagcaattaacaggatgcctctgaattttgttgcagggagtgtcatgtgatctgttcaatgggctgtggtacccaacagtgatgagcattggcccagttcttgacaactcactgcggtgctctgctgatgccaagttcagtccccagctgttcgacctcaagcgcctcaagaccctctccttctacagctgcttcccggcgaccaacccgactcccattccggccaccagctgggacaagctcgccggcagcctggagacgctcgagttccgcaccaaccctggcctgacggggcccataccggcgtcgctcggccgcctgtcgagcctccagtcgctggtgttcgtcgagaacaacctcaccggtgccgtgcccgccgagctcgggtctctggtgcggctgcgtcggctcgtcctgtccgggaacgggctgtccgggcagatcccggcgtcacttggtaatgggcatttcgccgagcagctgctgatcatggacgtcagcaacaactctctaaccggctctctgccttcgtcgctaggtggcctcaagggactcctcaagatggacctcagcaacaacctgctgcagggtagcttgccgccggagctcgccgggctcgggagcctgacattgcttgacctcaggaacaacagcttcaccggcggtttgccgtccttcttgcaaggcatggcgtcgctgcaggacctgctcctgtcgaacaacccgctgggaggcagcctggggcagctcgggtgggagaggctgcgcggcctcgcgacgctggacctgtccaacctcggcctcgtcggagccataccggaatccatggcggcactgaccaggctgaggttcttggcgctcgaccacaaccggctcaccggcgacgtgccggccaggctcgccgagctgcccaacatcggcgcgctgtacctgaacgggaacaacctgacggggacgctgcagttctcgccggcgttctaccagaggatggggaggaggttcgcgtcgtgggacaacccgggcttgtgctacagcaatgccgcggtggacgcggcgcacgcgccgccgggggtgacggtgtgcaaggtggccggcggcgtgggggacgggaggaagccggaggcgagctccagcctcatggccacctcgtctgcttccaacctcatcaatggcttctgcttcttcttgtggatggtggccacgtctctcttgtagccaaagacagacaccaactttcagaatcttcagatagatggaacaacatgaaatgaagaaactgattctctcttagtttagcttggctagtgactagtagtgctgttcttacttttggctctcttttttgggtgtttttctgatgatggaaaaggaagaaatcctggtggtcacagtaaacactagtctgaaactgtgtagtgacgagtactagcttggttgttttttttgggtgtaattagcatgtttctcatgtgatgtttaattacgggaagtggataatggatataaggtaaactgctctccttgtctgaaaatattttgctctgatgtgagagtatatatttactagcttggtaatcatgcatgagtcggtagctagatagatcttgacagccgtatatatgagttggattagctgaggtctgagattgggctcacatatgcatacgtatatcatttatcattgtatttcggtattgctatatatatggcacatatttttttaagaaaaaaacagtcgttttcctggcggtaggatctcccttgattttcatgattttcatgattagcttcccacgctgattgccgatttttgtcgaggtgtatatcaaggatgacttgatgacttgattactttgttattaatactcaaagggacatgtgattttgtgagtaattattttctactttgctagcttctttcttttctccaaacggacatgtgatttgtgagcttccctcttctttttatcgtgattacatcctaaacatattaaaattatatatgtaatttagacacttacatatgtaatttttgtacttacatcctaaatacactgaaattacatatgtaatttagacacttacatatataattttgggacttacatactctatacaataaaattacatatgtaatttagagacttacaatataaaaacataccgactattttttagtgaaaaatatggcgccataaatatagctactctcttgtatttttgttttgcaatactagcattttagcttgacccaagtgctagataactagacttaaaagaaatctgtatatgaaaatttgagcaagtaaagttgccttggtagcatcaaggaatagcttgagcttgatgctgatgctgcacataatatgcctgaatgtattacctccgtcctagaacagtaatgtggtagtagtggtttggattgaagtagctcaagagatcaattaactgaaggagagcaataggaagaaggaaagaaaaagaaagagaagtgctcctagaaacaacacatgcagggagaatagagggatgatgatgatgatgttgctgttgctatcgaagaagctgttggctgatgagcagagcacggaggggatgaacgatgaacgatgatgatccatggtactgtatggtggtcggatccgatccacagcaccgattgatggacagtgtttcttcactgcgttcaaaatctgacaggcaccattgaaaggctcaagactggagcagccggtactactccagtagcctgcacaccctgccactgccgccatctactggtactagtggtagagtagatacagtactcatgctactctgcttgccagtagtcttggctgacatcttggatgacatattgggctgtgtgtttagatccaaattttttgattcaaacttcagtacttttccatcatattaacctgtcatacacatataatttttcagtcacatcatctctaattttaactaaaatccaaattttacgctgaactaaacacaaccttgactgtcatcctatggagtgtcaggagtagtttttgatcaataattgtcctaggcccttgttttagttccaaactttttctttaaacttttaattttttcatcacatcaaaactttcctacacacataaacttctaacttttctgtcagattgttccaattttaaccaaaattctaattgtggcgtgaactaaacacactaatgacaatggcaggaaagaaaatttggtattgcaatggcaacgtccgtatagtgtatcgacattgctattggtattggtattggcatcgtcattgcaagcggtacattggtattggtattgcagggaagggaggagcaatgaagcaactacgagtagctaggatgcaatgcaaagcctagaatagctagaggatggatcagctcgatctcctcttcctctcttctctcgccggctcgtccgtgcctcccggcatgttctcactgtacactatgctacagtgctaaccataggctacaggctttttgggcgtgactgatcaattatcaacagcaaccagtaaatctgtttaggctgagtttagttgttttggtaaaaaaaaacatatacaaacacacatttcaaatattaaacgtaaactaataacaaaacaaattatagattccacatgtaaactgagacgaatctattaaacctaattaattcgtcattaccaaatgtttactgtaacaccacattgtcaaatcatggcgtaattaggtttaaaagattcgtcttaacatttacatgcaaactgtgcaattgattttttttcgtctacatttaatgcttcatatatgtgtctaaatatttgatgagagggaaaaaatgaaagttttttttcgtgtacatttaaaatctgcagtttgcaatgcaaccatacgtgcaatgttacggacgggagagtgtgaatgaaaacgttcaaggcgcaagtcatgccagacgtcgactcactgtcactcactgctctgcccgatgatgtgtacttatggcttgcttgtactacaccctgctctctgctggcactgagcacaagcgtactgtacactactgggagtattttcgtttcatttcaatcgtatcttattcacatccatccatccatctgatgagagccggccggcaggccgggacgccccccaacagaacctatctagttagtgaaataaaagattttggtgtcacatcgaacgtttcaccatatattgaaagtagtttttggacatgtgagttactatagtatttatggctagtcatggattaattaggctaaaaagataggtctcgtgatttacatacaaactgtgtaattagtttttttatctatatttaatacacatctatgtccaaaatattcgatgtgaagtttttggaaaagtttttgggaactaaacagccccaaaatgtctgtccatatcatatgcttgctgctcggctgactgaaacctgtttcctcatgcgaagtgagagtaacgaattgattccattgaagccgccattttttgttttatcaaaattttgttaacttttaacagtattatatgctcctaggtgtttgatttgttattatttttttacatacgattagttcaaaacttcaaattctatgctgctaaaattttagtgccaaaactttcatgtggttttagcacaaccagttttcctttttgatatgacaaataaaaaactccaaaccaaactaaaagggtgtttggcttgtatactgacattgtctattgttatcatagttttcttaccaagcttaccaaagcttaaggttaagttaacaaaattaacaccacactttagtaagcaaagccactactagtaccttgcacaatttttgagacaatggcatgtaagatcaaggtgttagaaaaagaaacttatcacaaatgtgacataaaccaaacacgttactaactcaatcaaagctgcctaagttgttgacgtatagcaaagtatggtagcatgtgaccatgaactaaacaacccctaaacgcgtaattatgctatggttcttgaactgcctctagtatgagaaatttttttttttatcatttgagtgaacggctacccgtttattacatgtcaactaaatatttaagaaaaaaatcaatttataatttttttactggttacaaaatttattttaatattttgttacaagttgtataagttgattttgaacttacaatgatattctctggtagtagtacatattaaggttgtgttcatgtgtgttgggaactaatctttcacacacacataaaacggagctgcggattagtgctgatgccatggttttgtagcggcagacgccagtccaaagcaatccttgctggactggttgatgaacggacactgcagtttctgatgccaaaattccaacacactttactgccacttttgttgcaaaggaacggagtttgttttacaagagaaaagcaaagcaacaaaattttagctggcttataaagtggaaatgcaaaatctgtgtgccaagcaaatgctcctccacgtgagcgatgataatgaacggactataatttccgaatgaaagggcccatcttttaacttaggcttatatttatcagccaaaatttaaaatttaacataaaatctgaagctaattttgaggtttttaatcgaagtttattttccagtcgtcgtttttagattgctaaaaatatgtatatgataattttatccgcaaattacttacggctccgggagaaaacattgtgagagatgaaaataaaacaaaaatgcagggggttgtttgtaatttggtattgtaactcctcgcgtggcgtgcttgaggctgtccgcgctctccgccttggtctcctctcctctcctcgctttccattccattcaaccatctcaatcaatctcaatcccaatcccaatcaatccctctctccatctggtgctctctatctgaggaatccgaatccgatcaggggaggcgaggcgcggcggtgatcggcgatgacggacacgacggatgacatcgcggaggggatatcattccaggcgttcgaggacgactgccggctgctgggcagcctcctccacgacgtcctcctccgcgagctcggcccccgcttcatccacctcctcgagcgcatcaccatcctcgcccaggtatcgtatccatccatatatgatgatgatgatgatggtgattcgatccaattaacacggtgcgtgcagagcgccgtcaacatgcgctccgccggggtggaggacaccgccgtcgtcgtcgagaagcagctcggcgccgagctggccgccatgtcgctcgaggactcgctctgcctcgcccgcgccttctcccaccacctcaacctcatgaccatcgccgacacttaccacaggtgcttgccctacacattcacattctcaaattgttttattaattaattggaggatcacctcttccgccgccattagaatctgcaaactcacttcataaatcatcataatgtgtttatcttaattactccctattaacctgaatttatcatgcatgtacggccctcaacacatttgttgtaccactccattttcagaatgtgctacataccattttttttgtctgaatatgtgttactacaacttactgctagtgatagtgaggactgcattatcatatttggcgcgaacaatttgaaagccaaacactgaatttacagtttgtttgtcacacttcaattaaagaatactgataacaacacgggagttgtcttctgtttggggtacctatttgtcatatttgggaaatataagtatacctgttcgtgatagggatgctacattacagtagcacagatgaatctttgattgcaatatggaatccaagaattccggtacatatgtgtacggcattacaaagtcggtccaccggttagttgtttccatgtgaccctcctcagacagaattgattgaaggaaccttacgctcgcacatggtagcttcattgtggtttcctcagatgttttgtcgtcagttgtccgactgtttttggaacctagcaaggccattgagcatcgcacttattgtcgcaattacctcttattatggtagtatgtcaagttttagaacagctgagacttcatgcatatgcttaagaaataattaccatcagcatgttgcagacttgcagtacatctttttcatttcaggaaaatgttagtgttgctacgttttttatcacctgaactagaatgtttaccaattttgaaaatcacccaaatctagagcttggcatttttatgtcttttagggttcgtaaagcacgcaatttcgccgacctgtcgaaatcatgtgatgatacatttgccaaattgattcaaagtggtgttagcccggaagaactctatgacactgtatgcaagcaggtaatttctcacattaagcacacatttttcatacattgtatattatgaaagttgcacatcatcaaatttatctgtgtatcttgtaagaaagtcacacatgatcaaatttatcagatattcgacctttacaggaggttgaaattgttctgacagctcatccaactcaaatcaatcggcggactttgcagtacaaacaccttagaatagctgtgagttaatttcaatagtttcatacttcaaccttgatattgctattttgttgtttcaattaccgatgaaactgtgctgcagcaccttttggaattcaacgaacgtgctgatcttagcctcgaggataaagaaattctaattgaagatctggtataacttcaaaggatcttcatagttttatttttccttttcctaatgtgttccaatctttctaactttgaattatgtaggtaagagaaatcacggcaatatggcagactgatgagttgaggcgccataaacctacacctgttgacgaagctagagctggttagtaaccatctattttctgtttttgttactgccagtattctcatgattccatcttttcttttgtaggccttcatattgttgagcaatcgctctggaaagcaataccacactatcttcgccgtgttagcaatgctctaaagaaggtataaatacattgattggcatttgttgaattccacttccgtttgactcattcacgagcggatataaaccctcctacaatgcttttcttatagaacactggcaagccacttccgctcacctgcacaccaatcaaattcggttcatggatgggtggtgaccgtgatgggaatcctaatgtcacagcaaaagtaagatccacacatttgaatttggtcgttttattatgccttctcagtattcactagtatttcctgtacattcttatggtgtgttgcgtttttctaccttttgcttatgttaatttcgacatgatcaccattctgaaagactacaatgtttcatttctgagctgcaggttactagggatgtttccattttgtcccaatggatggcaattgatctgtacatccgggaactagacactctaagctttgagctatcaattaacagatgcagcgagaagcttgcaaacttagcaaatgacatcctgctcaaaggttatttcatgatatatccaagcttaatccatttcaatctcaacagaagctcgcctgccaccatgaattgtggcgcttttcgaatgcctagttagttagttagttcattagctagtataatgcatattattggttgtggtactgttccttaaacagtaaggtgcactgtaacagcactcttattatagggattgtaattttagtttatatattagatatttcctttcagtttataactatcttataggtccccttttattagttcctaccctttgggctctagcacctttttttttttttgacgctgaaaggtagagagactataccttataaccattttatttatggtgggtggggtactagcacctttatatgaagggacattgctctaattatcgggaagcaa

SEQ ID NO: 18354 - DNA, 5342 bp, Oryza sativa
ggactgacatgctgtagcattatgttaatataaaaaggtctaatgtttttgtaccaaatgcataatagtccaaggggagcagtcagcattatgttgttaggtctagtttttttgtaacaaaatccaaaatcctaatagcccaaggaagttttgtagttgcataaaatattttacaccaatttgtttggttactttcggcttcctgattttctatcacaatttatgtgttaaataagcaatacctaagttataatctggaaataataaaaacttattttatatttagaaccagtaggcttcattaatgaaactgaaaatgaatatagaggtgttcaagtcttacagtaacaaacttatttacttcttcacataagcgcattcatgacaccacatcgataaattttggggggaaaagtgctggatcattatttccgtattatgtctgacacaaatacctcatgctgtcatccttgtaatcaatgtaagacttgtgtcatcaactgctggattaaaccatgaaatttacattgcaacagcttcctctgttccccaaactggatctgaggaaaatttgtgcatactgcataggacaaaaaaattggacatgctattttgaaaattatttcagaatgccaatcaccatgtaaaatagtttcatcaatattaattaaagaacatcttttgtaacatggatttaacatcatgtatcatcaagttcatctgaaatagttcagatgtatgtaacatcttttgtaacatggatttaacatcatgtatcatcaggttcatcttttgtaactggtgtgtgtttgtacatatgtatgtaaatttattgtcacacctattaatgcattgctactattaatgtgatgtctatgtcttcccatgatttgctaatactgagagtagagcttgtatttgatgcagaatgcaacgatggggaatctcaaatcagaatgtcaaaacttccagggaatccaaagcataaggttaggacagctagaattttgtgatgtctcacacgttcgacttctttgttgtacagagatcattggaagcacaaactgtccataaaaatgcattggcacaactattccaatatgcgctacattttttttcaacgaacattgaaatgacatggagtgaaaaatgctatggagaagctatggcatcgccggtagaaatagcaaagaataaacaaacaaacaaacaaataaagaactagctgacactaactggatagtgtagataaatttcaatatatatttcttaacatttcatgagaattaatgcatgctgtgtctcctagttggctctaaacataacagaaaaacgtgaagacagtccattgccgtctcctagtcatcgcccgatgggtcgaactccaagtggaggtcaactaaggaagatgttcacagaatcccaaattggtcgatcgagcttccggaaacttctagaaccaagcatatcagagagaccagggagtactccttatagagttgtccttggtgatgtgaaagaaaaggttagagccatactttatcatttattatacgtctcatgttttcttctccggaagtaggcaaacaattgcctagtctactaatagaggttggattaagggatgcttgattaccaaatttgtacaatattctttaggattaaattaatctcactaataaattcccagagactctactcctgttctttggcaataaagtttgggataaattttatgtggcattttactattaaaaacatatatgccaaagatacccaaatagttggacataggtactctcaatctttggtaggaagacaaacctcaatgagaacaagaagagattatgctatgtataaacagtacccatctgttatatttttcttgacctgttatattttttttaacatggcaaaattttttccttttgattgtgcttaccactctgttttcagctgatgaacacacggagacgactcgagcttcttcttgaggatctaccatgtgatcgtgatacttcagaatattatgatacatcggataaacttttggagcccttgcttttgtgttatcaatcactggttagtctaattagctgatgtagggtcgatcactcatccctttagtgctgtactaccatgatcaactatattctatccgtgcaagtgtgtctgtgtgtgtgctagaaaaaaaaacatttgacacaaacattctcagcattcttcaaaattgccctttaccatctccacattcttactggctaggctttgattagtcgtgacttgtgagaacaatcgttgatgatggagtgggtggaggtttcttttcatcacataatttcctttttgtactgactgtgttcacatcttcaactattttatgaagcaatcatgtggatctagtgtgcttgcggatggccggttagcagatttgattcgacgggttgcaacctttggtatggtgttaatgaagcttgatgtacggcaggtgggcacattgatcactactgtttttatgcttactcacacttaaattttcctgatgtaacttcagaatagcttcaagcgaagtccagtagtccattaatgaatagaatggcgttatattactgtaggaatcaggccggcatacggaaacacttgatgccatcacatcttacctggatcttggtgtttatagtgagtgggatgaacaaaagaaactggatttcttgactagagagctgaaagggaagcgccctcttgtccccccatacatacaggtcagttgttgaatgtagacatcaaatttcctatcctagtggctaatgataacttatattttagttgtgataaatgttcgtttacatggaaaccagaagtgtcaattgagtttcatcgtgtggaacagtacaatataaatccttccatgcaaacaaacatttatcacaaactaaaaaatgctaccaatcttaccacaaattgaaacttatactacacaatcattttgtggtaagattggtagcattttttagtttgtgatgaatgtttgtttacatggaaacaggaagtgccaattgagtttcaatgtgtagaacagtatgatagaatccttcagaaacagatatagttcctttccatatagtcattttgtggtaagattggtatcacctccgccaacgccaaaatggttaatactatgctaacttctgatgaataagcaatgttttatacagaatttgatgaggcatcagatataacatcactgttcattcaacatggattttagtttttttgggaatacgcataagacttacatatctttttattaagattgaggggtggacttacaaacgcaaccgataaaggaagcaaaaacaagaacaccaggaaaagaaaaaaaaagaaagaaagaaagcacagcagagggtgttatttcgcaattaaccaattgtgcgactgaaacctagacgaggaggcttagatcggcacccccgcgcgccataggcttgcttcttcagcagccaagtttgccacttctccccaggatcggcgttggttgttgaaagcctggctattccgttccttccaaattgaccaggcgaccagaataatgatggtgtcaaagccgcgcctcttttggacatccaaccaaaatcccttatattttgggatggagtattttcttttacaagaaagatataggaaaagggattgcagtgttggtacataagaatatttgaatggcaactttatggttgcatacttcattgtagaagagaaaaagggaatggagattcaccttgaagtggaaagacttacatttgcatttcctttgtattcctttcaggttactgctgatgtgcaagaagttcttgatacattccgtgttgctgcagagttaggaagcgatgcacttggagcatatgtgatttcaatggcctcaaatgtatgtagatacgcaagtcttatgtagcactaaataataagaaaaatctgaatatccatcctgcactttagcgttcttgttaaccctcacctgtaaccggccggtggttccaagcattttgccatgtcatgccttgtaccatcttgatcgcatggatcaaatgacaatcgtggcacattatatttatcactctacattaaatatgatgtgttcctctggttgcaggcaagcgatgtcctagcggttgaactgttgcagaaggacgcaagacttacagtcagcggggacctaggaaggccatgtcctggtggaacgtaagtatgattatatatatatatatatatatatatatatatatatatatatatatatatatctcatatgttcagtgtgctactcgatcaattgaacttatgaactcccaattggttggtttagtagttacacaaaactaagaacaaagttgattgtgcaaactaagtagaaatggaaaagaaggaattgcgcactgtgtctctgagctagcaaggaaaattcgactgcgatcttttactttgccagtggctaagccaactgaacttgtttttgcaccatatagatcgtatattatgttttgtaccatggccagtgtttgattgaatagtgtgttatattgtttgtgaataggttgagagttgttccactgtttgagacggtgaatgatctgcgagaagccggcccagcgatcagaaagttactgtccatcgactggtacagagaccacatcatcaagaaccataacgggcaccaagaggtagaatgatcgatgggtttagtttcgaatatctcaaactcattttgcttttgtttcggatatctcaaactcgatcgggaggagtttgcaggtgatggtgggctactctgattccggcaaggacgccggccgtttcaccgcggcatgggagctatacaaggctcaggaagatgtggtggccgcgtgcaacgcgttcggcatcaaggttacgctcttccatggccgcggcgggagcatcggccgcggcggcgggccgacctatctcgccattcagtcgcagccacccggctcagtgatggtgagcactggcaggcactgattaatcagtccattccatgtgtatgtgtttgcgagctaataatgaattgaatggtgcatggtgcagggaactcttcggtcgacggagcaaggggagatggtgcaggccaagttcgggctgccgcagacgtctgtccggcagctggagatatacacgacggcggtgctgctggcgacgctgcggccgccgcagccgcgcgggacgacaagtggcggggggtgatggaggagatatcgcgggtgagctgcgcgcagtaccggagcacggtgtacgagaacccggagttcatcaagtacttccag

SEQ ID NO: 18355 - DNA, 2356 bp, Oryza sativa
tgctcccggcgtggctcggcgtggggcgcggcctccagaacgcttgcgacaagggccacacccacgagctccgcgccatgtacgaggagtggcccttcttccagtccacggtggacctcatcgagatggtggtggccaaggcggacgcgcccatggccaagcactacgacgacgtgctggtgcacgacgcggggcggcggacgctcggggcggagctccggcaggagctggcgcggacggagaactgcgtgctggcggtgagcggtcacaagaagctgtccgccaacaaccgcagcctgcggaagctgatcgacagcaggctcacgtacctcaaccccatgaacatgctccaggtcgaggtcctccgtcgcctccgccaggacgacgacaaccgcaagctccgcgacgcgctgctcatcaccatcaacggcattgccgccggcatgcgcaacaccggctgactcctcttccctcctctcctctgcaaattaacttatatttcttgcaactatatttccgtctgaactaattaccggagttttttttctcgttcaattttccctcaaaataagaaagaaaccttgcatgtagcattttcacattggattggatatgtacattgcatggagaatgaaatagcattatagactatagtggtgtggattgatgtatgtagttaaaagatgagaccattggtttggttcccttcttcatgggccgcaactgtatcgcgaccaacgatcggcccatattgaattgccccaacgggattgctgggtacgtgcggcccatcttaaccggaccggaacggaaatgtgggtacgtgcggcccacgtttgttggaccgtcggggggattgtgagggtactgaggcccatattaattcggccgtaaagtgtgggatacatgtggcccacatggttgggccgaaatctgacgttgcgtgtatggtctgaaaaggcccagctctcttagcctcgacgaatattggactcccatcatattttctctcggcaggcaccagaaaatcgaaactgaataaatgaagggatctttacaacctctatgttcatcagcagatgagcagatcacaagtcaggaaaagataaatctctctttcgatctactactacattacattatctaaaaaatctactcgaactgtagtagtactgggctctgttcgtattcgtatgtgaaggttcccaactctcatttctcgtttttcacgcgcatacttttgaaattgttaaacggtacgttttttttgaaaaaaaaagtttatatatgaaagtagcttaaaatacatattgatctattttttaaaaataataaaatattaatcaatcaagcactaatgaactgtttcgttttccgtgctggagggatggttcccaatccatgcatatgaacagagccatacgcgatgttcctatgacctgaaagaatctcaggattaatagaagagattgaatgatgaagagctgcatctgcaagcatgtcggtgtcggtgcccgtccgtccgccaatcgagcattgccttgcatatttgcattgcatacgcgcatttctcgattgactgcgtctgtcttcctccctcgcgccccgcccatttcatataaaattcataaaattgatgtgagctaatctcatatcgtagctgccaattgcagcaacacttcatataaaattattcttctgctacgtccaaggaagtttcttgcctcaaatcttgcccacacaattgcttggagtactaccttttctccgctgaaactgttctttcctgtgtccttaattatatgtactaaaagtgaaagaaaacattgtagtacctcaattattgtttatcatgcattccattctctaatcaaacacaattgggtatctaaagcaaatgcataaatggattggtcacacgggatttttaaggacaacacgcttacatgtttgtttgctccatccattgtctcctcgttggatcaacgtcaaccttgatcatatctagctgtttactactcctacatgcaaagtttgcattgcatggaaagcgaaagatgcaggaatatcacgacagaaacaaaatgcttgtttaggtgagcggcagccaggggcgcatctacccattaggcagggtgggtcgaccgacttagctacgactcgtgtcgccccacaccctcaagaccccccttaccccattatagtagttatgtgtcatcaaaattaagtataacaaagtgtgaatacttaacaaattgagtcagttatgcgaatgaactattaatatgatatgtgttgtgtctgaattctcttaacgagtgaacattttcgttctccgccccatctatattttaaa

SEQ ID NO: 18356 - DNA, 12107 bp, Oryza sativa
atcatcgaaacatttaaatcaaattctgcactactattgaacgaagaacacactattattttgaagcaacgtgctgcaatttgcatgaggcgatccccaggtccattctactactctgcttgggaaaatgaaattagaatctgtttagtatttgatgcgtacctacaacattgaccgtagcattgaaaacattgaccatagcaacaaggcccatccttaatcataaccattttttatgaagtaagaagagtttgtttaggagtgtaccagaaaccagctagtccacgctacaaagatgtttaagcaatctcctcagttagttcttgcacttagtcggtgcaaaaaaaaatgcaaatatttattttagagccagatcatcaaatttttgttgcaaagccgaagctgccgaatccaacttaattttttttcctttgggtcaaacattttgtcaagtcagatgggcaatccagattcataactaagccatgtgcacagatgtgttctacacagctaaattccaaagttttttcccttctctattacgcaaatactagtataattgcttcaggcaaatgagactttgtttgtttatttgctatctttcgtgtagggaagcatatgaaaacttttaaacttgtgcttttgaactgctccaaggtaaaccaaaagtttctactctggatgatagaattgtttatcagagagagcaaaatcacacatgtactgtacagaagaagggagggaccatgctgaatagtacttcgtcttatgttggtgtaaattaatccatgagttgctttaaatacatagcttaggtgctgtgccagattaagcacttgctagttgctactagagcaacttttctcactatggttgcaccagaaagcttctgcttccttcttcgtcagagaatcagtcagtccttaagatatttcttttgattcatagtctcatcagttgtacaagacctaattataagccaaaacagcttaataacggtaaaaaaataatttatagataaaaaattatatctatgttcatatagactaaaaagataacgatggaaaaaaacacgatgaaaatattgtaaaattaattccaaaattaaaaaaaataaaaattcaaattttagcggccgatttttttaaagacaaatgagactgtcccagatgaaaactgaacctgtaacactactttaaagtgtgaattaggtggtgttcttttcttctgaagataaagatgaagtttaattttttttacacaaaatgaggtgttattaatgtatgattgattaaattttaattactacaaacttgaaaaatagattaatatgatattttagagcaacttttatatagaaagttttcacacgaaacacactgtttagcagtttgaaaagcgtggcatgaaaatctatatctcatccaactatttgatggtgttgttgtaatttgtaactagcgatacggtgagaatgaaggtactgatacagaaagtttattagatatggtatggaggtgctactcctaataaaacacaaatacgaaggggtggaactggaaaagtagagaatttcacacgtcaagcattctacacaacgctagtgtactgactttttcaaacccccccagcatggcactggcagaccagacactgcgcaatagtagtagcacactagcatgtactactacactcctaatctctctctctttctcgagtggaatccattgatccattgtgtagtgggagagagacttctctacgcggtcacgggttccccagcggaggagaaagatagatagagagagcaaagagcaaaaaaatctctcttttttcttcttgttgtttctgcagttacctttgtcttgccttcaatgccaccgctttactgccggatctgaggaaagctcccatccttgctgagttcttgtgctgcttcttccacaattcttccttttgttgagaattttgccttccatctgcttaatcggtgacaaaggtggtgggatcttgcttctcttcctgcaagaaaaggctcgtttttttgtttcgccgtttgctgcttgctcaggcaggaggaaggcgatgctgttcttgctgatttcagtcttcttcttccggtggtcgaggtgaggtttgttgctacttcaccttcgcttcgttgcgctctgcggagagaaagaaagcaaaggtggtggaaaagaagcgaaaattttgcttgcttcctctgcaaatctgaggaattttctcgcagaaagcctgaattccctctgaattccggtgcatggaaagatcgtcccctccatttccaagaagaagaagatactagtagcagctgcagctacactctagtagtagtggctactagtactagctagcctccaatggcgtcctcaccgtctccctccccgggcaccgcaactcccgccaccgccgccgccgcgccttccaccgcgaccccaacacccgcgacgcagcccaatgccacgccggccgacccctccatcactcccccggccgcgtcccctccccttccctccgccgccacgccacccccacagcccgattccccgccgccctctccgccaccagctcctccggtcgcagtgccaccgccggccaccgtgccaccgccgcctgtacccgttgcgtctccaccaccaaccccgtcagccacattgccgccgccgtcgccaccggcttcagtgccggtgccacctacacctgctactacccctccaaagccgtcgcctgtgcagcaacccccagtggctgcatcaccacctccatcgtctccggctgatttgccgccgcctaatccgccggctcgctcagacacgccgccggtagtgcagtcacctccaccgccgcaccggagatcgccgagaacgccatgggctccaccgatggcgccgtcgccttctggaagtcctaccaagccttctccagctagtccatcaccaattgctggagatccaatcatccctacacccaataacccttcgtcgcctctggcgacgccatcagcaccaggctctggtactcctgtggtgacgccatctgcaccagtctctggccctccatcgccaggcacggctccagccacggcagctgatcgatccaacaagtcattaagtcccaacacgcaggacggcagcgtctcgtcgagcgatggtggaatgagctcaagtgcaaaggcgggcatcggtgtagtcgtcgctattcttgtgcttagcttggtaggagctgcattttggtacaagaagaaacggaggagagcaaccggttaccatgcaggatttgtgatgccatcgcctgcctcgtctccacaagtgttaggtaatctgatgaaatgcattttcagaaatcgcgcacctggaaaattaaaatcagtttaagttgtattactagtaggtgatgaactgagcaagtacaactcattttttgcccagggtattcaggtaaaactaactacagtgctggcagtcctgattacaaagaaacaatgtcagagttcagcatgggcaattgtcgattcttcacttacgaggaattgcaccagatcacaaatggttttgcagcgaagaacctgctaggggaaggtgggtttgggtctgtttacaagggttgcttggctgatggaagagaggttgccgttaagaaactgaaaggtggtggtgggcagggggaacgtgagttccaggctgaggtggagataatcagtcgtgtgcaccaccgccatctagtttctcttgttgggtattgcatttcgggggaccagaggttgcttgtctatgattttgtgcccaatgacacactgcaccatcatcttcatggtatggtggtaaccttcagcatattgccgcatgagagctctgcatagttctagttctgtctgaaaactgtttaattgatctgcccttgtaggacgtggaatgccggttttggagtggtcagctagggttaaaattgcagctggctcagctcgagggatagcatatcttcatgaagattgtaatattctttctggttctgtaccttattaatgtgatcatttgcacttcattttcattacatttatttcccttttgcaggccatccccgaattatccaccgagatattaaatcctccaacattttactggataataactttgaagcccaggtaacaacattatttagataaattgggagaggcgttataatgtgaccattgttactaattggctgctattcgtgtgttaggttgctgattttggccttgcaagactagctatggatgcagtcacgcatgtaactacacgggtgatgggaacttttgggtaagtaaattactgcctgccttactgagggcacaagagaacatcgtacattttcatatgatctaatgattatttgttatgcagttatctggctccggagtatgcttcgagtggcaagttgactgagagatctgatgtattctcttttggcgttgttctcttagagcttattaccggtagaaagcctgttgacgcatcaaaaccattgggtgatgagagccttgttgagtgggtaagctatatcagtaactagaaatcatttttttttagataatggaagatgagtatattgaaattagtatgttcaataagatttttgcccctgtatgatcaaatgaaagcaaatggagaaatatattttatcaactgtatttgaatagccaacttgactcatttcaaagattctaataacgtaggaattcacattgagctgttgatctctgcagttcacattttttaactgtgtttttattaggagtcaatccatatagttagccactggttgaaaagcgttctgatataaaatgtggactggtcaactatgaacatctgctgaaatcgtgttgtaaatcagtctaaagaggggatccttgtgtaacttacacaatcacttgcaggctaggccattgctcacagaagcaattgagactggcaacgttggggagctgattgactccaggctggacaagaacttcaatgaagctgaaatgtttcgaatgatcgaagctgcggcagcttgcattcgacattcagcatctaggagaccccggatgagccaggtataggactgaacataatctcatcacatctgattgaacctgaacctgttcattttaatcacatctctcctttcaggtggtgcgtgttcttgatagcttagctgacgtcgatctaagcaatggtattcagcctggtaagagcgaaatgttcaatgtggcaaacacggcagaaatcaggctgtttcagcggatggcttttggtagccaagatttcacaactgatttcacccaatctagctgggatagtcgtagtagagatgttgatgcctctggttcgaggcccttgtaatcatagtctaatactcctctaattagctagggtattgttgcattggatttgtttcatctgattttgttttcttcttttttgtggccatctctgtcaactaggagtaatgtatatcatgcgtcccactaagaaaagtgtatattgattgcactgagcgtgcctgattctacaaaatctgacagacagaagatttactagtactagcccttgaaggaaccaatgaattgcctctgttggtggtgactgaacctgcatattccactctatatttcctcaaatttgtcctttctgaaccagttggtcttcaaatatgtgcctcccgaagcggccattgcctaggaattgatttggtgcccatctaatctctttggaatcctgagcaaaatgcatctctagaactgagctgagctgacatgacaaatggagtaaatggaattatgcgtgatagctgcatcagcactgagctttgagtggagccagtgcgctttgcacatgagagaacatgcgaaatggaatatatttctgatgacgacacacaagtgggctcctaactctaagcctgaagccctgaacacgacacgggcaatcaaccctgaattgatttgaattggattcagtagagaagatgagagaaatttgaggtctggtctgggcttggtttggtgtcctttacagacagaagggcaaggagccaaatttgacccgtggatataactgactggacaccaccgacaactactaatcgtgtgcaccattaattgacctcaagaaaaatgttgagagcaacgcggcaaaagcaatactaccacctgacttttgtgtgatgcgatgtgtgccatgactggcacggcaaaattcactgtagatcatacaaaatttctgtccaagataaggtagataatttacagcagattgatggttcctgtaaacaaagggaaaaggagcaaaatttcgccacgcagtacagtagagggcatgtgatgtctgaactctgaacctaacatgctcgctcaccgcactgctgacttagtacgattaagatctcaagttattttcccattcataaattgccagattggagtagggccaggttctgaaccatcccagtgattctgcgatgcttcggttgcacgtatatgccaatttgtgtccagggctattaatcattgtaaagagttgcacacttcgacacttcacattgggatggcagatggctcatgcctctctaatctttgtctgaactactaggagagtctcataattaggcatcagagattcagaatcacccttcacaattttccccattggatgactcaatttaccaaatcgaaaagatgacaagaagacaatgttattgctccagaagtccagatcgggtcattattccaattgctagctagtggccatggagttttctatcccggcgcataggtggcgttctaggctacggttagagggctcttgaagttctttttgtccctgctattttggataatgagtttattttttgtttctttcttgttggctgtgtgcactctttgggtgcagaagctggaggtgctctcagaataattgtatcacttgatagaatttattgagattaataaagcttccattatctaaaaattagaaaattattccaattgttcattgcagattttagtggcatgagatgattactgttgaagagttatcaagcatcaagagaatgcaaagtattcctctggccttcttttcccttattattgctatggccgctatacaagttatacaagactcgtgcggtagtgcacagccatcttatttttacaacgttccttctatcattgtacatcatggatgaacgcccagtaaaattaagtaatataagatgaaaacatagagctactgtactttacagttcagctttgtgctatttttgctcgcgccaacttcacaacgaggaacgtgtaaatagtgatggttgcctgcatcaagtcagatactttaacaaattagtctaggtggctattgtatttcctttcaatgaacacaatgaccgcagattgaaaatgcagaagtctctgatgatacattgcaacttacacaaaactatacatgaataatcagtacaacaaataactgcatttttttttggttctcagacatttccagagaagaacaaacatgggagggacttacatgagttccacaacaagggcataagcaccaccacctccattgcaaactccagcaaccccaatctttccatttttatgtctaagaatctgtggagcaaaacgtgttgatgtttaacaaagaggaagattgcaacattttgcatgctaaaggtgcagattaaagagagaaaatggcgctgacagataattaacatgaagtaactaaatccaaacttcagtacagccatgaagtattttgcatttgagaacaacacgtaatattttgatctgattttgaatggcctggtagcataccccgagcaaagtgactatgattctcgcaccactgcaaccaataggatggcccagagaaacaccaccaccacttaggttaagctttccctgaaatttacatgaatgttaatgagatcttctggggatacctatttgctgaatgtatagttacatagaatctaacaacataccgaaggaataccaagaagcttctggttggctaaagcaacgacctgtcaaagtccagaagtatgcagttcagtctagattcacgcttcaggtgtaagtactgtctaaattgaagaagacaagaacatacggagaaagcttcgtttatctcataataatctatttgtgaagtttggagacccgcatttgatacagcctttggaatagcaagagctggagtagttgtaaataattcaggtgcctgtgcttgaaaggagttagtataatgagtataacagataaagagcactgtataacaagaggcaaggttagaagataaggttgagagatttgatacatgaacgccactatttgttagcatgaataaataatgggtaaagttcctttcagcatggatttgtttgataatcccagtaaaataattgttcaacagataacaagtcatgtaagagttacctgagcagcatccgcataccctctgatccttgcaataacttgaaggccaagactcttggctttctgtccactgactagcacgattgcagcagcaccatcactgcgaattttggaaggtaaacgagaaggaagagaggtgcactacagtcacacatcaagtaaacatgcatatagcataatttgactttaaactagagaaaataaagtttaactttgaaagtagtctagatttattaaatcattcaagatggaagtgctgttctactaaataaaaaaaatcgaatgatagaattcaataaacaaaggattaactgcaaatgcgttacttcagaatatggtaatgcactgacatttggttgcatgttaatactactctgcaaagttttctgttaataagtcacttagagaattgttatcaaataagtaaaccttatactagaagaattgccggcagttacagaaccattcttcttgaaagtcggcccaagtttcctcagcttcgctgaattgaactgtgcaaatagacacacccaaagaaacatgtcaggtctgggaaaaaagtttaattgttgttgtttgcactaattcaatttttatttttatttttttggtttgtgctgttgccttccttttttatactatatagaataatttcttgagaatatgtaaatggtgaaaatgtcatgctacacatcggcataaatgaactacttccattaggagaaatcattagtagactacctttgcaagactctcatccttgtcaacaataagtggtggtttccctctaccggaagaaatttcaacctgaaaaatccagaatgttttatgaaatctgtgccagtgactgaagtgttgatatgtcatgtagaaaaccaattttaggtcggtccaaattatatacccaccggagcaatttcccaagaaaatgtgccgctatcacgagctgctattgcacgttcattgctctggatagcataaagatcctagaagaaagaggtgttctttagtccaatgttagctcctagatataaacaaatatgcaagcgcagatgcaggaacattgacaacctgctcctcccttgaaatggagtgttgatccgcacacaactcggcacacattcccattgggaaatcattatacacatcccacagcccatccttgagcatcccatcgatgaggacgtcgtgcccaaaccgtgacccccgtctgcataacatgttgacattataccataagcaagcaagaacaatggatgatggcttagttcgccgaaatttacagcatcacttgaggatggtaacgaaccttgctgccgcgacatatttgggggcattggacatgctctccatcccaccagcgacaacaacatcatgcatcccaagctgaatagtctgcgccgcaagcatgacagctgcaagacccatttttaagtagcactagatagcaaagcaaaagccgatcctcgagtagcagaaacaagtaacaactgaaaaagagagagagagagagagagagagagagagagaggttaaaatagcgaaattacccttcatccccgaggagcaaactttgttgacggtggtgcagggcacagtgtcgggcaagccggcgcctagggcggcttgcctcgccggggcttggccaaggttggcgctgagaacgttccccatgaagacctcctgcacgagcgccggctccacatttgctctcctgagagcggctggttgtggggaagcatggccaaatcggattcagagaggaagaggagaagaaaactgagaggagcactggagtttaccctggatggcgacggagccgagcttggtggcggggagggaggagagggagccgagcagggcgccgatgggcgtgcgggcgacgcccacgatgcagacgtctctcggcttgagcaggtcagagtccgagtgcggaggaggagccatgatgtgatgtgcttctccgccgcgccgccgccggagtaggtgggggtagggaggcagccgccggtgaggtcgacgacgacggcgtggagacgtggagaggtgaagcggcgtgtcagccttcttagttaaagcaacaaacaagatgccgtattgggcttcgattctactaccatatgtggggccttctattctcctattagaattttttttttaatttttttattaaaagttttacaaaaataattttctatttcaaaaattgacaaaagtagtcgcccgccgctctctgggagggctatttttaaaaatcgccctcccagagggcggcgaatgtgacgtggcagacggccgtttgctctcgggcgacggccgtcaatgaaatttgcaggcggcccccttgccgccctgggggagggcgattttacactgtgcggggggccgcctgcaaatgggcggcggggggcctggaattttgcagacggcccccttgccaccctaggggagggcgattttacattgtgttttatttgagaaatagatatttttataaatagaaaattgttatcaaatcttttatattgaaaactatacaagattaaaatctcccagattggtaaaatacaattttattatttttttagtcttacgcatacaaaaattcaccaccataattaaacattgtaatgataagatagataagaagtgccatcaatacacggtacaaatttattgatcccgacaaatctagcctgcggtaacctatcggccccttctaggtcggtcaatatgcattgtattctcgtggtccttcaatcgttgatactctacttgtgtttctgactctgttatattttggccatgatatgatggagtgacattgtcgatccatcgagtaaatccacacatcgttggattgccctgaaaaaaatagtaatgttattcagtttgggtagaaattttgtgcaaatcatagcggattttggaaacggttagacatataacgaaatcgttgtctacattgtggcagacaaaatatctccttccaaatgtttgttctgcaaaggaggtagccacctggcagcgatctctgcacccacactttggacgctcggaccatttaggtaaccctaatggattgttcctccagtctaagcttgcaatttccacccgacgttcgtactccatccaagcatgaatgaactgtatggtcggttacattctccagatcaaactaaactacatcttacaattaacactattgtctatgtctcaattcatactattatattatgtgctctggatctacacatatgtgctgtgtgctacagatctgctaaaatatatggaactaaaactaaaacgcaacatatagtactcaaacataacatattagtacaaatgcaaaagaggtatgagagcaaacctgtgatgaagtgagcgaaccagcagggcttcgccgctccccttctgctgccctcccctctctctctttcgttttttttttggatttttagagattataatgaaattttagagaggggggacatggttatactgggggaggcaaaaatcgccctcccccagggcggcaagggggccgcctgcaaaattccaggccccccgccgcccatttgcaggcggccccccggacgccgtggaggcgggctacccc

SEQ ID NO: 18357 - DNA, 5934 bp, Oryza sativa
atcgcacgaaaccaaagacaatgaaatggtgccaaacaaaagtaacctcatgtcatttgcgatactgcgatgcgtattttatacatgttaatgcatctaggaacggatcactgtcttcagttgcatacaattgccattccctgaaggctgaaccctgaaggtatttcagtgaaagtattttagtcactgaactgaactctccaccattcttgagactttctcttttgaaaaaaaaaattgagtggtgaggaaacaagtattagatctagtcatggtcacttggtcagatgatcattcagcagttgtgtagcacgtatcagtcctcctcgtcagcttcgtgaaaaggcagcggaactgtttttaccgccctgaatttgcctgcattgttcagatgctcgttctccagcctgatataaaaaaaaaaagaagcatatgccacaggtctcaggatctcatttttcttgcctaaatcctgctactgctttttctgttttattttttaggataagtggttgttcagaactctgaaacttcagttacctatagaaattccaatgccctctccggatcacctcgagagcagctagaaagaatgaagtgaccctggagtccaaactcccaaagtttggatggatcacggtttgtagccatgcaagccttagcacaaggttcagaccctgcaaaagttcagacaacacttgagtgtttggttcacttctccccggaacagattcattgcaaattcagatcaaattgcgtttccatttcaatactatagtgtggtttaaatagtaggttggatatcggttgagcattatcgatgatctgtgattgagagattgagagtcgggtttgtcgattggacagtgtgtgtttgagcgtgcagcttgtactgaactactgcaaatgaactcgttttggctgtgcttatacacctgtctgaatggggatagactgacgaacatgcataccattgacaagtagtatatggacttgctcttaaggatgaggtcattcctcagccatggattcttggagttgggctggagcaagccccagtccttgacaaagtcccagtagagctgatacattgttgcagagctggagacgatgacgaggagtgagagtgatccaaggctcctgtccttctcgtaggccactttggcgccggcggcgagcatcgccgagacgtacttgcccaggtttaccaggtggcccgtgtcgctctcatcgaaccaccgtcttgcacactgattaacatacacaaacattttcagaaagttcagaaatattcaggaagttcagagagtttttcttttcagctgaacagagtgcattttgttttgtgtgtgtgtttattccattttatcaataaatgtgtattccaaactgctgatatatggaacataaaatttgcatggttcattttctttttttattgaaagagcatggttgaaaattgagaattgtgaaggacataaggggcttgacctgcatggctctccagtagtagggcaggaaggaaactgcataggccaaatctctgatatgcttggtgttgatgcagtatccgtactcctgtgttctgtagcttccactgatgtagtagcaagcgacgtactcgaggcttcttagcataggcacctgcattttttattttgttctttcagaaagttaattatctgtttatccccattgttttttcaggtttcagttgaatgcaggacatggattgagtggtttaagtagagcatattcagtagtacctggctgcagagctgatctgccatgaagaagtctaccattacaacctgcagacattcagaaaccatcatgatatataagaacatatgtagtaatttggactaatttggcaacattattctccatgaagagattagcaaaagaaaaaaaaagaaaagatgtactgtggtaccttgtagagtggtgagaaaacgatgttcctcagtatcctgaggaactgaaaccgagtggagcgatacaccatgttgaatgggcagaacagcagcagcaggaacccctacattcagacatgcagcaccaacagattccattactactatgattattctcattctgaaacgatccagttgcaggagaacaactcaagatcaacgtgtccatccaatgagcaagaaaagcatgttcttaatttggttccttgttgacagtgacagtgtgacactgacgacagtctgacaggagggagcaagaaagaagagttcaccaggagcaagaatccggggatggcctgggcgtggaatcccctgacggcgagggagaggtgcgcgaacatgacgccgacgatgacggccatggatgcggtgcagacgaggaagacgtcccggtacttgagctctcttccggccgcgaactcgaagatgaagctgtagttgatccgggccttcctccacgccaccatgttgcacccgtacatgaacaggtgcaggaacattaggctgaacatgctgcaaaattatccattgccattcatgtcagaattcagatacagtattcgatcaacgcagaatttcagaaaatgcagagtctacatgcgtgtacctgaaaacagggtagacggtctccatgtagatggagtcgcgccgctgcgtgtacattccggcgatgtgcgccatgatgcagtagcccaagaacagcgccacgaagcatcccgtcatgagccctgcatatacatacattcagagtggtacaaagattgtcattgcaaagtggaaactgcatgcagattcttgttttgggtttaccgatgaagaatgtgacagtgtgtgactccttccgttgcgtgggcttgaggtacttcatggccttgcgcctgttgccggcggcgaagtgcctgacgaacacgtcctccacctcgtccatcagcttcagagcctcgccggagctgttgaagtaggagctctccaccgccctgaggtatacggacagcacctgcttcccgctaaccttctcgaacttcttcaggatcttcacgaacgccatcatgttcaggttcctgcatgcatttcacatcacacaaacagttctgaacttctgaatctgaactgaacacacatggatttcctagaggatgacagattagcagttgattaaattaccggtaggttgtgaggtatccaagacctttgtagagctcgatgaaggcgcccttgatcatcttctcggcgtgccggagcttcgtcttgttgatggtcgtgaacgtgatgccggcgtcagagtcgcatttgttcttgggctggctgacgagatcgtcccggaggaggtcggtgagtgcagagattgtcctgcatggcgtcgtcagggggatgttgatcttcaggttcttcctctggcagctgctcactgtcctccctaggctctgccttgacaagcttccagaatcttctagaccctgctcagccgaaagctcttcagggtctctcatcaccgcggtttcgtgttggctctcgtccgtgtctgttgctgacgtcacgtacctcgtggactcatcctctgttttgagttttttttataaaaaaaatcagtaattaatattgagtgaactatatagaactgtagatttttttgcatgagggaataaatgccattattttagatagctgtcataatttggcatatattcatgtatggatgtcatctgcatgttattcttctcgaattaatgaggggatagcattgacataaaaaagaatctccatatataaagtaacttttgcaaaaatacaaatactttgaccttagtatagaaaaactacttcacattttcaaaatgttactacctagtatgatattagatatttcataatacaataaatttgaatactagaaaatgtctaatcgcatactagttagtactcattctgtttcatattataatttgttttggctttttaaatttgaccaagtttaaaaaaaaatagagcaacacttatagcatcatattagtttcattacatataacattgaacatatttagatagtttctttgttttgagttgaaaatattgttatatttttctatgggatcaaacttaaaaaaatttgacttaaaaatcaaaatgacttatgatatgtaacattatgatatgtaacaaagaggaagtacatatctaaaccacaccatggaaaggccacaagggtttagcattaagcttatcaccaaaattagactatgtttataactccatcagaataatattgctagaaatataaactctaaaatatgtagttttatgataacttcattactaagtcgatatgtagttttatgatacttcatattaaatccatgcatggttttgtgatatattaatttggtatttaaatatagttttatgatagtttggtcaaagtatatatagttttttaaactcgacctacacaattatatatgcttgtaattgtcaaggtgttaactgtacgcggcatatatacctatgcaaaagtactctttagaaaaagaagaatatataaatactactataccaggtattatcaggagggacaggatgcgacactaagtaaagtaggatgttgaggttgatatgatggtcgtgccaaatgcagacaaaaacgcaagtcattaaagacatccacacaattgatcaggggaggatattccattattcccgggcaagctgctcacgcacgtaccaataccatacgtaccatgaaatgaaatgaaatgaaatggggttgggtaattaagctaagctaagctagttgctgcgaatgcgatcctacgtgcatgacaatacctgctagctcatctccatcctctctcaccaccagcttcccactaaccatggtcactacaggagagagagaaagagagaggtagctcaccggcgccggaggtggcggaagaagaagaaatggaggggtcgtcgccggcggcggcgcggtggtggccggagagagacgacgacgaccgcgacttgagtcgaggagtatgtccatctgcttccggagggagtgacctctgtggaggaactcctcctccttggccttgtagaagtggttcaccttgttcagctgcgcgtccagcctcgcgaagaactccctcgccgccgtcgccgccgtcgtctccatctccggcgtcacctccgtctcgtaaacctcccccctgcccactctccggcgcacctattttccatttatatatatatgtgcacacacagtacatgcaaaagattcagtacacatgcatggctatggcttaattgcaaaactgataaaaatggtagcacaaggatttactgtcaattacttgtatggctccagcatgatcagcattattggagccaaagaaggccgccgggagcttgtgcaacaggagcctgcagtgagacaaattataacttgatggcgccgcaactgattgctgctgctgatgatgatcatgaggtgttgaggtggtaattatggtcccttggggagaataatcatgctgcatcctcttaagatctttcttgagcaagctatagtccacaaaggcatgcttccactcagggacaagctgcccttcaaattgcttcgagaacttcaccatggttaattctatatgatcaacttaattaacgagcaatacgcatgcagctgctaattaattatattgttgtgtgctgtgctgtgcagggggagccatggaggttgttatatagcagctagctgatctgatgggatggaatggaataataatctctctctctctctatctttgcaggtgttgcgagacaacgcattatattctcagatatactacactacgcgtacgtgttatatctaggccagctaggctatatatctagcttagcttaaagcttgttggtgatggttgtgctggattggattccaggagagaagagagacagaatcaagagaaatagtact

SEQ ID NO: 18358 - DNA, 15110 bp, Oryza sativa
ctggataagctgtgctcttttagtctctgtgctgaatacttcatttctgttcatattatggtgtttactgaccaaatgtcttctctttggcctaacaaggtaatcagtgacctttttcttgtcagggtaataagcttctgactatgactaccaaatttctgacttcagagtaggcatgctgttggcctaactgtttagtgtttttggactagatattagactgaacattgaacaattacttgcacgtcgtttgtacttgatattggtgtgccatttcttgattttgtcaggctgcaatcaaggccttgacttagccaaaacaaaaaatttcacgctgtcacatcgaatgtttgggcacatgcatgaagtattaaatgtaggaaaaaaaaattacacatattgcgtgtaaattgcgagatgaatctttttagcctattgcgccatgatttgacaatgtggtgctacagtaaacatttgttaataatggattaattaggcttaataaattcgtcttgcagtttctttggcggaatctgtaatttattttgttattggactacgtttaatacttcaaatatatgtccatatatccgatgtgacaacgaaacctaaaaaggcttaacctcactggacattcagaaaattcatcatctactactataaatcactttgaccatctatctggaagattgtttcagacagtacagctttggaagcatccgtgctaatgatgatagatccttttcgttgtgtgtaaaaagccttttgactctcattggccggcctgattaggagttgatgatgactaatctgaccataataaagactgcccaattatggctgcttcctttgcgtctcaaagggagatgtctcccatcatagcttgatcatgcacaacctttgtttgttacgttatccattgcaaaatcgtacaccggaaatatttcttttttgcgttcgattcttctgcacgcctcatttggcatcgcatctgattgccctgtagattttgcaccgacgacgtttttatcggagagagaatatgccagtgtccgacagtaatcagacactcacgcagcttgaagaagacgaatgctaggctgctacctgatgttctcaacaggagaaacagagtttctttcagacattatcaaagcaggataaattagatgatctttaattatgttctgcggtagagatgacaaactttgagcaagatataattaaaactggtagaagtctgaattttgtacttcacagaaaacggagattggactaactgaatgatcaaccgcttatggtttgatgaaacaagaagtgggggagcacacaaagcgagtcaactcgaatagttcagttgattcagtaacaagagcagtttcccattcagttttgacacgccaagagtgtgcaggtgattgcagttaacacaaccagtcgagcgcattacatatggtccaagaagattaaccgcccggtcagaatgagatactaattaatactgaaatgacaacggatcatgccgggaagaaagtcgacgtcgtcgtggttggcaacgttgacggcgagcacgtcggagtagagcaagctcgccatgatctgcacgaggaggcggcggcggcggcggcggctgaccatcatgccaccagaggcctagccattggctttctcatacgagaggtaggtacatataatgtctgcaaatttatgattaattgatacacataaaaccctttgcatgaattgaattgaaccgatgaatggatggcaatggcgatggagcaggtgatggtggaggggttggcgtcgttcttggtggtgttctggtcgtgcgtggcggcgctgatgcaggagatgtacgggacgctgacgttcccgatggtgtgcctggtggtggcgatgacggtggcgttcgttctcagctggctcggcccggcgcacttcaacccggccgtcaccatcaccttcgccgcctaccgccgcttcccggtctggcccaagctgccgctctacgtcgccgcccagctcgccggctcgctcctcgcctgcctctccgtcaacgccgtcatgaggccgcgccacgaccacttctacggcacggcgcccgtcgtcgtccacggcacccgcctccccttcctcatggagttcctcgcctccgccgtcctcatgatcgtcatcgccaccgtcgccaccgacggcacagcggggaagacggtgggagggatcgccatcggagcggcggtgggagggctggggctggtgatcgggccggtgtcgggagggtcgatgaacccggcgaggacgctggggccggcgatcgtgctgggcaggtacgacggcgtgtggatctacgtggtggcgcccgtcgccgggatgctggtcggcgcgctctgcaaccgcgccgtcaggctctcccaccgcatcgtcgccttcctctgcggcacctctgttgggatcgccggctcgccctagctaccacactagagcttagccctccatatatatatccacagaataattcgcctccattatgatagctgcatgaacacgacgagcatcgctgcactgaaattgttttggaccaaccaatagagattttccatcccaatacggcccaattttgcatcgcacgtttattcacagaataagtctaatttatatcccttatatttacgtctcattacgagtgggcccggagacgatcggaattgtgttaacatggccaaaactaccgtccgcaaataatatgggccttcgcagaggcccaagttctcgtcttggcccagtggacgcaccatatttcaacggcccagattgcatcgaacatacaaataggactctcttgtccatttccacatttgaacagtgatttcgtcttcgcccaaaaccctaatccctctttctcttctcgcaccggcgccatgacgctccatgatttgataatgttgtgctacattaaacatttactaatgacggattaattagactcaataaatttatctcgcaatttaccgacggaatttgtaatttgttttgttattaatctacgttttatacttcaaatgtgtgccgacatattcgatgcgacacttcaaaactttacactactaaatctaaagagccccttagtacaagtccaagaggcgaccatctcagatgagaataacgagagattgatatctcccctttgcctcccccgtaaagatgaaaatggtacggaaattttccggatttcggacttgtttttggaaacagaacccgttggtcggaattttttggaaacggaaacaaattcggaaatatttcctcggaaatggaatcgaatatgataagggcagtttccgtcggaactcggaatccttcggaatctttctagaaacgaattcggaaattttccggaaacaaattcaggtttttttctcggaatcggaaacaaaaaatttctcatatacaactgattagcttaagcctttaatattctaaatgtttagatttatctattgaggtgtttaattaaataaagatatttttagtccaatactttagattttattttcctaattacttttttttatttatagatgaatatagctctttttctcaagaaagtaaagtgcacaactagttatattattattaattgataaaatatagaaatattgatttattgttttagaaaaaatatttagctgcatcttttcattaagggctttttatattagacaaatatccgttaccgtatttgcttcgattcatattcgtttcgtttttgtattcgataatatttgattgtgttttcatatctgaggttttcaattttgattcctactccgattccgaaaaagcaatatgaaaaaaaataacaaatgtggtttccgtaccattttcatccttacaaatccaccgttaataagtagctagcgcaacaattattctaggaaagtagtagtacgaaaataaactcgatcgatcgagaggtttaatctgtccttcctctcgccggccccgtctcctcttcccccgccgccaccgccgccgccgccgcctctagattaaagcagagctacagccaggaggggcgcgcgccgccatggggcttggcaacgtcgccatcctcgtcggctccggtgagtccccctcccccccccttccgccgtctgctccctcctcctgaggtccacccgcgcacgcgcagccctagcttctcgtcgcccagccggttgactttcgagttcgagattgatactagatagatagatagatgctacttgcaaccatggcgcaggcgccaaaccaatcccactgccaaatcccatcttcttttttttttttgagaaatcccatcttcttgtattatttgctttagcagattccaatacatagattgatttagccttttagggccgggtttgtttagttcaactaagctttctcttcaaaccaggtggtttcataggaacttattaggtatcccactgctacatctgtcaaatccccccaacttattgcccatctaatatcatagggtgtatatacttaccggcttccccagtacataggcccttccactaaagaactaagtactagttttactcggtaccaatgtttatgctgtttgctgccctgcaggaattcttggatcagttcttgtaggtggtgatgcaaactccctagtgctggcgaggtactttctggtgctgccaaggtatggtaccttattgcccccatgccctaactatcaacccaaaatactactgctatatatgttataactcaccgtcacatgattcttttccccctcttagtttgtcaagaagcatggaaacgaagggaaagatacatcgtctaacaccgatgcacacaccgctcagctattatctcaggtcaaccatctcagacaggagatacaatctctaggctcaaggcctgttacagttgtcaccaatgctgctagatcaggtaagttcctgctgactagttactatgttttagttattgacttatgcgtgagacacagatcatacaaacataaattttcacatgacactatactttgtatacgccccaatgtcgacatctttgctaagaattaatgcgattttagagtgttagatatttctattaccttttgatttttttcagacttggtctgttgtttttatatctacatgttcgacagagctacaattgcattgtctgttcatatatagagtataccattttgcgattcagatgttcacatgttcttttctttttctttccttattattatttgtcatggtcttggctgggatactatgcactgctgattatcattatgttgttcactgcattataaaggttcttggacatgtgaaagtttttatagttattgctaataaactttcatcatgctcttttgcctttaaacatacacaattacatatggttacacacattctttctcaaatttccttaaacgacattcatgtaaatcctttttctgtaggacctggtacatttactataacagtggtggctgttgctggggctgttggctacgcctacattaagtggaaggtaatgtttgattctttcacctcaatgggagtacagaatgaggaggacataatctttgattattctagttgctattttgatgtttattgttctgtcattctagatcatggatgcaagtgcatattattacaatcctatctgcttgccatttcttgtttcgccgttctagctagtttctaaagttacattgatttgcagggctggaaactttctgatttgatgtttgtcacgaagcgtggcttatccgatgcttgcaatgtagttggcagccaattggacaaggtttcagatgatgtcactgtaagtttttaacttctttcagcaacgctgcactcaaacgtgttacttgtaattccatgttttcattgttccaaccaaaacatcttactggcctttgattttcactattcagtctgcaaggaaacatctcgctggaaggattgatcgtgtggatatcagtttagatgaaacacaagaaattattgaagggacaagggatgaggttggaactgtttttccttttattttttgggtttacttttatagtttttgatgcattttcagcgacctaatggcatttcatgactgacttgtaggtcacagtcatccatggggatcttagtgctttccaagaggatttacaatcagttaaccttgtagttcggagtctggtatgtacctcatactggaacagattctaccttatttactgaatatccagatttctaccttattaactgatgaatattactcatgtacttttattgtatcttgtatcatgcaggaatcaaagctcgtgagtctggaatacacccaggtgagtagaaagctctttttttaaaggaaaagtagaagctcatattaccactacaccaactaactcgtcgacatgctcctaatgctatcttcttgaaatcctgttaggatcgtacggctaatggaatatctgacttggttgagttcacccagaaagccactattcgtcaggcaagtttgaatgatctagtgattcattaatgccatgcttcttcaatactttatttaacaaaaccagttgcacctcaactatttgcatattctcttcctatatgcttattctgaagagatgttttgattttcaggtcccagcagcatccgttcctccagctattggatcttcagagctagttgttaggagggtaaaggcttgcacctttcccagctttgtcatggtcgggacatgccccagtttgttgactttggtacctgtgtttccggttgcaggtttcttcgttgcctcaatctactgctcttccagttctgccgacaaccacacctgcagctgaaccatcacctagggcagaggcaccacaggtgtggtttcagtttgatgttgcactttgttgtttgcaatttcagtttcctcttgcgctttccatgattgaaacgagctgttgctggacttttgcaggaggaacagtggggttttgtgagcagaacatcatcttgtagggaaggatcaggtcgttttcaggagcagcggagtgttgtgaccagaacgtcgtctattagggaaggatctcctgaatcttcaaatggagcctcatcctcaactggagcaagcacaggaacgaacacaagcacgagcagatttggtgggctgaggctgcctggacttgggtttcttgcaagttcgacgagatagttgatgaggtgtttttatttaagttaaaagatggtgctgccaggagctctccattgctttacttgtagttttaggttgtactagtaggagagaagagataacactagcagtgatgtgatggaacaacacatatgcgtgcggggctgggctcctttgttcttgaggaggccaaatttttgtagaaaaaaaagagaggaaaacatgtgctcctatctatctatctatctatctatctatagctatgaatgcatcatccagggcaacaccttggtctttgatgtcgtgatttttaacttgaagtgccaagattactagtacttggttaattaaatttatgacgaggagtcaactggttggttgcctttgttactagtatcttgtatgacatgttgatatttcatccatcttaggaccatgatttgtttcggatttcttgattttgtttgggatttctgttaagatcccgctaccgtatctcgtatgatatatatgatttgtttgggatttctgttaagactagcaaaaaaaatacccgtgcgttacaatggacgagagaattttaattttacatgtgtgcatcccttgtaaaatgctttctttttcttccaaaaggccataaataaatttagatgatttattcagtcgaagttgtgaaggaagtgttctgcatatggttcatagtttggtggtcggatttaattctttggcgttgtgatactttatgctctggtaatttggtttgtttgaaggagctctccgaaatgagcttagtcaagtcacattatctactggtctccatctattagctaattgaccaccttctcacacatatcatcgtcaaaccattatacttgttcagaaataatactcgagatgtacccatctctattaaagaaagcatttcacattgtaagatgaagaagaacaatgatatttcaaaggagaagaaggaacaaaaaaaaaaaggatgtacaagagggtaataagtgattagctgcgcattcctattaagaggttttttactgtccttcaggttatatagtaccaaatcctgaccgttaatctgacttcatcgaacagtgagaaatcgtcggtacctcatgtaccgcacctcctcatcctgtaatttcgcgcgcggcatctctttctttcgcgttttctcttccgccagataggcaattcgtggtggtcaacggcaggagaccggcgataggtggtggtcattagtgggatcgatgcgatggcggccgcattgcggcgggctcgatgcgacggcggccgcggcgggctcgatgcgacggttcgaggcgtatgaccagccagcacaacggttcgatgacggcctcgattcgatctgcatctctgccccagttcgtgcgtagtatgtcacgctcacgcacacgtccgcgcgacgcttcggtttccgctttccatgccgcgatcgccatttgttttttttttctgatatatggtagggccggaccactcggatcctgctgccggcctcctctccactcgtcggccggcctgccgaaacaagaagaatgtgagagaggagaaagagagatgaggggaaagaaagaggagactgacgttgacatgtcagctgacatgtaagcccgtgtgggtccaatgctgactcagccgtcacgtcggataaaacccgagtcaaaaccatcgaagaactggttttgattagttaagagatgccggatgtttggtttttcggtcggggacaattttgtaactcgatgacaagctgagggaccttcggtgtacttttccccagaatttaccatccgcaattaatacgggcttcgtattggcccaattgttcgtctcgggccagtaaacacactaaacgaaccgcggcccatgatatttcaacggtccagattgatcgaacatactagtagtaataagtcgatgccatttgaatagtcatctcctccaaaaccctaacccctccactttctcttctcgcgccggcgccatgacgctcctcgccgccatcaccaatccctccgccgccgccgccgccgccgccgtcgcggcgaaccccatcgtcctcactcccggcgccgctccgccaccgccgacctcctccgcgctccccacccagatcccgccctccgactggtccctctcccccgccgaccccgccctcgccaccgccgcctccttcctctccacctccctctcctccacctccgtctccctcccgcgcttccgctccctcctcgcctccttcctcaccaccctctccaactccctctccctccccgccccctcccccaacctcccacaagccatccgctccgtctccccctacttccccgccgccctcgcctcccccgtcgcctcccgagcggcgagcctcgctgagtacgacgtcctcctcgccctcgccgagtgcggcatcttccgccaccccccgccgagcctcctttcctcgctctccgaggccgaccgccccgagctcgtctgcgccgtggtccgacaggccgccgacctccgctcctccgagctgctcgcgacgctccgctgcttcctctcgccggcctccgatgccgcctacgacgccatgatgagtgtcaagaaccggtggaaggaagccgcggtgctagcggtcaacaggtgcaaggagaagggcgcggggaagaaggtcgatgccatggcgaggcaggcggcgctgctgctcatgatgggatacgatgggttacctcaccggaggtgtgcctgcattacctgtttgcgtctgagaatgtggactctgtggtcttcggcgcagccgtatcggagctggatggtggggaggtggtcaggctgatgaagtacctcaccaagtggatagggaaataccagaggttcccagaggcgcaggcatgcccagaggctgtgggaatgccagggctggagctgtgtgacattgtgccctcatttcgggtggtggctggggcgctaggattggtgtttgaccagcacttctcgcacctagcgctgaatgcagagttgaaggaggatttgaaggccgcggagatgatggtgaaacagctggccacagaagctgaatctgcagggcctatcctggacttgcttcgacgtatgcagcaagatgtgtgagacactaaaatgtgcccctcaattttttttactgatcttagctgttatgctcatgtccgagaattttgattgttttactgcattgcagtgatgagttatgtgctctattatctaatatcatagtatgataatggtacatgttctgtttggaacccgacatgtctttgagtggtattactacactgctagctagattgtcactcccttagttggtatgccctgcgatgtgctaatgcccgctggccactgctagttaaattgatgtgtaaaagcaccatttacaaatgcaaattcaaatgtgtcgtggtagttaactttctgatattatgtgggaagagaagcttcaaaatgctgccatttctcatatgagtaactaaattcgtcattcataacccaagccaattgaaatacaaaattgttcaaatagtttagaacttccgacaacaaacattttcatacataactactttaacattactgaaaactcatatatttgcttctttcgtttaattcatttccattgttgggtctgactgaggtgataaagcttaattcgttgacaaatttacttcttgtacataaaactgaatagtccttagaaccaattgtatctgtgacttcaatggttgaaggagagagaaattgattggctgttctgcatattctttgtgaaaatcaaataaggctgaacttgttgacaatctttcttcttgtgtgtaaagctgaacaatcctcacaatcaattgtttctgggacttcaaagggttgaatgagggtgaaattaattggctcttctgcatatgttttgtgaaaatgactctgtttatcagtactcagtagtcagtacaaatagttcagttgaaaacgtaaagatgacagcctaaatatataaagtttttcctagtctatgctgtttctgggaattcagaacataatcaattctacatgactttatgcaataattggtcttgatgctttccaatatgcttcttttttctgtaagagggatctacttgtagtcttaatagtgtccaaggaaatcgattctcactgatctgatcttataatctgaattcttgtttcttagatcagtgttcaaataaggaagcccttgatgtgcttcaccttactgcttgaaggaactaaatattttttcctaaatatatttgagaatgctgatcatacctcatcatttcaaatgctgaccaagtattccatcagacaaaatgatagagctacctaccaggtagttacttgtatgatcctcactaagtcactaatttgtttccaaattgctgaattttagattctggtatcctgtgttcgatccagttttgtgatttaagattattcattactacttgatcttttgacaggtttaagcttgacagtattacctctggtatctttttagtgtaaaatggtgcccatttttaattatgaggttacatgtcttaagtaatgctcaaatattctgaccttcttgtaaatttactttgaattggacacacccatgtgtaagatgtgaaatgctggattcacattttttgaagtacaaaagaaaaaggtgcatgcactgggagcctgcctcatgcctattgaccaatttaaacgacagtgaagacgagagtgcaacagatgactggtgccataggcagtagaaaaaggaagagaaatggagcataccagccaaagttgaagacgttctcaaccaagcgggctatcttgggatagcagaatagctgccaaagttgaagacgttgtcaaaacaagcggctatctttgtgttttctggtcccaaggtatgatactccagctctcctgtttaccccatcttagaaaaaggaaaaatgtcatcttttgcatattgaaagtggtaggtaaggcagttcaatcttcaatcttcccaaaacgagctcaagcttcctaaaagtttctttttattaaagaagtaaactttccatttatgttcatctgagaaaattctatacaattagttagtgcctcgagtacattttagtttgatgcgtcacttcttttgcttcagttagcaactaagctcgctgatattatctaggtctcatggattattaaattgtttttggttgttggctagctgggtttgcaatcgtccccttccccagtttagatatatggggtatactttgtgagattttctctcatcctttgagatgtatgtacctcatccttgagatatacctctccataaaaagaggtaccaaaattaatctaacaggttggaaaaggattgaaaacttatctttataaatatttcagactttttttttttacattttctagcggtatagatatttgattaagaggtatatacctcaggactaacactataacactatgaggtatatgtacctctctatacctcagaacgactagaaaagtcttgccagtgctaatcataaacttgttttctaatcagttaaaccggtataattttttacctctcaaattgtgaggtatatacctctcccagaatgaaagaaaacctcatattttgttggatgatgtgctctgaatcctgaagatctcctcgttgacgaattttgaagtgatgcttgcatcttaggcaaagtaatgtttgacaacatgagtcgtgcccaagccactatagtctaatgcactgtcctgcgtccacacttatgccatgactgacatactgaatgctagtattgcacattctagtattgttattgtgtcatagtagtgctatggtgctgaaatttaaagccacttatcttagcaagaactcagtgtatcaacattaacaaaaaaagagagctatattccatcctctaaaaaaaaaaaatgcctgatggaatacttggtaggtagctctgccgtgtgccaactcttgtgtgtggagtagttttgaccatttcttgcattcttggatggcaagtttgtcgcatcatccaagggtatcttgaagtgcgcaaagtgaagctgtgattcaagtatgccttggatctgatgagaatgcatcgacacgtgtgcctggtgcttccattattctctgtgcagcttcattcgctgaatgtggctgactagttgctcatgagtactcatgacatggtctcatagtatgagataaaagcctcttcaaagtcactaatggcccattaatcatgctgtttgcaagaggttgcggcagataagtacattgtagaaatgtttttgtagtggcatggaaaaggcattgcattcttttcttccccttttgattaaaagaatatttgaaagcaattggagtattggacattgctggtgagccagaaggacacctttaccaattaccaccacccaaaatgagcttcttttttttgtaagtagcctttattccttcttcccctcttgatgaatgcttcccttctgttcttttagacctcctcctgctgctgcagcagcagcaatggcgtgaaacttcgcggcaacggcactgcacggccaccgaatctgatcactgaacagtgccagtgagctgcatagtagcttggtgatcttgcttgttcaccttttatcatctcaacgaatctgagcagaagtgctttctgagttactgtcatgcatcctatcctcaggttaaataaaagggagatcgcatgatgattcttgtttgtgccggtagaaagttgttcgtttaatttccaagatttgtaggtggtgaagtgtgaaccaaggccaccgcaatttcggtcctagccgttggcatgcatgtaactatatgtaacaaactatcaatgtgcttttgctcatatttcctactcaattggcttctagcctatctagctgcctggctgccaacgtaaccttgtcctgactcctgaacatagaacaccattttttttctctgattttggattttcgcttgcatgcttcctaggctcgtaaacggtttgttttatatgaaaaatttctatataaattttttaatagttttcaaaagtaacttttcaacttttagttgtcaattcattcgtttatacacttaaatagcttaaaatatcagataatttatcaatttcagctatcttagatgggccaaagaataatgtgtaattttttttgcgtgctcgtgaaaaaatagatgggccgaagaaggctaaatgagtgagctagctgattttcatagaggagaaatcaagtgtactcccaacctcctggacccattattgaactccaaccttttcccctccacctcccatccatcctttatattttcgtcaatcattcatacttaccttttcgccaacaatttaattatagacaatactctaagcaaaccttttggggggtagttaattaagatcgcgagaattttgtacatatattccccttccacgtgtagttgatttgtggctgaactagctccactagacactagacacatgcataaaggatatacatactttaaaaaaaaaaactcgaggggaaataatgagcacatgaattaaattcttatatacaatggacacggaggatctatctttgaagcttgaaagactattccaaggatgtatatatgcttggagtagtcttgtagttgtagggactggttattcgtactagccgcgaattaatcaaaattgcattcaagttgatgcaactaaatgcggattatgaatgtacgtctggtgtatgcgtccatctaatcaatttactgctgaatttaataagcttaaattaaatatgaatgccaattttaaaa

SEQ ID NO: 18359 - DNA, 3492 bp, Oryza sativa
aaattaaaactagagaaaagaagaaaaagagagctacattaaaacacggtaattaaagcagcagcagcagctgttaccacggccaccgaggcaagcagcgaacgcccccgcgccgtcaccgccgtcgccggcgacgacggcggcgacctgtagtaccaagggtaccacggcacgatggggttgggcggaggcggcgccgggtagttgaaaccgccgccgccgccgccaccgccggcgggaggctggtagtagggaatgtagccgcctcctccgccctgcggcggtgggtagttccagtacgacgacgacgacggcggcgtgttggaagacgaggacgacggcggcgggtacgagtagccggaagacggcgtggagggcggtggcggacagtcggtggtgaccggcgtgggcggcggcagcaggcatgggtaggggcagtccgccgggtaggtgtcgccggcggccaaggcgacgagcgcggagaagacgaggatgacgagcaacctgtacgacgccatggccgcgagagagagcgagagagaggtggtagtgtagtccagtgaagtggtcgcgaggtagaagaagaggagaggggacgaaggggttatagctggcgcgccttttgtcagctcagctgtcgacatggccgggagcgtctcgttaactacactttttttactttactgaataaacaagtttatcatcgatcatttgaccaaggtttattcgaatatcataaatcttatgcaaatcttactaaacaaaagagaattatagaatttgaagggtggaaattgatcaaactgggagaaaagaaaagtaagccgtgatctactttggttttctgaatcattgatatgattcattcatgcaaaatctaatcgatttagtgaaacaccggagaagaaaccgccttgagctttcgttgattgacatgattagcagaaatggcgtgttgcatggatggatgccctgttccagattgtttcttttgttggtatgcaatgcatgcatcatagggtccagctgtaagtgcgaaacaatttatgcggttgcatatatgatccgtcgtatcactcgcgcgttcatcggatctatgtcaccatgcatatgccctctgctgtcacattctctctctctctctctcttttctcttaattcttgagtcgtaaaaaggagaaagaatttcagacttgatggatgtacagaaatgtgttttggaggcaaacaataatgggttcattgcctgatcgatcgtcaacacaattgataaattcctttaattaccttcacaacatccagacttaattctgacgaactatatatacagggtacagctgtagtagcattagtatgcagcttgatgatctcatacgtactctacatgggtctctttcagttccatcggcatcagagatttcagtagatccaatcggtttcgaactgcacgtcctacaccaccacatgacatgccgtgctttcaggcaccaaacaattgcctttcattcccgatatctccctgtatatatatgtttattcggatgtgattcagcactcagcatatgtactgaaactgattaagcatttcagctgagcttcccttcacatcacatcgaaccagatcaggggattggttaacgcaaattaactaaatctgccccctttttatttcctgcttcatctcagtttggatgcttaggacatccgcaatagttatttataggctctctacaagagatctatatcagcatatttttctacttggaagagattaaatgaagagagagagcaaagctatctactaacctggagatagtctatagagaaaaacgaggcaatggattagacagctatagatacccatgtagacataccattgaagtggtttactattaatctagtctattgctgagatgtacatgttttatagatagcaccttactttaacattgcgggtgctcttagtttaacttgttgaaggcaaaggctcaaactgatggggcaccgccctcaatggttgattcttttttatctttttggacaagaaaatgtgctttctttctgatagacttttctagctagctactaagagaaaagggaattgagctgtgccctacagctctatactcgctggccggccgcatggatcatcagaagatggatgcatgcagtatctgttcttctaacgtgtataacttccccttttcttctctctcacatgcatacaagtgattaaaattagtagttcatgaaagtacactgacttggctactcaaatgcacgggctaaaatcatctaattagatgcaaaggacaacgagtaagagtataataatgttcattatcattctgggttgtactaatattctcctgttgtctgaaaaaatgtgggtgcattttttgcgtgtgatcacaagcagagtcatgagcaaaacaggatcaagattccccacgccgttcatgtctgctatctgaatgcaccacctcttgagtattggcatgctagcttgttgatgattgattgactcatctgatcacaagagtggcaaaggaaactgacaataaatcaataatcaatggaaggaaggaactaatctgatttgagtatgtggatggatcttgcctgtcagaaaatctgcaggatgagaagcttctctgaaccactccagttccagcccaatattccaaactgatcagtggctgctactgttaaggattttgacaatttgaccacatacttcgctgcccaataaagtactaacaccgattgttccatttctactgtagccactatcattcatttgcataccagaccctgcatcagttgattatcattacaatggaactagtttatctcttcactgtaaacgccactatggtaattggtggcattattcaagcaatatactagtatccaacaaatctagcattgatagctgttcatctgaatgggcagaaagaacgggcatcaaagagaggatatatacaaggatctttcatttcatcacgtcatttgtctctacccatttgtccatagcgactgcagatgcttatcttcggacttcagacttctctgagagattgcgtatcctcagatctgtagtgtggcctagaatgttaggttgggccaagccaacctaattgagaaaggcctagaaataaagctaggaaggctttgcagttagattggcccattcacatcatatagtagctcttggtttcttgacaaacgaacgatcgaattcgaatgggttgtttttgtttgcttctgttcagcatctgcacttgcaactgaccaatactccctccgttttttaatagatgacgccattgactttttctcacatatttgaccattcgtcttattcaaaaattttatgcaaatatataagatataaatcacacttaaagtactatgagtgataaaacaattcataacaaaataaattataattccgcgaatattttgaataagacgaatggtcaaacatgt

SEQ ID NO: 18360 - DNA, 5148 bp, Oryza sativa
aacaggatggcatgttgaaactctcactgtaagtacacgtagctagctcttctgataatgcaactcttaattacatatttacatatctggcttagcttaattaccagtactgccatctaaaggagaagagcaaataaattgtcaattcccttgagcgtgccaactgccaagcaactattcagcacgtactgcaatgatgacagaacagatatgtgtaaccaggccaattcaacctaatcatcttgccaaaccacctaacattcttctctcctctctcactcgtttggtggcacaaagaatggcatacatgtgtgcctttgctttctgttacgaaggcagcaaattaagggcaccagtgctactgctacacatcaaaattaaatgtgtgcaaaaagtgaacatagtgtagtccaagatttgcaagtgattccatctatgctactgttaaagagagggaagagcattcattattcaacagggatcatgaaatcttgacttgctctgctctgagtttatcaggtcgaaatctaatccagcttgttaaccatatctctggattgccatgtgtaagtaggctgagttttctatttgctttgtgatttttgacagatttttgtaataatttggttctagcttcagtgaaagcaaaggcgccgggattttctcattatgttaaaaaatgttgtaagtacgtgcatacctgcgtatctggatgtcctagcactgtgagtaaacactactagtagattatttggactttgtgagcaaattggatgcagttcagtaggatgtctcttccaagtccaaaggagcagtagtactagtacaagaacaagtcaaattggtactagctgccagtaaagtagaacgactagactggactggtttaggtatcatggaagcatcagcaactgttctttctgaactctacccatcttagcagctctcctgataattttctttaaaagctaataaaataaattaataatacaagcaggcatggaattaaaacacggttcaatcgttgacagcaacgcggcaaccaccgaccggtcgatcgagtgcgactccatcgtcattttggatgtcctcttggacatggacgcatatgtgttcatggctatgctaattgatgatatcttcaatacactacttcactccagctaacactggaactgtgtagtacacactgaatttatgtttatataccatgccagtgcagtgcaccgatataaaaactcaagtttttggaacagagaataaaataagataaaattcttccgacaaatattcgcataaatgaccatttttgaactttgaatggaagattatggttcctctcttctttttagtttatagctccacaaatggatgtgcattcatttatttctagttaagggttatctgattataggtgtggcaataagctttgctttgtagactggttttgcagccatgttaaccgtggacccctaattatgccggtcaaattggttcgatctgtcacaaactcacaaatcacaatgacattgttctttttaagattaaaagaatattaattctatataggttatatttacgtgtattagccggttgtatttgtactaatgtaatataatagcgatggaagaatcagaatggtatagtcattggacctatctgcttggagttgattgttgatggtttatggaaacataattttttgatgagttgtttggtctctattagtgttgttgctttgaagtgggactgggtcccacatttatttttttcccatcttgtaataaaaacctaaggctgtgttaagatgcagaggaggtgtaatattcccacttcttaaaaaacacagagatttttgcattttctctcttatataagagaaatctttcataattttctctaagtttaagtacctcacttatccatgtaggggtaaaaacaacacgagcattgtaccattctgagagttgatcaagatatatgagctaattgccacatgtaattgaaatttgattagacatatatatggattattacagagtctgatgtacatctttcctatcaccaaaagggatcgatcaacaaacattacatgacaagaacaattaatttgccgacgacgatgacgacaacaacaacaacgtgaacatgaaccgtaaaaacgaaaaaaaaaagagattatcttaccggaatatatctcctctaatcttattatgaacacataataaagggaattaaaaacgccgtgtaattaattaccatacgtcgccgatcacaaggccaaggctccggccaccgccgccgccgcgagcaccaccgcgcgccacgacgcggcgccgcccgccgccgcgttgggccggaagccggggtcctgcgggtagagcgtccccggcggcgtgaggtaggacggcatgttcggcggcgtgaaccaccccgacggcgtcgggttgtagccgggcgtcgggttgtagctcggcgtcgggttgtagcctccgcctccgtacggcggcggcgggcagttggtcgacggcgtggtcggcggagggtaggccaccggcggcggggacggcggggggtagtagacgggcggcggcggcgggtagtagaccggagtcggcagcacgtcgggcggcggcgggctggcgtacgtgcacgtcgtgccgcaggggctgggcaggccgcacgcggcgcacttctcgtcgtcgcggacgacgacgtcggcggcggcggccgtggcggcgacgagcatgatgacgagcaggaggctgcacggcagctgtagccaccgtgccatggccgagagatcgatggaagaagctcagagcttttcttggaactgtgtgctctctcctaaagaagaagagagtagtgctatgctatagtgtgtgtgcactctcactttctcctctcttcttcttcttgttgcttcttttttggttgggggattcgattttgggtggttataatggttggcttctgctttcgcttttggaattggccaatgccagtggaggtcttcttctctgctcctttttatctctccgtttatgtctctcttttttggtagtgcctactaatcagataaacatttaatggttggtcttctcaaacagctgtatcggctaaattgtactatataagagcaaatagctagaccctttttcaaatagctataaccgagatttaaaacctcacttttaattttattcttaaaaaataaacctgaattttaatttgatcctgtggctaagtgtactatatactgtggcagcctgacgtaatttaaacgtctccattattatggctgtgttatttcctcactctgttgtccatttttgtgagagtgattggaatatttttcttctttctttctgtatctattctcaatatcatgatatgggtccccacagatcaaggggttgtcacaaatttgcaagtagtggcattttaacttttgttttgtttttaggaatcagggttaagaaatggggagatgctactaaccatgttgtgtagaataagttacagatatgctaataatttgtttttcatcagaacgttggggcctaaccttttgatcatctttttccttggtgacagtgatggaattggattagaccttggcgctccagtgatgtcatttgtgaaatgcacatactactaactcgtggactctctgtagattgacaagtggcagattacctctagtaccttttcaccatcaacaaatgcactttcaaagaccaggcctttgcaaataaaccaacttattgtgtcaagtttagtggtaattgctactgtactagcagatcagatcagaaatgtatgcagatgtgcacatcacaccagtcttgttatagcactcaactaaaacatgctaataggcatgactcatgaggcaccctatcttgctcacgaaaattttagtgctttaatcccatattatacaagggtgcagacaactgaaatatgatgagaattttgttataaaagataaacacaaacaagtcagtaatattgacatcagaaaataatgagtatgtaaggacatgcaattctgttaggcaacattaaactactgaatgattggcttattgcctcctgaacttatcttcctcatgatttcaggcttctagttaatgccgcttgaaacattaagccatgaagctactgcttaccatacacacaaaaatcaaatttgagtaacaatttcatgtacaaagaatttttctacactttgaaactaagttcctggttggatttaagctgaaatagtgcaaatatcaagtacatatgtatctttcctttcctttcctcatgaacaagaaacagagtgactagcacagcgagagagaaaaagaggaactccttttgacatagtgtttgcaactatatatctgatacaatacaaaggctatcaaattaccatgttacatggcatcacaccagctgcaatattcagaaacatcatggaatctgaattcaactcatacatacaacatcaatggcagtgagtacgattcactgcaaaaacaccaagaaagcagaaaacacaaacaccaccggaatccatgccagcgccgccgtcctcgcatggcatgccgccgatgcaagaaaccctggatcctgcgggaacatggtggtcgtcgtcgtcggagacggctccgcccagggaaacggctgcgtggagatccccgccggcgtcgtcgggcagaacgggaacggcgaggtggtcgcaggtggcgacggcatcccagacgacggatcgatgtcggccaccacgcgggcagccggccacagagacacgacggcgacggcggcggcggcggcgagcaagatcggccgcagagacggcatattcgctctccttctcgagagaatttgtgccaaaaggaggagcgagctcactaatccaccaagctaatggctaaaagtagtaagaaagatggagatgttcgccgccttgagagacgtcggtgaccgtccgatgccgatcggacggctgcccgttcttgcagttgacggcggcagaatgataggcttcatttcgtcttctccttctcttctgaacatgatccactatgttcttattgcaatcttattactgcgtaagtgtgaggtttgtgataagtttctaaattaagctct

SEQ ID NO: 18361 - DNA, 3801 bp, Oryza sativa
tgcgtagctcgcttgaaaaccaagtaactgacaactgaatattgttcagaaaactctcaatcatgtgtagtggagtactagtgtgtatggtcactgaaatggcacttttaagaagatgttgctattgccttttgcttcactactcggctccatttatctgaaaagattaactaaagtcccttttctaatcatggctttcatgagccttaaacccaagtttttacagacaagtgacaggtcgatgaatcaggtcactgtaagagcccgtcaatgcattgtgcagagcgtgcagcatcagtgcaccttcagctgaggacattgtgttggttgtgatgtcaagcatgctgatttgaacctaatacacaaaaaagaagaattgttagaaagtttggagcatttgcaagagatggtacaaaggagggcaggcctaggatggtgaccggccaccagcaacgatgatctgtttgggagcacacacacacacattgagacatatggctgagaaagagaggtctggaaggggaggactccaagagtccaagtaacaggagggcactgatgataatgcaggcttggaaaatggaaagccatagccaagtgggtagcaaacaaccacctcttgttccactggaaaggcaaggcctgcagtgcagcagcagcatatctttgctactgaatactcatcctctcctaccctatccttcctagtgtccattatcttcactcacagaaatgcatattctttctacttctttttggccatgtatcccaactacttttcaatcatacatggaatcagaaatgtatggtaaatactaatatagactcatgaaatttgtgatgagtgaaatggtagaactgcagaaatgaggagaggcaggtcttgttgactgtgacaagagcgattgatatataaaccatgaaagataagctatatctgccaattttgttgtatccctgtgttttttttaactgactgactgacatatgaaagaaacagttaaacttccagctccaggcgatgcccatagctttgttcttgtcatgatcagttgaaaagatcggagcatctggtatctatcactctctctttctgtgaaacagttcctaattttgcactgaatcagcgccactgatgcatcttagtgaagatacttctgtctgcaaatcaacttcacagcacattccccatccaccaactctgccattagtatcccgtctctagtttcagaagagtagtatctttctttccacagaatggaaaagattacaagtggttgctgttcggacggtggttgatgacttgtcggtcgtgacatcatacacgagcgaaaaggaggatccaatactctggattctgaaattccaacgataaaagatgaggaaaagataatagtagggctcttttttacagaagttcagacttcagagtgtttcatgcatggggatgttcagagaaatgacatggattaacccataaataactttgacgatccaaaaaggtctcaaagaatcgctatccgctggttacggatgttgatagtcgtctttaactcattattaggtaaaatacaagtctacttttggtgcatgcatgggcatggcgatggagacttgctgttcttcgttttcttcagaagttgcagtgtaataaaaccgacaaatgacaagcaaaatacccagctagtcaacctgatccagcccagtatatttagcccacgcatgttgtttacaggcccaaaatttttcagcccaagatgaatttgaagagagcccagcccagcctaatctcctctgttcgaacagaacagagtatatagccatccatccggtcaaagcagccggccacgtggcgtgtccccgttggctgtactggacgcgcgcgtgcagcctgcagcggagaccgacttgaccgctggtctccggcgacgacttgtcagccggtcaacatgaagtgtgtagcacggcgacgatttccggtgcacacatgctcactactgtcgcaatggcaagctcatatactgtctgaccagcattaattccggccagccgcgagccatggcgagggcaatcctcctccatctccactccgacgaaaccgtgcctctcctcgtcgtcatcgtcgccgcggtggccgccgtcgcgctggtcatcgtgtcgctctgcacgagcagcaagcacggcaagctgtggaagcagcagcagcagagaagtgggtcgtcgttgccgcagctgaaggcggaggaatcagcaggcggcggcggcggcgccagccggaagcagctgctggccaccctcagcggcatcggcggaaaggcggcggccatggcgaagatggtgtcgtggaacaggcggtcgtcgcggcagggatgcagcagcgacgacgacgacgaggccggcggcggcggcttggcggtggaggaggaggaggcattgtggaggaagaccatcatgatgggagacaagtgccggccgctgcagttctccggccacatcgcctatgactccgacggcaaccagctgccggcgacgaccatcagcaaggaagcagccaatgcggatgcggtcaacaatatttatgtttaacaatcatatgcatcgagaggaaaaataaataatagtaattgtgtacatgagatgcagtgatgtacagaatgacaacctgctgcgaaaacgtcgaaaaggtccatattctagtggttacaacttacaagtgtcatagtagcaccttaagtcttaggttggactcaaatttttcaggatttaacgactttatgcttcagtggtagacgatgtacccatcaatagcgagatgcctataatgactttgtcaatttacagtatttactggtccagccagtgtctttataggagtgagtgtgtgtgcattgtgagtgtctattgtactgtgtaatttaaaaaaaatgacaacgtgctagctacggagggaggaagaagtgtaagtgggacatgtggtatgtatgtatctatctattatattattaaaacagctttgaaacgaggcaccacgttcgctgtgggggctagaaattcccacgttaatcggagaaaaaagaaaaatctagaccgttagattatactaggactagactttgatggtgtagattaactttgataatagaagtctgaatagaaaacaactgctagatcaaacggacaacactgatcaagtactagaatacaagtccaaataggtggacgtactcctgctttgattctttccttatcctagatggatactaaggatcaatcaacagatcaggtgattaggattcaaacacagtgcgtacatatatattttggagccagtataattagaattaaaatgtgattttttttttacctatggatgaaaaaaagaataaatagaccagaaaacttatgcattggtagagatacatctctccgtccaactagctaaggcgtgttcaaatttagtacgatcttaaaaactaaagtttaactttaaatttttcattgtagcaacaaaatcataatcatataaaattaaatttaaatgaatatccaatgatattatttttaacaactaaaatttaatttataataaaatacagctttgaaagaaggcaccacgttcgctgtgggggctagaaattcccacattaataggagaaaaagaaaaaacgaaaaggagagtccaagtagaaatacaatctaaaaatagctaaaattcggaattaaaaataagcaatattgaaagaagtttccatataagaacccaatacaagattaatcgaaattcgaaataaaaataaaata

SEQ ID NO: 18362 - DNA, 2242 bp, Oryza sativa
actcgtattccagtagtacaactcatctcaagtctcgactcgatggagatatgcatgcgtatatgcatatggaactttattagaactacgaatgcatgcatgcacgcatacacgtgtcgcgccacctaagcaaacgcttggttgtgcatggctggcacagctagcgctagctgctgccgtgacacgtgtggctgcctcccttcttcacatgtgtacatgcgcccagggtggccatccatccatatgcatgcctcacagtttgtgccatccacaaactgtgtcgatatgcatgcatgcgccgcaacaacaatgaagcggtaatttcacaccaaaataagtacatttcgatctacttctagctactttcttcatcttaaaatgtagctgcctaatactagatgtgatattacctaatactatgaatctgaaaatgtcacatctaatactagatagctatattttaggacggaggtagtagcagtataagagtatatatatatatatatatatatatatatatatgggggaaatatttcctatatgggcacagctagctatccggcccggtcgttaagatcgatcgatcgcgccatgcatatgatatgcactgccattatactgcatatgctaccattcgatgccatcgtacgtaatgggttacgtaatatctacagatgcattgcacccagtcatgacatatatattacaccatctagcctaatattttaattatatgtatgtacacacagccaaatattcatacgtaagcgtgctgagtatatatgattgattgtgcactagttgtactttgcaccatagatctagaaaggtgtgatgtgtacatgtatcctgctagctacttcttcctaagatgatcaacaaaaacaatatatgtaattaactaccaatctagttatattagctactctctggtatatatacatcttaattagcaaataaagcaataatataattaatgacggcaaatatattatttatgtcataataagggtaactaattaattggcttaatttggccgtgcatgctaacagaacaaatattattagttataactccttagaatggattaattaaccagcagagtattaaaactgaagattaaattaacatgatatatagtttgcaggtaatgcatagacaggcaacaaaacataaggtagctagctaggaacatatctaaattaattaatatactgatgatcgatgaggtaggtaattggtacacgagagaacgcacctttagatgcatctgttccccccggtatgttaaccacgatcctgtgcaagaaaaaagatgcagatatatatgcatatatatatatatatatatatatatatatatatatatatatatatatatatatatatatatatatatcaaattaaggaaactaacttgaagagagctacaagctagtgctagcatatgatcagtaatatatagatcatgcgcatatatatcctatgcaatcatgtatatggaggagtgatggagacctgagagatccgatccctaggtaggcatacgatgaatcatatcatatcatatatatgcatgcaagtgtcaagctagtgtacttgtggagaattgacacttgttggtgtgccacatcccatgggatggatggatggatcgatcagtgtgcatacataccagtggagaaactccctcatggatgggtcgctagggctaggtgcgtccgggtccgtcatgatctgcaagcatgcgttggcgagcgagcaaattgatcgatggtcagtaaattgctagatagataggtgatgatgcatatatatatatatatatatatatacagataccagggtgtagaggtcgttgcggcggccggagatgcggacgaggggagggtagtcggcggcggatgggcggacgaggcagccgttgctgatgtccctgtcgccgtaggcggcggtcatggagatggatggaacgaacaaatccaccacctccccgatcacccgtcccaccaccagcggatccacgaaacgggccatcgatctctggagatctcgacttgagctcagctagccgcggccggcaactgtctgcgggcactgctatagtgcggcgccggcgccttctcagctgctggtggctacttaattctagcggcagcacgcacgcgcccactcactcgatcatgctatagctaagctctatctaggactaggagtatatagctacaaatacggtatgcg

SEQ ID NO: 18363 - DNA, 9273 bp, Oryza sativa
tcagttttaaaaatttgggttaaaacttttgaattttgatatggaagttttcaactagatatgaaattttttgaattttgagttgaaatttttgaattccaatatgaaattttccaattttgagatgaaaatttttaattgagttggaagtttttgaaatttgagttgaaatttttcaaaatttgacttgaaagtttttaaatctgggttgaaaatttttcaaatttgagatgataagttgaaagttttcaaaatttgacttaaaaaattcaaatttcgagttaaaagttttcaaaatttgactttacatatagatttttctttttcaatctagcacttaaaaaaaattcggcaaaaagacaaatcttactttaattatcgtcattatctaaaactaaccgtattagttagcgtgtatgtgtaaaaaaatcccggaaaaacaaaaagaaagctcacgggtgacaagggcccgccacgtgcatgcgcgcgacttagagaagtcgcgcgtacgctaaattagcaaaaaccgctttttccctctatctatttctagaatcaacaaataaagttattttgaaatagaagagagctccatagatagtctctcaactcaaagttcaaactatgaaactatgagtacgtgtacatgttggggttcatattcgtatttcatacttgatctcaggctctcagcaagatagatagatatatggtcgtagggaagaaactgcgcaaatgctaatccgcggtgatatatcttttattgggctcaaattgcctttggcttatgaatcaattaagccttgtttcgtcggcgacgagggagcaactgaatagagaaataattaaagaagctgcatgagagatcgatcaaattaagaagctgcaatttaataaagaattctgcaaacggatcgagatgctgccggtcgacagagatgatctacgtagagtaacttggccggccggaaatcgtggtttacatgcagagtctcgacgtttgtgagccggccgccgacgttaattatgccttatttctgccggtgaatcgcccggttagaagaacaaaactccgaacccttcggagaagaaatccccaaatttggcccataggcccagtcggaataaacactccatcagccatttagccaaggaattgcgtacggcccataggcccagtcggattagttgaatactctgcatcatcagggtcacacacccaaatgaattttcctgaaccagagacagagtgcggatggatgttggtaaaatggtactaggaactactactgtccacgtcgcatcctcctcgggggcaccgctttggaaaaacctcttcgtgcaaggatattgtcattagtctatgcattggcttcgaacttcagtcctaagcctaaaggaggctttatagctccacattttgttttacttttctcagtttgagtcctctcttctcttatttggtgtgttcaacttgtcttgaactacactctcttctgaagtggatctttgtaataattggctgtagttctttttaaacaaaggccaagatattatattccactatctaaaaaaaactactactgtatatctaatctgtttttgatatgtactgtatatcgtcagtaagtatcgtcgattaattgaaagctgaagattgcgcatcgatcgtactgtgttagccttactgacgagtacagtactgatatttcagctagtgttgccctgcccagctgctactaaggcttccatcggatggcctaataagccaaagaaaaggtcaaattttaaatttttaaacttaattttgagattgattttgagatatttttaacgttgtttctttttcaacattggcttttaaatcaccaagaacacatatataaaagttttacctacaaattcatttttattctctaataaaccattttggcttattagggaataagccaaacaatggggacctccatccgtactgttagccatagtagtgctctcgccaactgaaattctgaacatctgtctatatatgtacaccatctgaactctgaatttatcacaacaaattaaagagaagcatggtgggtggatacgcgtgcttagtcagtagtatcatactcatactgctagtaatctgccgttgcactgcaattaattagagaactaatatactagttaactgagatatactatatataagctagcaagactcggagtgcatgcatgctataatcaatgaaatccgatctgcagatgcgtagctgcatgaagccaagaaaggattatccactgatcagcaaggaatagtacagggatgcactagttgttgtttactctaacccagtattatcaacacataactatataattagtgtggtggactggtagttagtatgtcttgatacagaatttgtacatataatatataattaattaagctgtattaataacagcgagatgcacggagaggggccatcggtcgagtgagacttagcttagctatactatgcgggctgaacgactactgcgtcgcacgtccgtcgtcaagactgaattaaactaatgaacatataactaactaattaatttaaggcggttgcagatgatagcatgtgtgctgtgagctagctgagctacttggccatgtgaagctctgaactgaaaagcttcattagcactggctagctaagctatagtagtagatcaatgcatgggtcgcaaaaatgtagtaactgtcgtggaagcacgtcgaagttgcagatcgcacacacacggtaagcacacgggtttaattaattaatttgtacatatgtatgtatatatacctacattaattaatgcaagacgtgcatgtccatcgagtttgtcgaccgatcatcatgcatctacgagtagtacaaattagttgagtattactctgttttagttgtataccgtacgcctactaaacaaaataataaaaataatatgctgcatgtgcactctagctagccttcccaatccagtaacactccaatatatatgtaccgggacacacgcatggcctttctaggattaaattaaccagtagatgtgtagaaaaaaatttgggtcgaattgaaatggcctttctaggattaattaaattaaccagtattatagaaggacgagaaattaaccaggttttaaggttgcggttcaagaggaaaaagtacttagaaaattcttatccaagggcaaaagcggcagctgaaagtctgaaacaaccatgtaagatcgtatgacaaaagggagagactactatagcaaaactggaacaatgtttcaccctaaatgtatgctctgtctctgtctgtactctgtagatgccataattaatcctaacaacatgttgagtgcttgctcatctagtcatctgacaattctcttgttcttcctcacctcacatacatgttccgttgctaattaatattgcctaatgtttgggtttcttactctgattttttttgcgcagggatatcttactctgacagtcttatcttttcacttatacttatagttattagccaaaatttaaattttcaactttaaatttggaggtgattttaatgtttttttcatcgaagtctaattttcagcattttgtaaatatgtcgtttggcttatttgagaccgtgaatttgttaagccatattgatctccccattcttgcaagccatcgaaggtccaatgtgtatagtcatgttgtttcatagaacccataccaggactgggcttgtaccatgcttcttggaacaagcagtataagttgccattttggaaattaggcattgacattcaatatctgcatgatattctgacaggagcaattttcattttccacaaaatgtatgttacacatgtgtgactggtaattaattaacagcctggattttttttacattttgacactttctaaaaatttattttataaatatacccttagacaaacttctaaaaatagactcttttttctaagctagtaaccctaatgtcaaggtccaacgttattgacgccaacgacgatggcgccgacaactttgccgctagcaaccgagatgtacatcctatttgtaaaataaattttatgaaaaaatttaaaatgtaaataattttcttacaaataggaccttgttgtcgagggtctagttgtaagaaaaaattttacattctaatccttttataaaaaaatttacatctctttgacaccgatcctcttcacatctgcaagacttaactgctacgagggctgagattcgcattgaaacattgaacctcggcgtcaagaaaaagggttcatttatagaataagtttttctaaatttctgtttgtaaaataagttttaaaaagctaaaatataaaaatccagaattaatggttgtatacagtacaatagccattacatctccagcagttacttttaattttgtcactacgtgcactcgcgacatgatgtgtatgatgcttaaaaaagggtgcttaacaaagagaggggctatgttatgaagcttgtgtcattagcatagtcctagctaactagctagcctagcatgcatgtcaaatatcttaaactagcatcaacttgatttcaatgccatgtgaagagaggatatgatgccaaggagtgtctctcgatcttgagctagctagctggaacatgcatgtgatcgagtggcttgatctctagttaattacctcctcccatatatgatcctagctagctaacaagtgtttatctcaccatgcataattgcaagtatattccgttcattgccagctcaaaacctctctaaaataccacaccgtcttaacaagaatcctcttctcaactctctctatataagtagctagaagctaggtatacctacatatgtttcatgcatactgagatcgatcgatccatcaggttgctactaccaagaacagaaaccctagctagctagttaaacatcatcgatcaccattagactaatttagagctcttgctcgatcttacgatacgcaacgtagtgatcacactgctgtgctgcatcgtatagtagctagctagctaaacacagagcttaattagctgattaattaaggtagatgatggcagctcaggcaagcagcaagcgcggcatgctgctgccacgggaggcggtgctctacgacgacgagccctccatgccgctggagatcttgggctaccacggcaatggcgtcggcggcggtggctgcgttgacgccgattactactacagctggtcggggtccagctccagctccagctcgtcggtgctcagctttgaccaggcggcggtcggcggcagcggcggcggctgcgcccggcagctggctttccatcccggcggcgacgacgacgactgcgccatgtggatggacgccgccgccggcgccatggtcgagaacacgtctgtcgtcgccggcggcggcaacaactactgtcatcgcctgcagttccacggcggcgccgccggtttcggactcgcgagcccaggctcgtcggtcgttgacaacggcctcgaaatccacgagagcaacgtcagcaagccgccaccgccggcagccaagaagcgcgcatgcccggtatgtcactgaatattaatcagatcactgtgtcaaagattaatttcacaaattaaaccagtagtgaatttcgagtgaaccaacagtataatttgtgtgtaccgcagagcggcgaggcgagagcagcggggaagaagcagtgcaggaaagggagcaagccaaacaaggctgcttctgcttcttctccttctccttctcttctccttctccttctcctaacaaggaacaacctcaaagcgccgctgcaaaggtacaataattacttttctgactatgtttaatttgtaattaacacggttgtgttttgatcaaattaaactggattattattcaagtgagtagtattcaatcttgttatatgtatatgtatgtgtaggtaagaagagagcggatcagtgagaggctcaaagttcttcaggatctcgtgcctaatggcacaaaggtgcgattagttctcagtataattcttttgttttaagttaattgcatggctcctagtctattatctcttgattttttttttcttcatgagaataactatatattcatgttcgtgcccgcaggtagacttggtcaccatgctagaaaaggcgatcaactacgtcaaattcctccagctgcaagtgaaggtatattgcaatactatgcatggatagagaccatccatagaatatatagtagtagctctttcagttcagttcaccgtaattgatagttcttcacttcagctcttatgtttcacgcaagtttagtgtctatgattaattagctgaccataatgatctgattctgatgatgcaggttttggctactgatgagttctggccggcacaaggagggaaagcaccagagctctctcaagtcaaggacgccttggacgccatcctatcttctcagcatccaaacaaatgatgttgtgctgctgacacaaaatgcatcaaatttcacaaagctaatattaagtttgatgcatgtaagatctttagaacagaggcaatgtaacagggcttctgctctgaaaagatgagagaattgttctattggactttcagagttggaaatcagtcgtgcatctagatgttttttttcactcttttttcctagatcaattctttcttgttttgttgccaaagcctgagtaatgtacttcagtcatcagagttctttcactttatagcaaggatgtagtgtaggtatcagttagaaaacaagaatctgagcactgcaaattcgcttgctactgtaaattacactgcaaattccaataaatgaatcctaaatagatgcagttaaatctgcgccctctgctatttattttctcttgtcagcatctgcatcttgttcattgaagcaaccaagcaagacagggtaaaaacagagagaaagctctagacagatcaaagcatgatgcaagtaaactggattttttttttaactttctcacggtcgtgtgcaagtaaactggattttattattagagcatgagaataatactccatatcatcctaaatcgtgaattgatcgagggaaccttcctgagacagatcagagtgattaatattttttatcatttgggcggtcggagaagcctgaatgaatgcatgcatgatcgtggaaatgttataattttctcactcgaagatcagcattgacctctacctgatctacacgaactgatgaaccatgtaaattattagtagtgactctacaataattttgttagaggccttaattggagaatgtgataaaatttgtattggctcctacagagcatgtattctgcccactgacaattttctgctacaacattgatagcatggcatcatcagctacttgtgtttttctccaagtcaaacaattgtgtaatgcaactagaactaatttggcaattggagcgtgattagaggagctctaggaggaatctggccagacttggctaattctaggatgttctttaacatagcataatatatatttccggtgtgtatgcatgatcaactttgcccaatcaaatgaagaactaaacaagtttaacttcatcaagtttatctaactctagtggacaattcaattgttattatgtgaggtagaggcaaagaaggcgccattttctctaattttcttgcaaataatacagaaaccagtccaaaaagtgattaaattgctagatgaagaactgcttttctggagaacagaaaaaaaaaacaatgacgaacatgctatagaaaaactggcaagagaagctatcctctgaaaccttgggtcatcatcaatgagatcaattctaatgatagcacttaaattttagctgtccaacacacggcatgatgatacatgaatcatgatcagatgcttgacatgtggtactgactgtcatttacatcttcattgaatcattatcacgagataattggtaagaatgcaataaacaacgaagttgaaatgctactaatccctaaataataaatgagataatggcaaagaaatgagagagatgccgtgttatgctaatagtcggtggctagagcacataaacagttctgtttgtcataaaaagggagtgaaaaaatagtgtgtggtcctaagatctacaggtttctaggtggtatcaatcgtgcaatgcttggagtcccagcagaagtttgagtcatgtgattgtgtgacaactccattagtttactggtttgacaatgggatgcaatgcaatatattgtagaagtcaaacaaatcactcaatgaggatacgtatgtgtgcttgtttccacatcaacatgcaggaaatgataccattgccattttaatttgtggctttagatccctagatgtttcccaggggaaaattataaaacatctgatgcttcaagcatttacaactgatggccatgaagcttgaaatacccctcaagaatttatattggttaacattttgaaaacctttcaaaaggtttcaaatatttgaaattttgtgtttattatggctttaaaccttcctattgtgttattggtgaatccagatggaaaagggaaacatgggggtgctattctgtgagcacatcatcctgtcctttgaggtcacattccagcagaataaaatctacagattcttcagaaccatctagtaatgtattgtattctcaattctcagtttcattcccatgtgacttttgagtgcacaccttaaattaaaactgcataagactatggattcatggcatcacatgtcattaaaaattggattcaactaaaccaaggacgtgggaggcattacctgcgtcgcaaacttcaagttgctttctcttccatctgaaacagaaaatggacaagaaaatcacaagaatttaatgcacatacgtgtgaagatgcccatcctgttcttttcttcccttctcttgttctcttgaattcagacacccatccttttcagtggcagaagccaacagggtagcaaagcaaaagatctgacaaataatttctggacaaactacaatcaatattacctgatacatttagctttagttttggtcacccacggaagtaccaacataataacgctacaatattaaaacaactgcccggagacattgagttaaattcattaatgtcatgattctaacacaagctactctccatggttctcactctgggattttgttagagaccactac

SEQ ID NO: 18364 - DNA, 612 bp, Oryza sativa
tatgctgtatctgagagcaaaccacaaaattaattaaagcatacagtacagtacagtagtattatatatatatatatagagcctgcattatccatgcatgcatgtacgttgttaaaacgtaccacacgacggtggaggaagatatatatggagagagtactcgctagctagtacacagtacgtggacacgcacgttcgtacgtatgatgaggacatgcgtacgcaacgcagtcgagttccagtaagtatacttgagttgagagctagctagcttaattattcaaaaactatattattgtaataatatagtagggccggccggccgcatccgcaggcgtgcttgctttcttcattatggatagatagatagagatagtaggctattactattagcggcggcggttggcgggctccctctgggagttgaagtggacgacggcggtggggaggccgagctgatggtacgccgcgaatgctcttgtgttgaagttgggcctgtccgccgcggcatcagcgcgccgtccacgaagcgcgccttctgctcgtacagcaccagcacgtacctgtgtatccccaccgtcggccgtggccccatgtactccaccatctcct

SEQ ID NO: 18365 - DNA, 636 bp, Oryza sativa
ttgcggggactctcgaccacggtctctactacccaaggtgtcctggcaaggcacacttcgtcgggtacagcgaccacgccggcgacatcgacaccagcaagagcacgagcgggattctcttcttccttggcgagtgccttgttagctggcagtcagtcaagcagcaggtggtggccctgtctagttgcgaggccgagtacatggcggcctccgccgcttcgacctaggcgctctggcttgctcgactgcttagtgatctcctcggcagagatactggagcggtggagcttagggtggatggcaagtccgctctggccctggcaaagaaccccgtttttcacgaacggagcaagcacatccgggtgaggtaccacttcatccgaagctacttggaggaagggagcatcaaggcgagctatatcaacaccaaggaccagcttgcggatttgctcaccaagccccttggaaggatcaagttccttgagctttgctcccggatcgggatggctcaactttcccacaagacgacgcacaagacttagggggagagtgtaggaataagtcttggctggttggtcttggtcttggggggctttttcttgctttttagctttctaggacagcatctctactttc

SEQ ID NO: 18366 - DNA, 24182 bp, Oryza sativa
  unsure (1)..(24182): unsure at all n locations
ccctgcttcatatacattttctcctggccttgcattgataaatccttctgcaatccatctacttaccaaactactctttgcaatttcacaatcttctggaaatgcactcaagtataacaggcaacttcttatatcatgtggaagattataataactgagtgctaacactgactgcatggtctcgagatactcatttcctggtagtggagaactgataatttttttcacctcattccaatgatataacgattcatgatcagccaagaagctggatatggaaataattgctagaggtataccatcacaccttttcagtatctcttcagaagctagctcaaatttaggaggacatttctcttcacagtcaaaaattcttttgtaaaataaccttttggagtgagcgccatcaagatgtttcatttgataaacaaaaccaccatgagaagatgaagatgatattgccacttctttcacacgtgtcgtcaaaattattatgctaccatgactagttttgaccaatgcttctccaatgaagttccatggttccgggctccatatatcatccactacgataatatacctggcacatgtagttttaattttatcatggaagagcaaattaaagtctaatttatgtatacattttcaaaggaccaaaattataaatgatacccttccaaagaaccggaattagatttctaaagtatgctcatatgtttggttgggtgttagtttacaaaattcttgaaattggttttaccatttgtactacgaggtaattatagcttacatagcattaaacaatagtttactccggttcgcagcaagtatacatcaggcttccggatcccgaaaaaaaatagtgcttagaattacaacatgagcatttgtgctacctttgcctcatactagcaaatcctatatacttatacaattcatccccattaactctaattctctcatcccacaatgtgccacatcacctcaaattaatctagccatcagttatgtacttgcgaagatattttatgttttttctctatttcttatagcttaggataagttttcccgcagcaacgcatggggaaccatctagttacctaggaaagcttggcccactcagtgcttagaacacaatacatcaaactggggcacttgttttcttcgaacctaggtagtctagcctaccaccttgtggagctagccggaaagcccatgggtatttctcactattttccgtaactgaaccaataaaatgcaaaatggtttgtttttggccaactatttctatacctgaactagtaggtcttttggcagtgtttatcgtctactaattgtagcacataaccaaatcaatgcctcctgtagcatttagattacaagtattgtatagttggagggtgtttagaaaagttctgatgaaaatttgagttctcatgcgattgagcaaagttaaagataacaaaaatgaagattaattaccgaaacaagctaagaatggtcagttgaaaacaaatggatcattagagtgcaccttttttgtttgagatgctccctaagattatccacgagatttgctacatcatcccaagtgtttgttgacttgccaacttgagtagaaatgttgagtagaagctcctttatattcggtctctgagacaccgaaacaaaggccttgtactcgaattccgccttgattttgtcgtacacttgtttagcgagagtggtcttgcccaagcctgcacatccaacaatggataccatcctgacatcatgctgcgctgccgctgacgacgactcctgctccaagcggctgatgatgtcatccctggggccatcgatgccgacgaggtgcttcgtctccgtccagagcgcgcacagccgggcatcaaccttggtcgtcgaggaggaagcatccgagctggttggtacaagtccatggagagtgtacctgttacgccgctcgctgacctccaagacacgggccttgagctgctggatctggctcgcgatctgacggaacgctccgatcttcttggccatgcgcgccatcttggcggcgaggccgctttcgccggcgccatggaggcggtggacggagaggtcgatgcagtcctcgatgtcgtaggcgagatcccgcaccctgtccctccagtccttgctgagctcgtcgagctgatccgcatctgccagcgcgtgcagcgccttgttcatggtggtgagctcggactggaggaaggcgaggtcgtcgcggactcccttggcgtgcttgtactcgtcgccgaggaaggccgcgagctttgcgaggacggagttcatcgctccggtcgccgcgctcaccaggacgccctccatgcctgccagatcgaggtcaattgccccctgctctctacctcactctcgatcgcctctctcgttgtacgtattgaactcttgttggttcccatgatcatggaataattgtagaagtactcgcttcgtcactaaatatttgacatcattaacttttttaaacatatttgaccgcttgtcttatttaaaatatttaaataattatcaattctttttctatcatttgatttattgttaaatatactttcatgtttacatatagttttacatatttttaaaaaaacaaataagacgaacggccaaacatgtttaaaaagtcaacatcgttaaatatttagggatggaaaaaatagtatttaatttccctcgttgatagtgctgcgaatagaaaaatagggaagcgaagaattttgcacgacacctgccatagcgatagacaattttaatagtagtattttcttcgctagctagcctgggtaggaccagacgcgagtgagatttatccattcccgtgccttctctttctccatcaacggcgagcgtggcggcgaacggcagctgtacgtgtgatacttgcaggttgcagcggcctctccttccgaaggtcgtcgaccccaacacgttcaccgccctttgaactccccatcggccgctttgaaaagaaaaaaaaacgtagatattagagaattatataatatcaaataattagaatggtagggcttcaaacttagatcgtctagtccatcaccttatgaagctagtcggaagatccagatcgtcctgcgagttccggcggccctctcctcagcatcgggcgtgggtaggcggcctccgtgggtaggcggcccacgggcatgttgcccacggcggtgacgagcgacgacgccagctagccccgtagacagcaactgcgacgcgttcgccggcgtgatggagaggtttaggagcgcgtgggggccgtcgtcggtcggctctgtcggcacggcctcgaacgcgcggacgagaggccctccttctcgaagggccgcacgcccgccgntgagganagggccgccggagctcgcgggacgccgggcatggagggaactcgccggcaccgggcttggagggaggtagggaggaaggttgtggagggaggtgtgcgcgtgggagctcgccggcgtcgggctcagagggaggcagtgagggatgccggactaggagggggctgctccccgtcggcgagctggaggatgagcgaggagccgaggaggaagatgaagggaaggggatagaagctgacttgtgggtcccacactgctttttgggttgcaagccacggtggtacgccacgtaggcaaaagtggcaaattgttaagaagccatcacctaagaagggcaaaaaaaaaaaagtacaaatctaataggggtatttagataagtgccaaacgcaatagtggcaaatagttaaattctccggtatttacaggtttgtgcatgtttgtcttctgtgtaatcaaaaaagaaaacatggtttctctctcaacaagacaaccaagcaagagaaagactgatatattttcatggcacttgaccaacttaactctgaaataagattcatagtaagtctattcttataaagttgattctcattaagtgtaattaatattaaattctctctcctcatgacgccacatcaatttcattcttttgtcttcggatgattaagggtgcaaactaccccattttcaaaaagccagccttcggataattgataagggtgcaaattgcctcttctccaaaaaaaaccactccatacattttaattaattattgcctttaaataatcgaccaaatgtgcacgatatagaaagcacgtgaatgcattcgcgaaaaggaaagcacgtgaatgaaatcataacaaaaaggaattacacagcttatatatactccctccgtccctaaatatttgacgccgttcatttttttacacatgtttgaccattcatcttattcaaaaaatttaagtaattattaattattttcatatcgtttgattcattgttaaatatacttttatgtatacatttagttttacatattttacaaaagtttttgaataagacgaacagtcaaatatatttaaaaaagtcaacggcgtcaaatatttagggaaggagagagtactattttgtcgcaacccataggtccgcattacataaacgcatgccagtttgagtaaaatgcaccattagtaccacaacttgtgaggtgggtgtaatttagtcacccatcttgtaaaatgcttaaccaagtcactcatcttgtcttaaggggtgcaaatcacataaaacatatgccgttgggttattcgtaatgaaattatatgctatattaatttgttttggaaacatggtcacacaatccataaataaaccaacatgcaatgctgccggtagtaaaatccaattaaagatgatttttgttattgattgctaagtacaatatggtcatttttattaaaagtaggagtagtagcatatgagtgttaatttgtaattttaatgcttgccctgtccacatggctaaaaaatgcatgatgttaggtcgatatggcctgcaatttaaaaacaactaatccatgtgacaatgtatttggtaagatttgcaccatcgaagcaagatgagtgacttatttaagcaatttgtaagatgagtgactaaactgcacctacctcgcaagttgtgataccactggtgcattttactccagtttaattaatggatagagctagcaaaccataacatatggggctagaggagcaaccaaacgtagcgtgcttattcaaatacatgaaaattgaaacaagtgaacaagtttgaaaatggtaattatgcaactgagtaaaaatggtagagatgaaacacaaatgctgtgccaactccaggaccaagccaaggtagccattgatgcaaaagccatcgtcctgttccattgagcaaggaagaccaatcagtggtgttcatggaaaaggtaaatgaaacaaggagcaagctggggagcaaattatattatctggcaacaaattatcacttagaaggaaggagcaagttaattacctgcggctcattgacgcttctgtttttcgctgctccacctctagtgctactgaatgtatgtcgcagtcgtgagtgagggacggttgggatgtgtgttcgcaatgttcaagattttttctttcagttttgagaccgcatctagattgccagaaatccaggcatggactctgcagagggtgttggggaggtgctggaaggaatcattctcaccaaccacattcaatctaatgccaatgtggaggtccttcagattaggcatggaatcatgcataaacaacacgttgcaaagaaaggcaaacttgagacatcggaaaccatggttgctgatggtgagccatgatccttgtgtgtctgaaaagggaagggcaagatattcgagagctttcaggtctccaagcatttcgagatcgtcctgagtaacatatgctttactgagctctaatttctcaagcttggcagcaaggcgaatccaacttggaatggttgtcgtcttgaacccgtttacaatgctcaatctccggaggttttttagggaagggaaccacgaatcaaacaagaagcgttttgcagctatatccgaataagaataataaagagacagatctagatattgaaggctatgtctgtccagtgcattaagtgaggagatgaaaatcttctcgtagctcttttcatgctcggcatgggcctcatcagaatctctaacatggtcaggaatccaagataccgctagtactctcagcttggtaagctcacctagctccttcaaaaagcttaccggttgattgaagggcaagagacctgttagctgctccaatgcttgcatcttgctaacaccttctgcagggaacatgacgtcagaattgacagacagacgaaccaattgctgaagtagaacaatggatggtggtaattctttaacttgagtatctagtatatctaatgtctccaaatgctggagacgcccaatattggcggggagcacacttactcctgttccgctaatgctcagatacctcaaataggctaacttttctatattagcaagatggttgtttgtcaatgattcgcacccttctagatccagtactcttgcaactttaaattccgatagaggatgcaatcctgtgcagtccatagaacaagcaagtgaccggacatgaggcttaatcgacttcatgctcgaggcaaatttctcttggcagtagctaccctggagagacatgcgacgaaccttgcagcagttgctatgctgcaaaggtacaggaccagacggatccaacaaggtcataaagttctcctctactgatttggacactatgaaattaagaatgacgtcgtgaacacggcagctcagcacctcaccgtagtgctcattccatggttggatcaagctctggtttatcagcacattgaaatacctcagccctgcttcatatagattttctcctggtcttgcattgataaatccttctgcaatccatctgcttaccaaacgggtctttccaatttcacaatcttctgggaatgcactcaagtataacaggcaacttcttaaatcatgtggaaggttgtaataactgagtgctaacactgattgcatggtctcaagatccttatttcctggtattggagaactgataattttttttacctcattccagtgatataacgattgacgatcagccaagaagctggatatggaaatgattgctaggggtataccatcacatctttccagtatctctttagaagcttgttcaaattcaggaggacattgctcttcacagtcaaaaattcttttgtaaaacaaccttttggagtgagcgccatcgagatgtttcatcggataaacaaaaccaccatgagaagatgaagatgacatcgccacttctttcacacgtgtcgtcaaaattattatgctaccaggactagttttgaccaatgcttctccaatgaagttccatggttctgggttccatatatcatccactacgacaatatacctgccacatgtaattttaattttatcatggaaaagaaaattaaagtataattgatgtatagattttcaaaggaccgaaattataaatgatacccttgcaaagaaccagaattagattttcaaagcatgctcacatgtttggttgggtgttgatttacaaaattcttgaaattggttttaccctttgtattacgaggtaactatagcttacataacattaaacaatagtttactctggttcgcaacaagtatacatcagggttctgtgtcccagaaaagaaaaacagtgcttagaattacaacatcagcatttgagctatctttgcctcacagcaaaatacttaggaaagcttggcccactcagtgcttagaacaaaatacatcaaactggggcacttgtttttatctcatgttgaaaacaaaccaaataattgtttgttttgagcctactattttctgtaactgaactaataaaatgcaaaaggatttattttttctttgtttttgtccaactatttttgtaactgaactagtaggtcttcttggcagtgtttattgtctattaatcgtagcacataataaaattaatgcctccttcagtctttagctaagttccaagttttgtatagttgaaggatgtttaggaaagtgttgatgaaaacttaagaatatataattttgagttcatgcatagggcttgaagcaaagttaaagataaaaaaatagactataatctatattttctataaagttacaacctactaaacatctaaagcttaacatgcaagcacagtacgcatagtagttattagtacactctaaaggttaaaacgcaagcatgcaacattaacctactaagaacctactccctccgtttcaggttataagactttctaacattgtccatattcatatagatgttaatgaatctaatcacacatatatgtctagattcattaatatatatataaatgtgggcaatgctagaaagtcttataatatgaaaaggaggaagtaatataaaacccatcatgtatgcatagcaattactcctacaattcattatattgtaaacctcaacatacaagcatactaacttatatttctcacattattttcacaatatttaaccaaaaaaaatctatccttaaaaaagataagttctacaacattcaacataaatccatccttatattctgcagcaaagcgagaaaggtcagcggaaaacaaaacggaacatgagagtgcaccttttttgcttgagatattccctaagattatccaccagatttgctacatcatccgacatgtttgttgacttgttgccaacttgattagaaatgttgaggataagctcctttatgttcggtttctgagacaccgaaacaaaggccttgcactcgaattcccctttgattttgtcgtacacttgtttggccagagtggtcttgcccaagcccgcacacccgacgatggataccatcctgacaccgtgctgcaccgatgacaacgactcctgctactgctccatcaaccgactgatgatgtcatccctagggccatcgatgccgacgaggtgcttcgtttccgtccagagcgcgcacagccggacatcaaccttggtcgaggaggaagcatccgagctagttggtacaagtccatgaagagtgtacctgttacgccgctcgctgacctccacgacacgggccttgagcttctggatctgactcgcgatctgacggaacgctccgatcttcttggccatgcgcgccaccttggcagcgagtccgctttcgccggcgctgccgcggaggcggtggacggagaggtcgatgcagtcctcgatgtcgtaggcgagatcccgcaccctgtccctccagtctctgctgagctcgtcgagctgatccacatctgctagcttttgcagaactatattcatggtgctcagctcggaccggaggaagacgaggtcgtcgcggactcccttggcgtgcttgtactcctcgccgaggaaggccgtgagctttgcgaggacggagttcatcactccggtcgccgcgctcaccaggacgccctccatgccgactcatgcgtcagatcgaagccaatggccttgctctctcgctctcactctcactctcactctcgttgtttatatgaaactctggttgatttgacgttcatgatcgagccaggaggatataatttccctcgatatgtgtttatgtgccagggtacacgttcatgagccaataggatatattttccttcgagacgtgttccgtggaagggtaaagttattattaacttattggtgataccctatatatgtccacccatttgtcctctataaattttcacgcccgcccatgttaggtttgtcggtcacatctgcgaggaagccactcctagaggtccaggagcaaatttaatactccaaaaaaaaaaaagttatcctggtacggtacagaactctattacgtgtacatatcgagatttatatacatatccggattcgtagtattataatatatcacgttctgtattagattaattaacttttttctgatatggaggtagtaaaatatacataacgaccactaatccaaagatgaagaaaaaattattatcacatcttcatttgaaccaccctaataaatacaatgcatgtacctaatgggattagatatcttgatagtgaaggattttagaaaaatatatatgaatttagaggaaggggatatactagttaattgcacgtcttgtatcatgagatatgaaaaaagtggttacgtcttatattttaggatgaaggggtattgaattattgaagagagatcaagaaaaataagaagtgcaaagctagctttacacatactccaatataattgcactaattatatatacttggtattttctggaatatttcttccaaatggtgttcttggcaatgcttcaattcaaatagaaaggtttcttggaaatatttttcatagccttctagcacatctagaaacaacaaaatgggaagatctttcacaatatttatccttattttgataactggcggtctactttccggaacgaggttctcttgcatatgtgtagaatgaatgatcccctaagatagttgttgattgattacaactcttgcagtgctatttttgtcctcctcctttttatttatatttgttcataacttttagtatatataaaccagacaaaaacgcttggtaaaaaaaacttatagctaatctactatatatgttagctctaatatttatcttataggattagttagaatttcctccatccaaaagtctaaggcatattttctgtcaccaaaaccaaggagaaattaacttattccacatataataaaaaatgagctatatacatgcatgtaaccaataagtattaagctggttgttcgggttcccatcaataatttaatttagcatcgtaaaacaaaatattcatttaaatattacatgcatgttgcaaaactgactatcttatttatagaaactagaaaacaaaatatatttaaacttttggatggagggaatcactactagaaaaacagattttaccaacacaaacttttattttcctaggccggaaaaaaaataccctcttgtaacctcttgcaaaaataactagagaatccctagctctagccctgcctacgaaaatcaatttttactaatggagtcttaaagaagcccacctacgaaaatatctttattttcacatgtagacctcttaaggttccgtttgaaaaaaaaaaatctgattctcgtagacgagaccttaagtgatccgcctgcaaaattaaaaatcttaagatgccaatcccatgctatgttaaaaatgcttcagccaccttgcaaactgcacaagtccaggtactccacaaatccatgtacacacaaatttaattgatatttccaacaaaccactcaacacactcacacattctaaataatttggcctactaaataaaactaagtataaacaaattagggcacaaacccccccccccccctcttttgtataagcaatataactatttttactgaaaacattataaaattaacctctcatgaccatattccgagcattattacagtcctaagccaacccacaatcgtcttctcagaaaaactctaaatatggtattggttcttagtcaattcataatcattctttcaaaatgatactcagacacggtttctgtcctgatggtacagtgtgatgcgtgggagctccttgtatatggaaaaaggagtgaagtttcgaggaagcctaaatttaaaaagattagagaagaaattggaatatacatcctttgtcccatctagcaatgaatctggacgtgagcccacgtccaaaacttcaaattgatcgctagaagttcgtttttttttatggaggaagtatacgtgagtaaatccgagtaggaatatgagtattaatttaaatttgaatggagtccaagtttaaaaaaatgtaaaagaattaaaatgtgagaaaatcctaatcctagcagaaataggagtcctaatccaaatttggagggaagattaaaaaggaattggaatctacactcaatatctatacatggtgttcttttatcctgaagataaagattaaatttttttcacaaaacgaggtggtattaacgtatgattgattgagttttaattattacaaacttgaaaatatattaatatgatattttagagcaactttcatatagaaagttttcgtacgaaacgcaacgtttagcagtttgaaatgtgtgccacgaaaatcttaggcctggtttagttcctaactttttcatcaaactttcaacttttccatcacatcaaaactttcctacacacagaaacttccaacttttccttcacatcgtttcaatttcaaccaaacttccaattttagggtgaactaaagacaccattaatcttcatccaactcttgttggagaaaagaacaggacctaaatgttggtagtggtgctagtggttctgtcaccacccctaccactgacaggtggggcttacaatgtactccctccgtcccaaaaaatgacaaaccatggatttccgtgttcaacgtttgaccgttcgtcttatttgaaaaaattatgaaaaaaaaaaattaaaaagacaagtcacgcataaagtattaatcatgttttatcatctaacaacaatgaaaatagtaattataaaaaaaatcatataagacggacagtcaaccgttagacacggaaacctagggtttgttttttttttttatggagggagtatcagttctcctacctatcctagccctgaatccttgatcccatgcctgccgcttctccatctgcgacaaaccgacaacgacccagggcaccggccgccagcagcgcgcccccgaactgccaccccgtacagcacgcagccaacctcgtcggctgacgcggtgacgcctccaggctccagcagcgttgacaagccaatccgttgatggagcatgcgtgagctcatgcgtgctggtggagattgggccggggcttctagcattgctgcagctgcagctgctgcctacggtgacagctgaagcggcgtggacgcagatccgtgggctccatgtgaagaaagaagaggaggatccaggagctggtctcatcgattttggacgacaaatggaatagatattatattttgaacaaagtttaaactcataaaattgctatagttttggacgacaaggagaatagatccgtagatactaatgatacgatctctcaacatataagcatctctaaaatttggttagtacagctattaattaagtgaaaataattaaaggaagattctgattgtttgtaagaaaaggtagataaaattaattagagaataattatgattgataaaaatagaaagggtttgtgaagaaatagctttactttgtataattttatgacggaggaagttattcatggccatcatctggttgattgatctcattatatattaggcttgaaatgtcggcagagcacgaatcacgtaaaggtggtagcatactcactccgtctaataaaaaactaacctaactccgtctaataaaaaaccaacctaatacaagatgacatattttaatactataaatctggacatacattctagtattagaatgtgtcgcatccaatcctatatttgatttttatgggacagagaaagtatttagtggcgtgcattttaaaaatggacaaatcctgctcttcatccgacatgaataagtaatttagtattgagaggaaatggcagaatccagcacagaaatgatcaaataagacaaagagtataataagatagccgcaatacacaacataataaggctttgtacatatgcagcgcgggttgtataactaacttgtaagttgagcagcacaggaactgctacaaaacggtgttccagcattgcaagtcagtttagcgcgttagcaccctcactaggctctcgcaacctcctaaagctaaacagattaacgacaatctaacatagctagggagagagatcatctatcttagcagattcagagttcagagccaccaacaaaatcttcttgatgagcaatgcatagttatctgacttaccattacctgcgcgcatccggaccagctggccgagcctgacttgtcacatgacttgtctgctgaccagcaatgttcacactggggttgtagcgtccaatcgctacgctgtaagcttcaccagtcaggctccctctcatctgccctgtgggacgccagctttcatccacaggaagctcctgaagatcatcggaagttccgatagggggaggtgtgctcggaggccgagcagtagctggcaagaagggagactgtgcacgaggtggtgcctgagaaattgtaggtcggggcactgcttgtggtctcattgcttggctgcgttgtggccaaggaaaaaaataccccggatctgcgggttgactgcacttgtgccgcctggttgagatggcaagacctgtggagctgtggaaggttgagccactgtagcttgtccaagttgattcattagattgctcactagccgatgaacgtgatgggactgttgtgcggggggagctccatgggcattagcacctatagcctgtcctgggactcctggcggcggtcttgtacccatgaaattttgaggagcagtaagcccaatgaactggccttgatgatagttttgcgtggctcgaatctcctgtcaacaaatatgtgattctgtgaacaactgcttgttgatataaatttaatgcaagtaaaagaattcaaacgtgtatcatgaattgcttctctctacaatttatcaacgatttgtattgtaaaatgaactacagatggctggcaccctgcaacagtactaaaccactaaaccaatattttaggtcatgcaccaacttcgctggctgacagttatcacagcaggtaccatcacatactcactacttgtatttgcagtacgcaagcaagcagtacgaaatgagtaatgaagatagtgaagtagttcaagtgcctgttaaatatttgcccctattcaaatggagacaaggataaaaaaggtaatagagccaagtaaaagagaagataagatgaccatgttgtcaatactcaaacatctcaaaaatatgagcgaacattaaacgggctattacataaaacaaaccttttactcttttaaaaggagctgggttttggggaagggtgttgataatgcaatctacttctacaacacctcattctagaactctagaagatctttagtggctagatgtggatagccatgtgtatggtactgtccaccgtggtgtttgcaacatctttttcaacaattgcatcactagaacatgtgtatgtatggatggctaactgacctcatgcaatcgtgtatacaatttttagagttgaagataattatgtttttttttcttattttactttacatcatatagtgcatatatttggaaagtaagttggcaaaactatagaacataatttttgaaaggggtgaaatagagtagctcagggaccaagtataacatatttcagcctccaaatcactttataatactagtatggttgtgaagctaagatggcttatcattagtattacagaaagtaaattcatcagatagttctactgtgattacagggctgtttaaatttatagcgacatgtaacatgactctgttcaaagataaaccaatgctaccttatgttggcaaaaataccaagatatagtggcttgaaaagatttttacctgctgtgttgactggtgttgcaataacggagcagcatctggagcccttgatagtgatccaataccagtgctcatagcagtaatgacactatctgcgtttgtcacctgatgtacttgatatgctgaagctggactggattgtgggaaaggaggtggacaattgtagatatttggtcgcactctctgtggttgcactggcagagcctgaattcctgtaggttctctcgcgacattccttggtataggaggtcttgcaatttctaatctaagctgtggatctattcgtggttgcgacggcacaatatcagaacgtgttccttgtgctacatgctgtctcagaactacagaattagaggtatcaagagaaggagagactgcatctgtgataacagggtgcagaatgttatgaggcagaatagactccaaagtcccgaatgaactagagcccagaccgccagtagaaggcagtgatgaattttggccagaagttgaagtggcatttccacgttcattgtttccacggcttgcaccgcctgcatatagatcttctgcctgcgaaactgtgttcataggcaaatccgaaagatagtctgccacagatagatcctgacaattcaagaaaggcttcacatcttctgatgcagaggtaaaactcattggcacatcaccatcattgtcttcatttatcagatctatgacatcatcagcagtcgcatcagtgtccatagtatctctactctgctgaatgacgtcactggaatgtctatcagatctctcatcattagttgaaatggctttccaagatccatcagcaaacacaaggacatcaatagtatcttctccagtctcttgtaatatcttatggaaaaataaagactgatcacatacaaaacataatgaaatgatgtatatgcgcagatacattatacaacttaccttgaccatcttttgatcaatccgtaggtcagtgaagtttgaaggtgtattacaaaatggacagcgccaagtcggcttcctcaagttcaactccatgtaattatcataatcaaaacactaaacaatgcatgctctgtcattacttttgttgaaagaaaaaggctcaagccatgaatacaaacaaaatgataaaaccatacctgatagtgtttgcataggcgccctttgatgggagtttttatgcgcctaaaactgcaacaagagatggcaaatgaatattttccaggccagaatcagaaagcagctgactaacatttttcattcaaataaatgatagaagtacaattttaagttactgaatttcacttaacccccatcaatctagactgactctagacagccaaattcactaagtgtgcattaattaattaattcattgttgtacctttacatcaccatctagacacagagaacatgattttgccaaactaggtattaaaaaagaatagttcttaatttcttatgaggttctttgtccatatccatggaagaacacaggtcaggccttgtgcccttgtggcgaacttgtgtatgcagcaaatttcaccaacatgggaaagttgaaacacagtgcgcagcaaattgtattccatgaagagtgcaatacattaccttatggggcacttcagggaaactctagatggcccttcgagtaaatcagaatctaccaaaaaaaacaaaaaacagatctatgaaaatttcaattcaaaaaatagaatagctgacatacactaaatgattaaaaataaatttcacccaccaggaggatcagcagcgactggttgtgcataatcatttaggtttggagcgtcaaaggactccaatttattcagaaatgcaacagctatgatatagttagctgaaacaaaaggctgttggtttataatattcaacaattgaaatagaagtaaacagacacaacaccatgatcatgcataccattaaaatatcctatagcttggatgatgtttgccccgtatttgagcatcctagtaatatcagtggggaactggggtcctgtttcctgcaacataatttgaaagcatgaatttaggttgtaacgtaattgaagtttaacaagttgcagaagactatgtggtcaactcaacactgaccattgaaacatttgtcctcttgtccacgccttttccattgactaaaaagctgaaaataaaacgtaatattgttttttggcttaacattcgcaagcatcaaagtaaaaaaaagaaaggaaagaaatgtacctcacatgtggcgggtttgcaatacatgatgaggcatttaagtcttccttttgcacaacaattagattctacaaaacataagaatattagtaaagttgactttatataacatcataatgcatacaaaatacagaagtaccagaatgaatagtcataaactcctgccattttgacactacagtcctttcacatctaatcactccctcagtaataaacacaaatgcatgtagatatgagatgctacaagatgaccatgccaccatatatgcaaccagtgggttttggtgacaacttaaactatttcgaaagaaatttaaaatatcctttggcttctatacttcaaaaggggttttttacagctaacttaatttatttcaattcaaaagattttgaggtactaggacagataatagtcataagcaggaactactttacaagaaacgagtatgacctatagaagtagtcagtcaaataaacagtggttccatgcctatgtcacttgcagatgcaaaaaagaacatgacagtaaatattatgtaaaatattgtacaaacacacatggggttgtactttataatgatgattcatgatatattttaaaaaaaaactcacatggaaagactagcacagcatgcataaaataaatattttcactcagtgatactcacaatcttttcctctcgaggcacattcttatggatgaaaaaatcggccattaaaacatcatatccaacctgtagagtatggacaaatacatcaaaattagtatccattcctaaaacaaacctttattatctgaggatcatcagttatatgtttgcacattaagcatctgtttggttggatggatttggaaggttgggatggggccaacccattttcggaagtgtttggttgaaggggtagatgggttgggatgaacctaaaatagaatattccactaatatccaggtttgtttgatccaccaaaatcagccggactgggccaacccacctcgcgccagcgctgtcacgtgaggcgcatgcacgcggtaacctcatccctcctaccgattcacctcttatctctttccctttttccccctccatccatattggcgaggcaataggcgctagaggcggcgtcaaccacgtgcccgagccggcggcatatgcaacctcctccctcctccatgctctctctctctctctctccagccgctcgtcctcgtcaaagcaggtgactgcgataggaatccctacatgtatttattcacatttgtgtcaaatcaatctgtctctggttgcttgttgctagtcctcatcatcagctgttggtcgtccttgcatcctcctctcttgtcaaacttgtgagattttatttgcatgagatgaatgtcccttgctatcaataagattagttttaagcatattgtagtatttttgtttcatctatttcttcagtagacaattttttatgtgagcaagaattagtttgtgatgtgggcaagtaatttgtgatgagatcattaatttgtgcttgagcatgatatggcaacatatttctgtttttgttaaatttttgtggctgctacgaatgtatttttagtgtgagagtttattatttttttgtggaagctaaaatgtatcgttcacgtgagaggtaacctcaccaattctagttgaggaagtatctctatccagctatcccacctcatccctccatccaaacaggtgatgggaccattccatcccactttatccctcaaaccaaacaaaaaatagggttcgttccatccctctaaccaaacaaaaaatagaaccatcctacaccagaaaatagggatggacctaacccatggtgaggatctaagaattcgaaaaaactggtgcatagaaaagaatcatcaacatttatcagatcaatttctgaaactttgtcttcaacaccagattgactacctttgcttccagcgaagtgactagacgttcaaacttcaattgaggatagtacctataggatttttgaggaacagaaataaaagcaggatcaccttagttcaactgaaaattaaaatattgtacataaacagactaaaatactttagattacttctcaatactaacataattacctaattaactgagatcgcagaatataactttcaatttaatatcttcgaaattttgaaatatactagttctattttaaaaggaatatagacttcgcattcaaatattgaagtccaagtttctttcaatgtacttcttaagtactacctccgtttttaaatatatgatgctgttgacttttggacatcatgtttgaccattcttcttattaaaaaaaaactaactaggcttgttttatcatcgaaggtactttaagcatgtcatatatttgcatgtttgtacaaaagtttttaatacgacgaatggtcaaacgtcacatcaaaaagtcagccccataatacatttaaagaaacagttattgaagatttgacacgtcaccttgaacaagaaaatttcacatgtcattttgaatttaaaaatcttgattattggatataaaatccatataagaaatttgtaacatatttttcaaagagtaaattgcactttgggccgcatattcttaccaaagtttcactttgaaccacccttacaattcttattttcactttggactagttactgttgccaaatgttcactttggaccgggtggctcacatgtaagtgacaaatggacaatagagaggtggttagtctcattgacatgttggccacccggtccaaatacaacatttggtaacactacctattccaaagtgaaaaaaatcactataagggtagtccaaagtgaaactttggtaagaatatgtggcccaaagtgcatttactctttttaaaattcttatccatgcacaagtgtgtgaaagaaagatatagtcactaccttggcattattgttgaaataatttggatcacagtgctgtcattatctggctggctgacaggcgtgcagaatttgccagagagctgcatgaaaagcaaaaattatgactaagcaagctaatatctgaaggacatgccattaccataacaaacataaactcaaaataacgaaagtgatcataacaaagaatcaacataattaatagtaacgggataaaacatttcacacacctcattagccatcctgagaatttcagtacaatctgtgggttgaaaccatttttcagaacaagcattctacaaaacagcaagcacaggttactattttattttttgggtggcagatatattacattgggagatatcaggtcaaaaagacaaattgtacaacttgggcatatgatcacatataaaactttttgttgaaacatctcgcaataaaacatgagtatgcatttggaaactaaacaaatacattgatgggtaggactaacagctaagatggttattgttgtatagacattaaaggtagtaagcagagccagcagcggagcgctcggtagggcgaggcatggcgcacaccatacctcgtgccggccgcgaccacgagtaccagcccctctcaccgcgctcccgctgggccacagcggccaaatcataaaccattgctggtccacttgtgtcgtgtatttgtctaatgtttctcatcgagcaagttgtgacggcggctgacgcgatggcttcgacggcgccgtacattccggtgagcctgcatcctggagactgggacggaagtcggcagcggctagcagtacgagccacgctcacgtgtggagctaggcagcagtagcttagttgggagctttttcgatgaaagaaagaaacgaaacaaggaatagaggaacaagaccccaattttctagcatccatctatcactgttaaataaaacattggtagtttgccaaatttcatgtatttgatggattagtagatattgaagttggatgcagaatcatatactatatcatagaaattagaatagctgcatgtcacgatctaggatttgtggagaagaatcgggatgaatgggggtagattggattatagtagatgaagtaacaaggaatggtcctgaacctaaacggcgcgacgttctccgtcgcactgagaaggcaggccgatgggcactgagataaatcttgatctaatgcttcactgatctaggataggatccctccttatatagatggaggactccttaatctaatcctaacaaaccttatctaatcctaacaaaccctaatcctatccaatgggcctaggatgcccggcccaaagaccatgacactgcagaatctgcagtctagcggcatggtgtcggttgttacagtaggtaacctatggtaaaaaattcttattaaaagtttacttttaaagtctccatccacaatatttgcatcaagcgttttcgtttagcgtgcagctttttcgatatcatattattactaagtctccatccacaatatttgcatcaagcgttttcgtttagcgtgcagctttttcgatatcatattattactttgtagttttttcgctatatgtttcatgttcataatatgaactttgatctattataagtgcaatctcgaatgataaggattttagccctcacggccttgccatgcctcattttttgtccgtcccccgccactgagcagagcaaacattggattgaaagtttgaaacaaataaactgttggtatgtatgcagacaccaaaaaagatcaaaagactggattattttggctaaaagaagctcttaccatagctcgtctatgactgagaagaagcatttaccttgcatgatatcattagcaccataacagaagattgcagaaattgatcttttcctaccagatacacctggtaaataaacattaaacttccgatcaataacacacaattaaattggaatacctggcttcactaaaaaaaatggagccctctttgtgcaaaaggccaaaaataaacagttcaaactcaaaggtggtagttgcactaataatttgttcattgcctcacataacaaagttggaaagtacagaaacagttaagtcctaccggctactttaaaggtcgttagcatttaaggagacaggcagccaatgctagtttacgacagcaagtaaaaggggaatgtgatgctaggcagatggcactatcaaataaaatagtgctgccttggagggaaaaagctggcatcacagatttcacaggtaccagatagtgtaccaagggaaatcatggagtaggaaattgagatatgggaaatcaggaggtgccatgtaacacaaggatttctacaattgtgtgtttttgcgagcagtgacaaatgaggctttaactattaatatgtcgtattgattcttttggaggctatccattcaaatagtaggataccttcatcttttaaagttcagaagaatcacataaacaagaaaaacacaacagtttcttaggaacgtagaaaataaaaacataagggtttgctcgttatctttaaaaaaaaagtagttttctcagctgtagtactgcttaaaggggggaaattattacctcacttgccaagttagactctctccatattatcatacgtgtcaatatttaactatgagctataaaattttcctcacactgcagatgctgtgacaattttaaagaaatagtttggtggttccagaatgattttgccaacctaccatgcgtcaataaattccaatgtgctattctgatcgatatgtcattttactatgcggttcaccattgggccatgggcacaataacaattagcatgcaatgaaacgtagaagttattacatttaaaaacatccatttatatagtatgtgaactctagctacttcataattgcttcgataatgaattcaaatcattaaatcgttactaagaatagcaattctgcgcaaataatgaagctctcggcggtcaattatcgcatccattgctcccctacttggacaataaacgtccatattaagatgaacgaactaaaaaaaacaatgggaaattgtctggtagaggagacacgcttaccttcttcaaaatgctgggtatttcactggccacggtaggaacatcgccgctagaaagagcgaaatcgatccctctgcaagcgcaaacaacgcgaataggtcacaca

SEQ ID NO: 18367 - DNA, 13343 bp, Oryza sativa
taatttttatcttccttggtgagttccaggttttgacatatttccggttcctgcttttcctttcttatcagaaggcttaaggatctggaatgagcatgtaagagaatcatcaatgctcatcatcgcccccgcattgtcaaactcgccacaatagttgggtgcagagaatatggttacaagctggcgcttagcaaagaattcatagccatcctccacaacctgtcagagaagatcccagcacaaagcagtgagtggtaaataaagacaatcgctcaataataacaataatagttcactacagcagagattcactgagaaaagatgcatgtatttatttcagcttatatccaaaaacaaattggaataaaccaacatatttaattttccttacactagaaaagggaggaatcagtatttgtaacaagtaattgcatggagtagattgaattatagaagaaatttgactgaaattgatttagaatattttaaccaaatctgtaatgctgaatttcattggcctcaacaaaacgaatggagcagacaatagacaaggatgagaacaaaatgatcatctaatgcatccaatatcaatgggaagttcaccccaagcaagggcatgtatgtagttagaggtttgaacatgatttgcagcacaatacaaaatatctcatgcaatgttgacgccgataagagaattactgtgtggtgattgcctaagtgtagtatacaaactacacacagatgtacaatagaaattctccatttctttttcaataaactacagaaccataagttaggggatttttaataaaatggagaacatgcttttgttgtataactcaagagatggatgaaaatcatttaatcagatattgaacagttcttgatacagcagataaatactttagaaacatcaactcatgtcacaattaaatatgcactttcaagtccaatgaaatgataacgaactcacaggggaaagaccactgttacttgcttgaaaatcgtacaaaaaaattaccatcaaaacatacctggtgagccctgcagatcagatctagatcatgtgtctggagaaactcagcgaccttatcagctccaaaagtgtatgatacacccctgtcattctcaccccaaccttcgatttctttatctgggtctgaccacaacagatcacacaggagaccatggtctggaacatcaactgggcgggcaatgttgcgaatctggtccatgttctttaggtcaggagataaacccccatgcatgcataggatcttgtcatcaataagtgcagccacagggaggcagttgaaacaatcagtaaaaaccttccaaatacgaacattaaacctccttttgcattcatcaaagaatccgtagattcggttgatagatgcgcactcatggtttcccctaaggaggaagaagttctctgggtacttaatcttatacgcaaggagaagacatatagtttctatactctgtttcccacggtcaacataatcacctagaaacaagtagtttgcctctggtgggaagcccccatactcaaataaccgaagaagatcagaatactggccatggatatctcctgtcaatgagtaagtaggcagaatgatggtaagcatgatgcaatcacattctacaacatgttacaaattgtttatagttagaacaagaagttttagcgtatttgtgataggtgcttagtatcttggtatgaaatttcttcatgccacacttgaacaatgatgtgctgtagacaaagataattctatgaaggtgcatcaggatattttttttgttcggggaaattttatttgcctctatagcatgtactgcaattttaaaacatattcttgtctcccaagcgctaacaaaagataatgtggctaaagaattgtgaagacatataaacacagtttcttcattataacaataaaactagcctgaagtttgacactctgaatcaaccttcagaaattctgcggtattctcattgaaactagaaatttcatcggcaagtcaaagcaaggaagatatagattaatcatattctgttgacaatctgccctgaccccacccaaaagaggacaattctgcaatccaagccatatcaatcatcatcaagattcaagttcaacaactacgaaagcaatataaatcttccccaaaagaatcaacatcctaaaatcaccggtgctgtttatgacaacaaaaattcgaagaacacccaagtctaagcgcttcgaaccataaatacacctcgaattagcatcagaaaacacaccaaatattttcccagacacgcagcgttatcactcaggcgaccgcacataccgcaagaacaacacaacccgaggagaccgacccttctcgctagggttttgcggcggggaggggagggggtagaagcagcaggcctcacataccgcagattttgatgggggcctcgagctcgaggaggttgggctgggagaggaagacgtccttggcggcggcgcagagcttgcggatctccgcgtcggcgagctgcgcggggcgcgccgtgcggccgccgcgggcgtccaggagccgccggatcaagtcgtcgagcgccgccgcatccatcgccggtggagagagagagagagacccaaaaaccctagcagcgagtcgccgcgagcgatggcgagcgagagaggcagctaaaccctagctttttgttttccttcgatcggcggagacgaggaggaggaggagggagagcgaacggaaaaaatcgggtgtgaattgcgacgcgtacccgatggtttgtaccagggaaggggtgggggtgggcccgtggtcgagaaagggaaaggctggtcaaggtgcattgcatatgggtcaaggaaacttgtttgaagggtcccttctggtttgaataatggggcctgagaatcaaccttttcgattttatgtgctttgttttgattctaagggcacgtttagttcgcgaaatgaaaatttttggatatcacatcggacgtttgaccggatgtcggaaggggttttcgaacacgaatgaaaaaactaatttcataactcgctcggaaaccacgagacgaattttttgagcctaattaatccgtcattagcacatgtgggttactgtagcacttatggctaatcatgtactaattaggctcaaacgattcgtctcgtgatttcccccctaactgtgcaattagtttttcattttatctatatttaatgcttcatgcatgtgtccaaagattcgatgtgatgttttttggaaaaacttttggggaactaaacggggcctaatgaggttgtgtttagttcatactgaagtttggaagtttggttgaaattggtacgatgtgatagaagttgtgtgtgtatgaaagatttgatgtgatagaaagttggaagtttggagaaaaaaactttggaactaaacagggcctgagtatagtcgcttttataaatctactataaacctaacagtctactagtgtagtgtaattggctctagctaaatttgtttatcttaactcatctaacttactcacgggtagagaccggagatgtaatctatttccattatcaaaaaaactaatgtaacttgcttattcaccttatttagcacttcagtgaacttccatcatattttgtgttatcaaatgaaccaaaaataaaaagggcgagcccttgttcggcacggcagcgagttggcgtctgcgagcaagtggagtagcaggtatggagtcgcaacacgatgtgtaggcgcataagagaagggtaataatagagcccacttcctactattagcttatcttaaagccaatatatataataaattagctataaaattggctacaattttctttttatctctatatctctcagttatacatttaatgcatttgtcttggaccttgtgataagctagctcttgcatgaaagccagtatccttaatttttcactatctctcttctacactaaatttatagtaggtttaaagctcactattatacttgctctaagcagtgaaggggatcagaggctcggagcgcgtgcaagtgggagcgacgtcgcgctactagtgacgctcattttctttttaccggtggttagcatccctattagtttccttgattttaatcgctaaaactgaaaatcgctgcccattttacctgaacggaaggaggaacaagatatttgagttaattttagggctttttggtcttttagtgtacgatttttttttaacatgctaacgtgatgggagttctaagatttggaaatctctaacgggtaggaaaaggagcaagttatagtgctatttttgttttggtaccgggacaaaacctgtgctaccaatattttctccttaagaaaggctcttttttgcattttgacgaacactgaagaaacattgtaggatgtcattagccaaatcaaaattttaagtaggtctcacttgattgattctactctagatatgcctaatatgcaaattggtgattctaataattctcataaattaatgtcattcattttttattttaaattcaaccaaatgtatcactacattgagtgatcatgttgtttgatgaaattttgtcattctgaactaagcaagcgagattattatttagctaagaagctaacttgttgttttgcatgaaatgcatgggccatgcattactgtgcacatcatatctagccaaccatatatatgactcacatgcagtctgctatgtatatgtgtgtgcccaatatatactggtgcatgagccggcaaacaaagactcgagcggcatgtgagcagcttatacgcgagcgctcgtacgtggccttatacctggtatacgtatacatgtacatatatatcagataattttccctggactcaaagcaacggcaagcaaggactagtgcttgggccgcatatgggccggcggagttgcgctgcatgctcgttgtacgtacgcggctggataaccacgcgtatacgcgtacatgaggaggatttctcgccaacggcaagatactgatgcggagataacgtcagataactcagtcctatctggtcatctcgatgattcaaacaagagtaatccgcagcaactaaacccggaagagtcggatcgatctaacgctcggccgcggtggcgccgagggattcgcagtgtgggttagggctccctgcgcctgtaaaaggagaccatcactacacagggctcacacgcacacagccatttcactcctctcttcacacaaaaccatttcgctcttctctacacacacattcatcacacaccatcgagcaccacaacatcgccattgatccttccggcatccacgagctcgtccacttccattcaccacacgtccagccgtcggtgtgacttcgccggagcagcagccgcgctgcgcacttcgccggagcagtacacgcgacgtcagcatcggcgtccatcacgccggtgtccggcagggggacgcgtacctgtccaccgtcaaccatcgcgaggagaaggaccatggctgcacaaggtaaatgctactaatcaaattttatttgcagttcacgcatgcatgagatggcgacgagacgagaatgtcggagcaccgctggacggtgcccgcacgccgtcgttgagtctgccgagtcatgtaagtgctgttcgtcggactggagagcaagtcgccgttcgttgtcatgtccggacgaagggcctcgtcatgctacctcgccggaatactccgcctcgacatcgtgaacgccgcccacggagccatgacgccgccctcgccggagtcgccatgccgaacgcctcgccgaccgtcttcggcggtgttgtcatcttcctcacgccgtggcgccgccggagcacgggccatcctcgcttggctggtggcgacttccacctcacagcgtcttcatcagcgcgcgtcatcatcctcctcacacgcgctgtcgttgagtccggccacaccatcctccacctcgtcgagatttgctgggttaacccagagaaggccatctccgtgccgcctagccagagcatgttgagaatcatcagaaccgccggaaacgtcgtcaagctgccgtcattgccgtcgtcgtggtgccgaggcgtcttcaagccgtgctgttctggcccgccgatcgtcatcggtacaggaagaaggaggctgtcggggcggtcttgaacgtcgccgaactgccctaacctgagtcctatcagagccgtcgccaagccgccgctctcgtctacaccgccaggcgatggagatcgctgcccatgcgatcccgctggaggtcgccggcaagccatcgtcgttacgtcggtctccgctcatgccgtctctatggagcgccgctgttagccgggaggccatgtcatccactttgtcgacgacgccctgacgctcgtcaagccaccggtgacgccgtcgtgccatcatcgccgcaccaccgccaaactccgagcatgtctcgtcattgagactccactgaccggcgacgctttcacgctcgtcgcggtccctgaggcgctgccgatgttcacctgatcgcgcttgacggcgctgcctcctcctccacgtgttctccgttgctgtcgttgccggcgccatgtcattcacagtgccgcgggctgccgtaaagccaatggccaagcctgcagaaaagcacgtcatctacagtaactacggcaaaaatcatcacacactagtgtttcacgtgtgcatgcatgccactgtgtgcacagtgacaagcaaaccaaaatggcttattgctaagctatactcatttggccatgaggatgtgtatcgttatacactaatttctcaagtgcaagaacagttcggtggtctgcatagaccatctctgtccaagctatgcgattccatgcatgtcttcttcaagcaatctacaccaacacgtcgttcaagactgacgaggctagacgacgggggcgggcgaagccgacgcgaaggctacgtcaccaatatcggcgcacggaccgacgaggccgtggaccgctgccggcgcccacatctacatcaccatcacaaccatgcatggagaatgcgaaacgaagacgatgagatgaccactagcagcttaatcggaggttctcttgcaggcctagacctacagaggtaattaaccgggagctttttgaggccccgggaaccaggagaccacatcgcacaaatctgtccaacgacaggttattaagcgcgtatcattatatgggaatttgtatttataatccttgagattaataaagcgcatgttccctatgttttgtttattgtgtacttagttacactggcacacatgcacatatacatatctctaaacatagagatcataggcgttatttttcaccctaaacacattttccacataaataccgtcagatggataagaccataacattataatctttcccaatatcatattttcatactgtatagtatgtatatgaatattaactgcatgccttttttttccgtagtgacatcccaacacaagttgtttcgaaaaagtgaaacccgtgctttcttatgttttcttcctttaacaataaatcaaaacaagtgaatttaatttgtctatttccatagaataaagaacatatgcatataatgtatgggtaccattcccaatcaaagacatcaaatttagctcaatggttggtcacttcgaaaaaagtcatgtaaactttagctaaacattaaacctaaaaattccgtttgctgaaaaaaaacagaagaaaaacgaaaacaaataagggtgtgtatagtttttttgggtgtaaagtttttaagtatacggacacacatttaaattattaaacgtagattaataacaaaataaattacagattccgcatgtagactgctagacgattttattaagcctaattagtccgtcattagcaaatgtttttccgcatgtagactgctaggcgaatttattaagcctaattaatccgtcattagcaaatgtttactgtagcatcacattgtcaaaccatagcgtaattaggctcaaaagattcgtcttgcaatttacatggaaattgtgcaattggttttttttcatccacatttaataccccttacatgtgtccaaacatttgatgtgacctttttataaaaaatttttgcaatctaaacaagggccgtgtttagtttcccctattcccaactttccatcacaaccaaaactttcctacacacataaacttttaacttttttttccaaactcctaacttttttttaaacttttaatttttttcagaaactaaacacctaaaacctaacagtataacacggcatacatagatgtaaccttggaagaactcttcaatgccgtgagctcagcatcctcaaaatccacgcacaaccgaaagcaaaacataaatgcaaccccccgcgcggcggacgaagaagcgaggaagaagaaagaaaaccgcaaaaaagccacaaacacccaacgcgtcggcgtccactccctcgctcgcccgctggatgacacacggcgacgaatacacgaaaccactgcgagaccgcgcgcgcaccccggaagaagcaaaaaaagaaaaaaaaaaagctggcgaaacccgcaaaaaggcctcccaaaaccaaaaaaaacccgcacgagacgagacgagacgaagcaagcgacgcgcgtgcgtgtgcaagccacccacctccctctcgtcctcagctcgggcagagcgagcagcagcggaagcagcaaggcatgggcgcaacactaaaaagaagcggccgcacctccccaaaaccaccaccacctccacctcctcctcttcaccttcttctcttctcctctccacttctccccaccaccaccaccacctcgatcgcatcctccgttcttggctgcggcgcgcgtggaggaggaggaggatggacgagcagcggggacgcggggggttcgacgaactggtgctcttgcatcagcagcaggagcagcggaggcggagggagcagcagcaggaggaggaggaggaagaggaggtgcggcgccagatgttcggcgcggtggtcggtgggctagccgcgttccctgcggcggcggcggctctgggacagcagcaggtggactgcggcggggagctgggcgggttctgcgacagcgaggcgggcgggtcgtcggagccggaggcggcggcgggggcgcgcccgcgcgggggatccggcagcaagcggagccgcgccgccgaggtgcacaacctctccgagaaggttggcgaccccggcttttttttctccgcacacgtacgctggtgaataagcgttcttcctgcttcgcatccttgtgatttactgttgcttttttggtttttgggcgcagaggaggaggagcaagatcaacgagaagatgaaggcattgcagagcctgataccgaattccaacaaggtgatccgtcgcaaaaaggcgacgtttaattttaacgttcatgaactgggattctgttgggtttgcgctggaaatttatcagtgtttgtgtgctggttttgtgggttgcagactgacaaggcatccatgcttgacgaagccatcgagtacctgaagcaactgcagctccaagtgcaggtcagcagatagatcatagatgtctggatgatgctaaaaattgctgatgcattgagtttggtctcagattggtagaaatgtggttgtaggattgcagtgagtgcatcctgtcttacagattattcttccaatctatgtcgtgattagggtgcgccgtagatgctctagtgaagaagaatccttatactttcttgttcttgcaggattttagttgcgatgtgatatgttcatgcaagatgttagaagggtccactatgtacatagacaacagtacttgatcaatgccaaactcgttctgtcccttaagtaaaagttataccattattacattgggtgccaatttaagctcaaacctctttggcctcagtgcttgtttgtcaagacttattctttttaaaaaaataaaaaaaggaaaaaggaaaaaaaaacataatcatatcaacttgcttgaccccatctcgtcatgacgagcaataaaactagtggactgtcaaggcatgcaaactctgcaaaacatgaatggtgagatatggctcatccaatgtggacaattaaacattttggagctacctcttgttctgcagtacaattggggatgggcacaaagctggtttaacagtatttgctttgtctagtatgctaagtgttacagtatgcggtaatatagtctgattgcaaaccatgattgctgcctttttttaatacttcacgatttcacatgaacataatcactatgggactctgcgtggtaaggtaaccatactattggttcatgttaggggattctccccagcactttacaaagtggtttttatacattcagtgaaaattttttactaaacctggttgttgacgacatttaggatttttactgttgacttgcttagattgaccatgaagcttgctgggcgtgctggtttatactaaggcaaggactagtttcctagggtgaatgtgttttggaatccacatctattgatttactatgctgctgggtgttaataactaaaaattatatatatgagttttttcctctgaaatttgttacagatgctctcaatgagaaacggtgtttacttgaacccatcttatttatctggagcacttgagcctgcgcaagcatcacagatgtttgcagcccttggtggtaacaacgtcacagtggtgcaccccgggacagtgatgccaccagtgaaccaaagctcaggagctcatcatttgtttgatccattgaactctcctccacaaaatcaaccacaatctctaatcctaccaagtgttcctagcacagccattcctgagcctccatttcacctggagtcatcacagtcccaccttcgacaatttcagttgcctggatcctctgaggtaatataagagaaaaattatctggacttaactgtttgtatatatatggtattgcagtttcacaagattttgtttttacatgtacttttatctgtaaaagatggtgtttcatggagagataatgccaaagcaccacctatcatcacatcaagaaagtctgccaggtttgtgacactatttttaactagcttttgtcaagatttctgttcatttcactaacacacacacaccccttgtctttgttcttttcgctgacttttgtcttcatcctctcaaaggaaacgagatgaactccatcaggaaagaatcatccatgttgaacaccaataattttgatggtgtctcacttagcaaagagcaatcataggatatggtaccaaaaagtacaagacatgcataggtatgcttctacaatgtcaaatcaaaattttcaaacaatctgagcttttttactaaaagttggatttgtggtacaacttcatgatggaaaataattccttgatttgaacaaacttccttgatttgctggcatgttatctagcatgtgtttagatcatggatgtacaaatttgaaaattgttgatattcagtatttagtcctgggcttcctctaaatatgttgtagtcaagaatgacaatgagatggtgcttaaaaatggagtagatcgacagaagtttgttggccttatttaatctactccatgattttcatcgtaccatgaaagagcatattttttcagataggtgaactacccaatcttgctcaataaagtattgtgctacttcaacactcctacttcatagacatttgataagatagttcggaagaacaaataaaataatttaactcacttcctgacctaattttgtttcttatcctagcatgttccactatacctaatgaaaccttgacaaagttttagctaacattttgtttgttttgatctcttgacagcttaggacgtggttgctggtggcattgaaatcaggtgcgaaagaaggatgacgtgacctagttcagtagtctaacagacaggcagactttcagaattgcttacctctatcaatagtgctattattcttgaagcgacctgaatgcttcacaaaactagcatgtaatcgtaatcgttttaatgaagtccattcgaaaactagcatatagatgagatcatgagaccatgtaatcatctacgaaatgtttagtgaagagcagcacgagcaaagtcctctttgtactggtctaagcatctagtagcactcctgtgaaggatcagagattcacagaatatagtcgtctactgaaactttttaagactgaagaaatcttcgtggtcccccttttgtcaaatattttgagcaatcattggtggtcagttggtcacccactttcgactccatgaatttcatcacatttgttttaaaaatgctcttaccttgaaaaaaagaagtccatttggatcatgacagttttcttcgtatatgcagagattgaataatttgatgttccatattgtaactacacgagatcactacagtgtaaaccaaaggaagagaaaaaaggctatgcaaactaaacttttcttataaaactcttacaaacgatgatatgccacagtgtgattaaccaagatcagttttcggtctaaatcacattgtttgtaagagtttcatgtgccacattggcactgctctcaaccaaaaaaagaggcaaaaattattacttcatttatctcaaaatataataacctacaatcagatgtaacatatcataatcttataaatttgaacaaccttagccacatagacccatattagtgtaaaggcctgattttacccattgtccagaaaaaataaatttaaacaacatgtccaaattcataataatatattctacttcctccgtttcataatgtaaagtcttttaacattgtctaaattcatataaatattaaatcattcatttgaatttacccatggctaaaaagtcttacattatgaaaagagggagtagtatcatacgttgctgctatattacgagacaaaggatgtaaaatttaaaagaatctcgtacctgctccagtagtcgtgtcaatttggaaaattggaaagccgtggggagatgaggagatggaggggggcgagtgggcgaccaacgcgactgcgcacggacgcgtccgggcggggcgggggcgtcgtcaacgtcgcgtcactgctgcgatcgcctcccctccaatcctccacaacaaaatctcctcccgtatttccgatacatcgacagcgcaaccaccaccaccaccatgcgccgcggccgccgccgatgacgccgcctcccacca

SEQ ID NO: 18368 - DNA, 20848 bp, Oryza sativa
aagctctcgtccctgtaccaggagctggagcaggggaaggtgctcgaccacggccagtacctcgccggtgacggcgacgggtaccctcttctcccctggctcatggtgccgttccgggggccagcggtgcccggctcgccggaggcggagttcaacgccgcgcacgacgcaacgtgccgcaaggcgaggcgcacggtccggagcctgaagggatggggcgccatcgctcgcctccgtgacgaggagagccctcgcgccgccgtggcgtgcatcgggacatgcgcaatgctccacaacgtgttgctcgcgagagaggaccactcggcgttggcgccggaggagaccgacttgccgccggcggtgcagcgccgggcggacgacggcgacgccgccggagtggaagatctcgagatccataggcgcgcatcggcgtttcggggcgcattggcggcgacgatgagacgccggtgacatgggtgaattgaactgcctagctctctggtgatgaactgatgattgtttagcattagcaacgacagatctatgcaattgttgattcttttggatcaaattgtttgtatattgctagctgctgaattcctgattgttccattgatcccattgggttcttttagtttgttgcctgctgaataaaatggagaaataatttgatggaaagttaggggccgtacctacgaattggagaccccgatgctagatgagagatgctataagtacgattcttttacaaacgatgcttgtacggcgtaatggttctctcttaaggcccataatttggcttttttcctaataaaccaaaacggcttattagggaataaaaataaatttataggtaaaacttatatttatatatatatatatatattcttggtgacttaaaggctaatactaaaaaaaactacgttgaaaatatctcaaaatcaatctcaaaattaagtttgaatttttaaatttggctttttctttagcttattaggccatccgatgggagccttagcccgtgacatttattgtctgtttcatagtgaagcaattcatatcattcaccatctgttcacaatgtaggatcgtacgtagaaatcggatgaggctttacgacatgtcattggccatgtctatctgactttacgtcagaagagctcgctccgtagaaatcatatgcattgtgctaaatctttaaaagacattatgtttagaaaatatcatttaaacaagggacaattgtaaaatagtagatttcactatatagactatataatggactaaacctccacagtaaaccgaggctataacaggttcacatactctaccataatgatactaacattacaaacactgacgtatagcacaatagaagagtgagactcacgtatcagtaactgtaatagtgataacattatggtggaggatcctctcacccggctataatcactttacattaaatgcaatatattttacaattcatttgaaagaggacccaacgttgtgttttgctcgtttgatgatcttctatctatattaaaagtcctactatgtgactaataataacgaatagagttatatgaaaaaacacaacaaaaacatatggttgactaagaaatcttagcaagaatatcttcgaaaaatcattatatgtatagaaaagaatcttcaataactaaaacatgcatttatattgttgtcataagctatgggtatttaagaataagtatgttttagctgatcggtggtgaagaagtgaaacttactaagtagaaaataggataaaaataaccttaaatatattagaattagattaaaaccaaaactcatgatggaagtggatgcatttgcagagaccaaagtaggagaaaaaaatgtcaattagatgcgtaattaaacagaaacttcggagagagcaagtctcctctgctcttgcttccggagttggcgtctcggacggcaaggttcgagctatcctgttgttttacaaaatgccccctgattcatgtctatactctataccaattctcttatttttgcaaaataacccctactagttctatcggtcctgctattttgcaaagtagtcctcctctcttccgcctcgtccccgtcaaacccttgccggcggcggccgccggccggagaggcggatggcgtcgtcgatctcctgcgcgcggccctcgcccgccgccgcttcatcgcctctagctccggcagcctgacgtcaccgtccctcccctccttggattgcagcagtaggctaacaagatcatgaaacgagctccccctccaccccacattccggcgatcccccccaccctacctgacctaggccaatgagagtatcgtccccgtgccgtcggtgaacggcggagtaagattcgccggcgaggttaagtattgttcctgactttcttcttccaaggtgacagcctcgagaagctgtccccattgaatccatgttactgctacccaacaaatgtggctgggtgatgaacagaaacagtgttggcgttttctcgattaagatgagatcagtgcgggttcaaggtgtgaaagcggaggatttgaagatgcagttattcagctattttttccttgcatgatcttctgattcaggtaatccctttttccttgtttgtttttcctagtttttgtcttgtgttcattgggatgtgcttgattgggcttcaatcatgccaaaattagaggtagagtgtacgttatgttccattgcaagatggagtccacactccacagcattctgtactttgtgttataaaagctggaagcttagaattcatctcttcaattctgcattctgtttgatgaagcagcttttaagttacaaagttgcagtacatatctgacagggccagtttagtttgacttttcagctgtttccttctattagaggaaaagaaaatgttttgtatagctgctatgttatttagcttgttgtctgcgccataaattccgtaataagaatttgggcttcttttgtaacagattatttacatatttcaggccccacttggaacgccgggaatttcttttttcagttccagttaaattcctattgttaaaacgaggccttcagtatgcaatagatttgctggttaggatccaacctttcactccaaggaaaaaaattataagcatatactggaaacagaggcattttaccactacatgtttaattagaactgggtgttcatacaagttggtacgatttttacacgtagggataagagaatgctctcgacaacatttctaagggctcttattcaactagttaaagcacatcacctagctgggagccatgaaaaatgtcacctagataattacagtgctggccattattccaccagttaaagcagattttgaaccacttggctcatgcttggtctttggctcctctcctcttccacgcatgaaactgctatctttaacatcttgactgcttgtgaataattaaactctccttccagtctgccatcaacaaactccaagagccatgactgatcttcgtttaccaatttctctttgagaatatcagcagtgcgtttaacgcccagttccaccttctcaccctcaaccatccatcttgaaacccgaatccccttcactaactcaagaagcacaactccatagctgaaaacatcagccttgcctgtgatcggaagatttagaacccattctggtgcaatgtaccctctagttccatgcactcttgacaacattagtgcagttccttgcttaagtagtttgaccagtccaaaatctgcaatctttggctcaaagtctttatctaacaatatgttttctggtttgatatcgcagtgtacgatccattcaagacactcatggtgaagatatgccagtccttttgctacgccaattgcaatattgtaccgttggttccattttagcaaaggaaataagttctgatggtcaaacacaagtctgtctaaagaaccattctcaatgtactcagaaaccaagagcctacttgtcttctctgcacagaacccccaaactctaaccagattcatatgatatattcttcctatgacacttagctcagaccttaactcctgctctccatagatcacatcatttagctttttcactgcaacctgcctttcatcatcgaggactcccttgtaaaccacacctgatccaccattcccgctcttcctgaaaacaattggttgccttgtgtaactccttgtagctgaatcttcggaattggctagaaatgatcatgtaaccttcgtcagtaatctctgatattgtctcccattttttaacaactgaaaagccagcaacaattaaaaccacttcaatcaaaagcactgttaacagagaagaaaggaagtaaccaaacatgaacttggatgggacatcttcgagcatttgtgatgaagggtaggctaatttttcagtaactccacaagaatgggttagtctagaatctgattctttggtaaacggcacccccttaggaactttcaggtagatgtcattgtaaggatctgggaagctcctgccattgaaaagcgtgtactttgggtaacataggccagttctccttcggtaaccgaaggcttggcatttagcgttggccaggcacatatttctacagtttgagaacggcactgactctgcgtagtccatgtcatatccccagaagtcagttccagtgttctttctgaatgaaaagtcccggctgatagtgttgtttgtatttgttctattccctttatcccagatgactgtcatgtctgccttgcgcttgcaccctttgctccagtcactcggatcaatcacctcgaagccttggagtcaagaacaatggagtctcgggatgtaattgcagatgctgtttataccacacactccatgcatttggcataatctagagaatgccatccaagaaactgaccagttgccactggtctcgtttaggctgtacagcctaagatttccatcgtaatccagagtcaacctcctcatgacatgatcgccaagatcagagtcttcaaacttaaataggtcacttgatacaaaacgacctgtctgatttagaaccccatatcggcgactgtcataagttgtccttccattcttccatggcaggtgaaccgaaggatttggccaatatatgctggcagtgtcagggccattgtagacgagagtcaaaatattgttactgtcgaagagaaagttgtagaagcctgaatataacaaacccctggcagatgcagataccagctttacattcctagttattggttgcaacggcagaagtgtgtctgttggcgagtcgaagctcctccatagatgctggccttgtaggtccatgacaacaaggtttccattgttgagaagctctgctcgatttgcttgagtggctgttgtgttggtgctccatacaactttgccattgtagtcaagaagggccaaggtcccgtcgttctggaaggtgagcctggagcccttgccattcaccggagcatcgcggttcgccgtccaagcgacagtcttctctgacgacctggaaaaccagatggagaaggtgaaggcgttggtggccaccttgtagaagccacaggagaaatcgtcattgggggacactaggatggcggtggtgtcatcctgggttgaaatggatgaacgcctagtaagaaagctcttttgatcttttgcaacagcagtggggagcatgagaaggaaggatatcactgtggtgaaaatgcagaagcctctcacggcgacggtaagtatttttttggtcatcatccaagttggtgtgttttagaatcaatatgtcatatattgtagtgttctatcacccttgttgagtcctaagcttgcaaatgctgtggctgtttcctgttgcagttttgctacggcatgcatgaacttaaacatgaatgatgaaagcgagcaaacggccagtcgttgattcagcatgtccaggacggcgttgccgagtaccacatgcctgcttggctccgttgctgtctgattcccccaggtgtctggtgacaaacagaacgttgtattggacagggttatggcattcaaaccagaatatttgactggtaatttctatgtaatatgttaggaatatttatagaaccgttatacttatgatagataagtattatgaaagtgatgtctgagaaatatactgggataatttccctgtaccaaatacgaatgtttactccattccatccgtttgcaaatacttctcaatttttaccaagactgcatgttgagtaactatagccaggccagggccacttctgtttgtacagcacatgatagccaaactaaatctttgcaacccaaatatcagcaaattgaacgtataaacactggctaattttgaatctggctggcgttaccaaaaaatttagcaggaaaaaaaaatctggccaaagctgtcaaaaaaatatattggtagtactagcactaatacactaccctccttcccgttataagtgcatttttaaaagctagtgaggaaaataagaggaagaaagctagtgaggaaaataagaggaagagaaaattaccaaagcgtctcctattaaatgagcaatggtagagagtgaaaggacagttgagagatgataggattgttcatattttgggacttactccctccgtttcaaaatgtttgacaccgttgattttttaatatgtgtttgaccattcgtcttattcaaaaaaattaagtaattatttattattttcatatcatttgattcattgttaaatatactttcatgtacacatatagttttacatatttcataatttttttaataagacgaacggtcaaatatgtgctaaaaagtcaatggtgtcatgaaacggagggagtattttatgacagagataatgcaagtttctcctgtaatggtgttaagcccaaatggcccaagcattgcaattagaagcaaatgggccggacacaatataccacttggatcagcccagatgatgaggatgcctctcgaacttcgccacggcccacggagcagcagcgctcccggcgacggcgaggagcggcggccaccgccctcgcggcggatttggggtaccccgctgccgcccttgcccatggcggccgccgttccggtgccctggtcgccggagtcggagttcgacggcgcggaggaggcgccgtccggagctcgatgccgcaaagagagccctcacgccgcagcggcgctgataactggtaagaggggattaatcagcatatgtagttactggaggagtgggaggaggagtccgaggctgatttggaggtttgtgtgcagtgcagatgatgccggagtggaaggattcgagatttgatgagcgcatcggagcagcgccaacaatgaggacctggtggtagattcctttaaactatcttgcggttttttttttctagttcttttggatcatacggcttgagtggtactgaattttaggctccaattatatttgtttagtttgttcctgatccataaatcaatcggtaatactggaaagaatttagattcccagttcccacgtcttcgcagtcttgacaaatggcaaatagacatgttcattattaggctgaatacattcaagttttactatcgtctacgttgttagactcaaagggttggtcccaaaaaaaatggatttctcttgtacactatatagaacaaggtttacatgcatagttcaaatggatgcatccttggagtgggatgatgctaggattagttatgtttttgctgttctggctggttgtatctctggaattatatcctagcttgcttatattttctgttgttgaactgtattggtagctggtaaccgataatggtttgtcagatttctatagaagctgggccaagtggccttctatctttaaaaatggattcatcctgtacataaagaacaaactacccaaacaagtataccactataacggtttattatgaatgaatactggatactatactttaatactcttttgagggaatgcgaatactaccacagaactactccatgtaagacaggcgctcattaacttctctctgcaacaacataccttatcattttctcacaatagatagaaatgcagcaatcacagtagtggacattattccacaagcgaaagcaggacttcaaccacagtatccatgcttggtctcatgcgcctatcttcttccagacataacactgctatctttagtactgtggccgcctgtgaatagttgaattctccatccagcctgctgtcaacaaattccagcagccatgattgatcttcgctagctagtttctctctaagagtgtcaacattgcgtttaacagccagacctacctcctccttgccatcaaccacccatctggaaacccgactccccttcactaactcaagaagtactactccatagctgtaaacatcagccttgccagtgattggaagatttagagcccattctggtgcaatataccctctagttccatgcactcttgacggcatttgtgctgcttctggcttaagtagtttcaccagtccaaaatctgcaatctttggctcaaagtctttatctaacaatatgttttccggtttgatatcgcagtgcacgatccattcaagacactcatggtgaagatatgccagtccttttgccactccaagtgcaatattgtacctttggctccattttaggacaggaaataagttgtggtagtcaaacagaagtctgtctaaagaaccgttctcactgtactcagaaaccaagagcctctttgtcttctccacacaaaacccccaaattctaaccagattcatatgatatattcttcctatgacacttagctcagaccttaactcctgctctccatagatcacatcatttaaaattttcactgcaaccttcctttcatcatcgaggactcccttgtaaaccacacccgatccaccacttcccagctcttcctgaaaacaattggttgccttttgtaactccttgtagctgaatcttcggaactgactagaaatgattgcgtaaccttcatcggtaatctcaggccttgtctcccattttctaacaactgaaaacccaacaatgattaaaaccacttcaatcaaaagcaacgttaacacagaagaaaggaagtaaccaaactcgaaattggaagtgacttcctcaaacatttgtgatgaagggtaggctaacttttctgtaactccacaagaatgggttggtctagaatctgattcttcgcgaaacggcacccccttgggaactttcagatagaggtcattgtaaggatctgggaagcgccagccattgaaaagagagtactttggataagattcaccagttcccttccggtagccgaaggcttgacagttattggcggtgaggcacatatttctacagtttgagtatggtattaactgtgtgtaggcggtgtcatacccccagaagtcagttgcagtgatctttctgattgagaagtcctggctggtagagttgtttgtaatattatgtctattccctttatcccagattgctgttatgtccaccttgcgcttgcatcctttgctccagtcagtcggatcaatcacctcgaagccttggaggcaagaacaatggagttccgggatgtaattgcagacagcgtttgtgccacacactccatgcatttgacatactctagagaatgccatccaagaaactgaccagttgccactggtctcgtttaggctgtacagcctaagatttccatcgtaatccagtgtcaacctcctcatgacatgatcgccaagatcagaggcttcaaacttaaaaaggtcacttgatacaaaataacctgtctgatttagaacaccatatcgaagactgtcataagttgtccttccattcttccatggctggtcaaaggaaggatttggccaatatatgctggcagtgtctgggccgttgtagacgagagtcaaaatattgttactgtcgaagagaaagttgtagaagcctgaatatagcagccccctgcagatgcatataccagctttacattcctagttattggctgcaacggcagaagtgtatctgttggcgagtcgaagctcctccatagatgctggccttcaggatccatgacaacaaggtttccattgttgagaagctctgctcggtcggctcgagtggctgttgtgttggtgctccatacaactttgccattgtagtcaagaagggccaaggtgccgtccttctggaaggtgagcctggaaccctttccgttcaccggagcatcgcggttcgccgtccaagcgaccgtcttctccgacgacctggagaaccagatggagaaggtgaatgcgttggtggccaccctgtagaatccgcaggagaagtcgccattgggggacactaggatggtggtggtgtcatcctgggttgaaatggatgaacgtctagcaatgaaggcttgggttgaaatggatgaacgtctagcaaggaagggttttctatgatttgcaagagcaattgttggcatgagaaggaagaatattgtggtgaaaatgtagacgcctctcatggctatgacaacatagaaagcaattgcctatgatcatctaacgcaaatgggaaccaatgtgctgtagtccattatatatctagtttccagttgggtcaaaaataaaaggctcgcgagcaaattcggtcagcttcacgacaactttgacggggctcgtgttacaacttgattgggctcgtgtttgctgtatagttcctccctttttttttctggctagttgctacatatgatatacttgatgtactagcttagggaaagggacctaaaattaagccaaccctttgtttcgtcgagcatagcaaatgttagggcatacacatgaatttcacaggattttcatagtttatttcatcaaaattcacgtgaaattcctcaattccaaaggatgcctttgcagccaaaatagtatcagtcgttaggtcttgttcttttcggcttattgattgtggattatttggtggtacacttcctaagtttctaaactttcttcatcggtatttcttagaaagcttttttataacaattttttgaacttcataacatttaattcattcgtatatgtatttaaataattgttgtaaactcagaatcagccatcaactgattcaagcgggacctcaaatccgatcaatcttcgtttacgaagaacaacgagttaggtacttgctagtggctattactttgccgccctaccatttctttgttgcttcacttatcactttccatggccacgtgcccacatcgttgacaagaagtcaacaaggaccgggtggccatcaggcaatagtagtagcaatccttttctctccacgctaaaattaaaagtttaaagaaattaaaatgatgtgacagaaaagttgaaagtttacttgtgtaggaaagttcgatgtgacgaaaaagttgaaagtttaaagaaaaaaagttggaacctaaacagtacccaaatgagaaatccccattgggtgtaacactatggccatgtttagggaggaaagatttggagatgcagctggtctcactagctcgtgagaatatgaaaaactaggtattcagtttctcgtttttaattaaatttttagattttataattatagattctcaagatctgaatgataatctaaactataaattctgggagaagccacttcagaagctccccaaacatctgacatcaacggtgccaccctgagatgctgggacctttggcaatatattttttttaatatattgcagcaggcagcaggcagcagcagtagggagcatgagaaggagataaccgtagcgaaaatgcagaagcgtctaatggcgacggtaagtgtttggtcatcatccacatcaatgcaggaatatactcgtactgattagtgttgtggagccagaagcctgcaaaggcgcttccatcatttaccctttaccctttagcttataaactatatttaaaattaaaattttaaaaattaattttaagttgattttagagcttttttctgtcattgtttatttttccagcatttatttttatatttttaagagcacatataaaaaatatttatttataaattatattcttttattgataaaacattgctgcttataatcaccgtaagcaaaacgacgaccgctgtcgtggcggctctttgctgtagacttgcagtgcatgataggacatgcacgaagtagacatgaatgatggaagggaccacatgccaaacggccaatatttgagaaacacattacaagtgtaggcgtccacagccgcgtacactcgtatgcacatcctacctaagccggtatattttaatattggtaaagtaccacaaacacctcgctggcgacgtactacttaaaaaaaataatttaaactcgaaacctatcgagtaaattagctgcgcccaaacggccaatcttcgattccgcatgtttcagaacggcgctgccgagtactgcagctgacaacaattcgctagtgtccttttactgttctcatgcgctttgttttaattaatttgttgttgaagttgtaactaactaactaacggtgcccgttcggcggccgtctcactgatgttttgttttctttttgctaaatccaaaggtctcccatctaaatgaaactttccagcggcggcaggcggctaccttgttagtttttctaataataaggtcatactccttccgtccctaaatatttaacgctattgacttttttaaacatgtttgaccattcgtcttattcaaaaacttctatgaaatacgtaaaactatatatgtatacataaaaatatatttaacaatgaatcaaatgatagaaaaagaattaataattacttaaattttttaaataagacgaacggtcaaacatatttaaaaaagtcaacggcgtcaaacatttagggacggatggagtattttttttttcatgaatttttcggcacgtttcacccttggatggatattgctttgcagccgcctgtttctgggccgcagcgcacaccggaagagaataatgtaatggggatggtcgagttggcagctaaatacaaatactaatctttcagctggggttcgaacctgcaacttgcttgattttcgttagcataccattttataaaaaccaatttctagatagttttttaaatcaaataaatgtattttttaatttataatacttaatacttaattatttataattatttatgtaccaatgagtcatttcattttactagtcgctagacgctgagtaaaggtcaggtccaacggagcctaagattaggtaagtccaaatgtttttaagtatcatggcatggttgaggatgaggtttatattatcgttaatcaccttgcctactaagatattcctattctctctccgtctcaaaataggttaatatagtacatgatataatatattctagtaatatgaatatgaacatatgttatctatcccttcatctcataaaaaacccaatcatcaggattggcttcttttttttttgacatagtagtatgttcatattattaggatatgccacgtccctatcaaattatttttttatcagtttaatttattttgtgacggagggagtacatgataaaagtgatagtatctcttgtatgaagagttcacggacaagtgagtcatgtagttttttttccactcaacatgggtacaccatatcaatgcgccttgtaggataaagaaggtgacatattgtctttggggttgtaggtacttttcaggataatatattagttttagggttgggcctaactataaagacatgatgatgatatcaatctaataaatgatgcatgtcataaacttgagtcgataattatgtacctttttgccaacttcgaatggagattcttgaatggaattcagtaattgagggttcttttatcttatgttggtgtcttttagtttgtgtgttctttacattattatgtcagaagtgtggactttgtaataattggttataacttgttgagcaaagactgaaatgttattcaattaaaaagataaaaaaaaaggtgacatgcgccatgtagggataaaagtaggctgtacgatgcaaaccctctaaggagataatcgacttgctctttaggagtgaatagattgaaaagattatcatttttcacacgcacactttccgaagtactaaacggtgtatgttacgaaaattttctatagaaaagttgcttttaaaagatattaacttaatttttaatacttaattaatcatacgctaatgactcgtctattttacgtatacatttcaagacacatcctcaaaggttttgattatttagggaggtgccatgcgtgttgttgtagttgagggagcaaaggactcagccgatacttgagggaggaagcatagacatcttcccccaaagaatattggcacatgcttctgtttcaatgggcttcaagcctaatagactccaaatggtccagacataatccctcacttggatcagcccattgccccactctccccgtactgccgccgcaacgagagcaccgtcaaccacagcagcagctcatggcgccgccgctcccggggccggtggtgcccgggggtcgccggaggcggagccgaacgcccgcgcgcaaggctatgtgccgcgacggccggtgagcgcgctgcccgtatcttgctgcccggtgggggcggcacggctcggcgtggagagccctttgcaatggtaagaggggattttactactacgcatttgctcaggtggggggagggggccgaggttgatttcgggggggtttgtgcgcaggtgatgccggagcggaaggattattcgagattgatgcgtgggcattggctggcgtcgccgcgcgcataataaatggtgtgtgattgattcctaaactattgctgtcagtttttttagttcatttggatcatacagcttgcatgatactgaatagttggcggctccagtttaattgttttatttgtccctgctccataaatctagtctaggtagtaatagtgaaaaaggaattagaatttcatttcccacgtcttggtagtcttgacagctactacgacatgtttgtctactttgttagacttagacgcactcatctgtcgaataatgtaatggtatacactgaatatttagtggaaatcgatgcatctcatacatatagatcaaaatatccaaagtttcagacaagtacacttatgatgaatattactactccctccgtttcacaatgtaagtcattgtagcattttccacattcatattgatattaatgaatctagacatatatatctatctagattcattaacatcaatatgaatatgagaaatgctataatgacttacattgtgaaacggaggaagtactatactcttttgagggaacctgaactgtactactctatgtaatacggagtaagtattaagatgatatgtgttcatgtgtctgtagacattttttacataaaaatatccgcccagtatcttctctctgcaactacatacgttattatttttctcatattacacatatcagcaatagccgtactgaccattattccataagtgaaagtaggatttcgaccacactgttcatgcttggtcttttgcgcctatcttcatccagacatgacactgctgtatttagcactaaggctgcctgtgaataattgaattctccattcagcctgcagtcaacaaaatccagcagccatgattgatccccactagctaatttctctttgagaatatcaacagttcgtttaacagccagttccacctcctcctcaccatcaaccacccatctagaaaccctattccctttcactaactcaagaagcactactccatagctgtaaacatcagccttgcctgtgatcggaagatttagagcccactctggcgcaatgtaccctcttgtcccatgcactcgtgataggatatttgtgcttggtcctcgattcagtaatttcaccaatccaaaatccgcaatctttggctcaaaatctttatctaacaatatgttctctggtttaacatcgcaatgcacgatccattccagacattcatggtgtagataagccaatccttttgctaccccaagtgcgatattgtacctttggctccacggtagcacaggaaacacgctctgatggttggataaaactctgtctaaagagccattctcaacaaactcagaaaccaagagcttgtgcgtcttttcggcacaaaacccccaaattctgacaaggttcatatgataaactcgtcctatgatactcagctctgacctgaactcctgttctccgtggatcacatcatttagtttcttcaccgcgaccttcctattatcatcgaggattcccttgtaaactgctcctgatcctccacttcctagttcttcttgaaaaaatccggttgccttctctaactccttgtaactgaaccttcggaattgactggaaattatggtgcagccttcgtctcgaatctctggtcttcttccccatttgtatgtagcccaacatccaactgtaactaaaatcacttcaactacaagcaatgtcaatgctgaagaaaggaagtatccaaacttgaatttcgaattgctaccctcgaacatttgcgatgaaggataggcgtctttttctgttaccttgcagatatgggatggtttagaagccaatagttgtgaagacgacgcctccttggaaaattttagataaatatcattgctaggatctgggaatttcttgccattgataagcaaagccttcgggaaacattcaccttttcccttccgatatgcaaaagcttcgcagccatcatcgttcaagcaaatctgtttgcagactggcaatgcgacagatggggtgtagttgaagtcatacccatagaagtcagtcttggggatctccacgaatatgaatttttgctctgtattgttgtttgcgttatgatcccctttgactgtgatgttttccttgtgcctgcacccttggctccagtaactaggttcagtcatctcgaaaccttcgaggcaggaacactgaaggcttggcatgtatgtgcagaagctgtttatgccacacagaccatgtatctcacagagtcgagggaatgccagccaagagactgaccatttaccattcgttgcgtttaagctatatagccttaggttaccatcataatcgagtgtcaacctcctcatgacatccttatcaccaagatcagacgcttcaaattgaagcttgtcactagctaagaacatgccttcctgattgagaatcccatattggctgctgttataagtagtcctaccattctcccacgaccgctcataaggattaggccaatatatgctgctagtcttagggccattgtatatgatactcaatatgttgttactgtcaaagaagaaggtgtacaagcctgagtaaggcaagcccctggcagatgcagataccagctttgtatctcgagtcatcggctgcaatgggaggagcgtgtcggtcggtgaatcgaagctcttccagaggcgatgaccggctggatccatgacgacgaggttgccgctgtcgtcaagctctgcacggctagcgccagtggccgtggtgttggtgctccacacaaccgtgccgttgtaatcaacaagggccaggctcccgtccttccggaaggtgagcttggagcccttgccgttcaccggagcgtcgcggttcgccgtccacgcgacggtcttctccgacgacctggagaaccagatggagaaggtgaaggcgttggtggccaccttgtagaagccacatgagaagtggccattgggggacacaaggatggtggtggtgtcatcttgggtggagattgaggaaccccttgcaagggagcttctctgatcttctgcaagagcaatggtgagcgcgagaaggaaggagatcgatgtggtgaaaatgctgacgcctctcatggccacggcaagcaactgctttccatggaatgcaagggaaactggtacatatgttattatatgtatcaagattgtgcccattattactgtgacaacttgtcgtagatcgtgtacactaatcctgttgctacagcctaatattcccttcgtcccaaaataaattcatttgtgggtttttatgtctaacgtttgaccgtccgtcttatttaaattttttttatgattagtatttttattgttattagatgataaaacatgaataatattttatacgtgtcttattttttaatatatatatatatatatatatatatatatatatatatatatatatatatatatatatatatatatatatatatatatttcaaataaaacagtcaaacattgaataaaaaacccataaatgaacttattttgggtcagaggtagtagcatttacttgatgtactagcttttttttttaatatttgatgtactagcttcagaaagggactgataaacggccaaaactatcatagataaatgcttcaaagtcctgtatctgtgtgaatgaatatagctgttttatttgcacgctcagcagcctcagctcgattccccgtccaactcaaaaagtcagaaccaatatctccatcatcataaggtcggccttgcaagtactccagcaagttggctagcagaacgaaacaagaagcttccatggcaatgtagcaaaaccagtacttatctgctcttaaccatcctagttctgaagttcatgcatcatttccctccctccccacgtctctcctctcccagtcccagcccaagttatcaagattctctctctcccgtctagtcagagggacattgccattgacatataaattcatggtataagttctacatgttattgatcacgttatgttgtacattatcgtcgatggagctgcttccgggaaagtgttttcatccctcgaatcccttgagagatgaaaatgcatctcgagctgctccccactaatacgccaccctgatgaccaccgcaatagatacagtagcgaacgcgaccctgcaagttgcagcagctgcttcaattgctgcatccctgtgcgatgtgtggctagctagcttagctacatcatgcatgcacgtcctcgatcaaccggtcaagtacggcattaccgaagttgtgaaagctgcaagaaagataacccttggcccttggccgacttggcgacttccagttagattcatcatatgtgaggacagtaacaagctggtagtcctgtactgttcatgaatctcgctgtggcccgctagaagaagggctgtttggttggcaactaaatttatcgcatctaactttaggcaaaccactttttagtggatagtgtttggtttctgccataattttattttgtctaactcttaatcacttggtacacatatcatacactctattttcttatctaactttgtctaagcttagtttgttatcttgtttacacaaaagtatgataagactaagcttagtcacctaataaaaaatatgtggcaacattagtcctcaaccaaacaggtctttaggcaacattagtatcaagtgccaacattgctaaatgttctttttaatccataggcaagctctccaacggtacgatttctccaaaaaaaaaaaatgttaccatcagctattttgaggagaaaaaataaataattttttcaactttctattgtttaattaatccgtttgtacccaaagtaattattgcgaagtgagcatggctcaaccgtttaattttcttgtggtgaaactagcccacccggattcaaattctagacttacacgcgtattcgcatttacggctaattattcttcaagtggcaggcaacataccccactcctgacagcaaggcgtctgcggtaatttcatcgacccactctttcggatgaggtcagcctctactagttcgtccccgctctcgcttactcattgcttatcatttttcaaatacaaaataaggcccattttaaaagaatttcttttgtccaaatacaaaataggcccatttcaaaagaaaaaaatagtaaggcacgcgtaaataaagtttttactgttgttttaccttcttggtcctatttaacactgccccgagctacattataatactccctccgtttcaaaatataaacattttagctttagattcatagccaaaagttgttatattttgggacggaggtagtactactacattgacaagcaatgaatgattcgttaaccattcgctcttatatttccaggatattttaatactgacagagtagatatcatgattatttgtctgctttttttttctgttttccatagttcacaccgttcttaaaaatccttaagctcatcaaagtaaggccccgtttggcacagctctagctcccaactccaatttatctagagctggagctgtgccaaacggtacaaattctctgttttttggagcggagttggcacagcagctccataaatttgtactacggggatggagctgggtttttgctgctccagagctccactccaccctaaaagacccactaccctttaaaattttgatgtatttacacataaatgccattgaactacccctaaactccttctcccatcctctctctcctctcccatcttctccggcaagattcagcggcaaccgacggcgggcggactggcggtggcggcgcacgggctcggcggcggcgtgcgg

SEQ ID NO: 18369 - DNA, 7303 bp, Oryza sativa
tgcagttgccccgcttcttgccgccaccgctccgcctgccctgctccgctccgaccgcggcccgccgccgccctgctccggtccggctaccccgctccaccggcccacgctccgcccgcggacttgctccgctccgactgcccttgctccgccggccaccccgtccatcgcccgctctggtcgccgccgcccgctccaccgatcagtgaggagagagaggggagatggggagagaggaggaagaaaaggggtgaggatgacatgtggggcccacgtgggccccaccaatttttttattaatttgtgtgtgaaactgacatgtgggtcccacgggttttattatttttcggatcgaattaccacgtaagcgccacgtcaataccacgtcagacaaagaccgagtcaaattagccacgtaggcgccacgtcagccaaaaccaccctcaaaaccaccaagggacctaatctgagccggttttgatagttgagggacccattgtgtctggttttccattcgagggacgaaaatcggattcgttgacaagttaagggaccttagatgaacttattcccttagaaaaaggtaaagcccacatgtcaatgctataattgcatgggagagggataaacggatgagaagtgccacaataatcctcatccaatataatctactccatttatcctaaaatataagataatctactctaatcgtctcaaaatataaggtattttaaaggagtgtggcactttactaggaattgagtagtccatatgagccaaaaacacgctagaggattgaacttgaaacaccgaaaatccctaataatctaaagacgcgtgcagattagcgttgattttagacagctcaaacggcgtggcgcgccgcgccgcggcgcctaatcaatcaggccgacccggcggcacgacgagccgcgcggcgtcgaggcgcgggctcagccggagcgcgacgcccctcatgtcctccatgccgcgctcgtacccctccagcgcgtgcgccgcgagctcccgcttgtgctcctcggacagcacgtactcctgcaccgccgccgccttcgccgccgcgagcccgcgctgcgccttctcctcgacctccttccgcatggcgtccgcctccgcggcggcgtcgcgctcccgcgcgcgcagcctctcctccagctccagcgcgtagtccagcgagaacgtcgcgtagttcgccgcctgcgacatgagaacgagtgaacgcggcggcggcgacgacgacgacgagcatcgcatcaatggcgggatgtggatagcgaaacctggagcagcgtgacgtagctcgacgcgacgacgtcggagggcttcgccgccgggaactggcgctcccgcgacggcgtgacgatgccctgaagcagctgccgcgcggccttccagtcggccgtgtcgccgtcgtgcttgtcgggcacgtgccccggcgtacgatcatggtcgctcgccgtcggtttctgcgcggagaacataggcttccgatcttggtcgctcgccgtcggcttctgcgcggagaatcccggcggcggggaagacaggccggaggccgagcacgagaagccatggggagtaggtggcgtcccgtctttcgcattggcctctgcttcaaacttcctcttcttcaccgacgacggcgaacaccgcggcgtgtcgctctccggctcggtcttcaccttctgcgccgtcgccggtgcctgcgccgcggccgccttctccgcccgcatgctcatcatcatctcaaagactgacgggtccatccctgcaggaacacgacgggagttataaattcgttaatgtcgccggagccaggaaggtgttcgacactttaccttcggccctagtagaacgagaaggcggcggcggctgcggcgacgcggcggcggcggggttggaggagaatgcggcggcgaggttgctctcggtgagatacgtcctgagatcaaccgcggcgcggtgcttgtccagaagcttcgccgcccatttctcctcctcaccggtgagcaccggatcggcgatggagctcttggacggcggcccaccccaccgcacctggcacggccacggcgccgacgacgacaagaagaagaaaccttccttccaacctttgaggtgtgtgggcatccccgtgaagagcaacccgacggtgtccttgccgcggaagtggtaccagccgttcgacttgaacaagcacagcttgaagaagtgccggaacacggcgagcgacggcggcacgccggcgtggtgggagagcacgaggaagccggccatgatgcgccacccgttgggcgtgacctcgctcggcgcgaggccgaagtgccggagcacgtcgcaggcgaaggggtgcagcggaacgcgcatcccggcctccagcgcgtccttgtacacgcacacggcccccggcggcggcgtcgagcacgcgcggaggtcgccggcggggcgcgcggcgaaccccttggggacgccgtgcttcttgcagagcgcgtcgacggcttcctgcgtgcgcagtgacgaggcgatgcgatccgcgatggacctcgagggcgcgggcggtgagtcgacggcggcggcggcgtcgtcggcggagggagaggagaaagcgtcggcgtcgatgatctcgacggaagacgaggaggaggaagaggaggaatgcatcgtcttctctcgtggtcaaagcagcagaggtaccagcgggacacaagtttactcttgtaggagttgaaccaaggcgacggttggttttcccatgatggttctgcccccaaatccaattccccccctgctccccccctctctctctctccgtctcctattttgactacaaaagattttaaggctgtgtttgctgggggaggttgggaacgaatcttcttcgcacggaaaacggagcggtccattaacgcgtgattaattagaaattagctatttttttttaaaaaatgaatcaatatgattttttaaagcaatttttgtatagaaactttttgaaaaaaatacaccgtttagcagtttgaaaagcgtacacgcggaaaacgatggagaggtgttgggaacccttgggtccaaacacaggctgtgttcttaccctcaagtgcccaattcatctatcttattttccgcgtacatatttttcaaactattaaacggtatgtttttttaaaaaaaatctatatgaaaacggcttaaaaaatcatattaatacatttatcaaaaaaaatagctaatatttaattaatcacacactaattgattattttgtcctccgtgcacactgttccggggaacatccacatatcctatccttcagagtacaatgaatagatgatgtgtcacattcacccaaaatctctttatattagaattaaggaaaatttgagaaactatatacaaattatttctaaaataacttatctagtacaattaaaactagcagatttttcacacgagttgaagccgcgattcagagatgagcttttatatgtagttgtggcacaggcgttcgcaaactgggtaccattcctgaactcctcaattctatcggatggacttacaaattgaggagttcatccgataaacacggaagatactttatcgtcgctgtcacttacaaattacttatcatttttttttcaaatgtaatgtttgtgtaaagactatactaaattttatactggtgttctgtgtttattttaaaaataatggaataaattccaacctttgatactggtgttctgtgtagtaccttagttatccctgcttaacgttgctctaagctgcatttgttatacacgtaagagctacacttaatttttgactcaaaaagctacgttgataaccaatgcttcgttatcgttaaccattatttcctacattttcatcaggatactgaattacaaatatcgctatcatttttcttcctttttttttacccctttcctacccttcttgatccttaagcgcataaaaggaagctcgttttttttttttatttcacatctttgtacaaaagcttctgctaccgtgggcttcaaatccaaacaggcccaaatcttccatcttagcagcacatgggccagcccggtaggcattggcatttggatcagcccaaatgacgttgtcttccagatcaactgatcaaccaaacaccaacagcgcttgtgcccccagatcgccggagagttcaacgccgccgcgaccggcgaggcggagcttgatgggcgccgtgtgggggttccataccgcgcggctccgggaggagagtcccctcacgctggtaagaggggattagtggattggattactccacactgacaccgaggaaggtgacggggttatgattgattttttgggggcaatgtggtgtggtgtgcagatgatgctggagtggaaggattcgagatcgatgggcgggtgatggcttcgcggagctcgtcggcggcgtagtggcgcacgatgaggggtctgtgagcagccgcgacgaactggtgatttatttcctaactattccctgtaaattttattttattttattttcggttcatagagttctcgtgctactgaatatttcgctctagtgaattgtttagcttgttgctgctccacaaatcaaatagcagtaatactgaaaagaaattagatttccagtgtgcacgatttggtagtctaagaatgcatgcactgaataatgtaaaggcatacattatatattgtggaaatagatgcgccttatgcatatagaacaaagtatctaaacaaatagactaatggttatggtgaatattacaatttgatggaatacaacaactactaaaatcacatttgacattttaccttaaatctggcgcccattgacttgtcttttcaacaccataccttattatttttctcacaacacacatatcagcttagatagagttgtagcaatagcaaggacattattccacaagagaaagcaggatttcaaccacactgctcatgctcggtcttctgcgcctatcttcttccacacatgacactgcaatttttagcactgttgctgcctgtgaatagttgaattctccattcatcctgcagtcaacaaagtccagcagccatgattgatcttcgctagctaatttctcttttagaacatcagcggtgcgcttaacagccatttccacctcctcttcaccatcaaccacccatctggaaacccgattcccttttactaactcaagaagcactactccatagctgtaaacatcagccttgcctgtgatcggaagatttagagcccattctggcgcaatgtaccctctagtcccatgcacttttgattgggtttctgtgtttgatcctcgactaactagtttcaccagtccaaaatcagcaatctttggctcaaaatctttatctaacaatatgttctctggtttcacatcacaatgcacaatccactcaagacattcgtggtggagataggccaatcctttcgctaccccaagtgcgatattgtacctttggctccactgtagcacaggaaacaaacccagattgtcagataatactctgtctagagaaccattctcggcaaactcagaaaccaagagtttgtttgtcttttcggcacaaaacccccaaattctgaccagattcatatgataaactctccctatgatacttagctctgacctgaactcctgttctccgtggatcacatcatttagtttcttcacagcgaccttccttttatcatcgaggattcctttgtaaactgctcctgatcctccacttcctagcatttcttggaaacaatctgttgccttctccaactccttgtagttgaaccttcggaattgactggaaattatggtgtaaccttcgtcttgaatctctggtcttctcccccatttgttagcagcccaacatccaactgtaattaaagtcatttcaactacaagtaatgtcaatgctgaagaaaggaagtaaccaaacttgatattggaattgttacccgtgagcatttgtgatgagggataggcttctttttcagtcatcacgcaagcatgcgatggtttggaagccaacaattgtgaatagggcgtcgccttgggaagttttagatagaaatcattatagtggtcttgggacttcctgccattaaaaagcaaggccttcaaaaaacatttccctatacccttgtggtattcaaaggcttgacaatcagcattgtccaagcacatccttttgcactgccagagtgtcactggcttggagtagttcaagtcatagccatagaagtcggtgtggggtatcttcttgaatatgaatccgtggttagacttgctgtttgcgttgttgttccaaatgagtgtggcgtttgccttgtaactgcacccttggctccagtcacctggtttaaccatctcaaagccttcgagacaagaacagcgagggtctggtttgtaaatgcacaaactgtttttaccacacactccatgtatttcacatacttgacagaatgccatccaagtgacagaccattttccagtggtcatgtttagactatacaacctaaggtttccatcataatccagtgtcaacctcctcatgacatccttctgaccatgatcagatgcttcaaagttgagctggtcagtagctatgaaccaaccatcagagtctagaaccccatgtcggctactgtaataagtggtcctaccattgtcccatgataagaaggcaggattaggccaatatatgctactagtctcagggccattgtatataagactcagcaaattgttactgtcaaagaaaaaggtgtataaacctgaatagggtaaccccctagcggatgcagacaccagctttgtatctcgagtcatcggctgcaatggcagaagtgtgtcggttggcgagtcgaagctttcccagaggcactgaccttctgaatccatgacgatcaggttgccactgttctgaagctctgcacggctagcaccagtggccgtggtgttggtgctccatacaaccgtgccgttgtaatcaacaagggccaagcccccgtccttccggaaggtgagcttggagcccttgccgttcaccggagcatcacgtttggccgtccacgccaccgtcttctccgacgatctggagaaccagatggagaaggtgaaggcgttggtggccaccttgtagaagccacaggcgaagtcgccattaggcgacactaggatggtcttggtatcatcctctgtggagacagatgaacctctagcaaggtagcttttcttat

SEQ ID NO: 18370 - DNA, 6852 bp, Oryza sativa
atggccatgggcaaggaattgcctgtgaatgtgatcatctaatgcaagggaaaccagtgtgccggagtctcttgcatataaatcaagattgttgagtaaaaagagccagtaattaccgtgaaaacttcaggtggctcccgtttgctttacgtgtttgcttgaactacagcttaggaaagggaccaaactgcaaatctgggccttattaatttgtcccctggagcacggcgaatgctggcaccacaaagcaatcgggccctgtttagttctagcggtgaaaagatttagcgtgttagatcgtatatacggacacatatttaaagtattaaacgtaggctaataacaaaacaaattacaaattccacctataaattgccagaaaatttattaagcgtaattaatccttcattagcaaatgtttactgtagggccacattgtcaaatcatgaagtaattatgcttaaaagattcaactcacaatttacacgcaatctgtataattagttttttttctatatttaatattccatgcatgtgtccaaatattcaatgtgatagggtgaaaagtttttgcgtgggaatgctggcactacaaaacaatcagaccctgtttagggtgtgtttagttcacgacaaaattgaaagtttggttgaaattggaacgatgtgacggaaaagttggaagtttatgtgtgtaggagagttttgatgtgatggaaaagttggaagtttgaagaaaaagtttggaactaaacaagggcttaggccccgtttagttcgcgaaataaaaatttttgggtgtcacatcggacgtttgaccggatgtcggaagggtttttcggacacgaatgaaaaaactaatttcataactcgtctgtaaaccgcgagacgtatctttttagcctaattaatccgtcattagcatatgtggtttactgtagcacttatggctaatcatggactaattagactcaaaagattcgtctcgcaaattccccctgactgtgcaattagtttttgtttttatctatatttaatgcttcattcatgtgtccaaagattcgatgtgatgtttttaggaaaaactttttggaaactaaacagggccttagttctaggggtgaaaagttttagcgtgtcacatcggatatacggacacacatttgaagtattaaacgtagactaataataaaacagattacagattcctcctgtaaagtgtgagacgaatttattaagcctaattaatccgttattagcaaatgtttactgtagcacaacattatcaaatcatgtagcaattagacttaaaagattcgtctcgcaaattagttgtaatctgtgcagttagttatttttttagcctatatttaatattttatgcaggtgttcgaacgttcgatgtgatagggtgaaaaattttgaggtgtgatctaaacacggacttagtcgtcagtcgtgttctgaagggaaccgtatcctctgacgttacacagtaatgtcacgatgcgacattccttcgatccacaccatccattctaaatcaatggtcgtagattatttgacatgcaattaatcaaactaattagtagattgtgtggctataattttccctagatcagatattgcattttcaagaggcaaacatcgttgaccggtggaagaatcggcatatgatgataattatgtttcacttacttgttagatgcagcgatttgcacattatcctggaggaagtgaatcctgtgcatcaattttgtgctgccatcctccgtcaaaacggggcaattctgaatctacaagcggatgggttaatgtttaatgaagatgaagagactgctttagtgctaacaaaacaaaatccttcccacctattaagtacatatacctacataatctgctagttagtttgattagttagatgccaattagtatgtggccgttgatttagaatgaatggtgtggatcgaaggaatgtcacgcggtgaacttactgtataatgtcagaggatatggttccgttctgaagaacagtgggctcgctttccctgaccacatcgttgacgattaggaagtcaacaaggaaagaccaccttgttcagcacggtgatactacgttttggtgttaacctgaacatagctaggcaatactaacacgtccttactatgttgctaatggtcatgggttagtggctaggacttgaagatgctgaaccaataatacatcaaagtgatatcaagacctggatcaaccggtcaaggacggcactactgaaagcaagccgctaccgtgcaaagatgatcctggtggagctcctcctgtcgtcctgtgatcctgtccatgcagctcactcaggcttgttcttgtttactgctagattttggccctccaattctttggcacttttcaccgacgttttctagatatttgaatttgtgccaaattttaccaacaccatgtattaggtaatagcaactttaccatataaaatttggtaatgcctaaagatgccgaaacttttgaattaccaaaattatggtagagaatcaaaccaaaatagccatcaggccgagccaaatcttctcatttcgcagcaaatggtccgggagacccggacagtgtcgagaaagcaacacagtattaatcgcaggaaaaagtacgccgaaggtccctcaacttgtcatcgaatcacaaaatcgtcccccaaccacaaaatcggatacaacgcatccctcaacttacaaaaccgtgcaaactaggtccctcagtggttttgaccccggttttgtcccacgtggcggctgagtcagcgtgggacccacgtgggccccgcatgtcaggtggtgcggccgcgacggtggctcccgggtggcggcgcgagctcgccggcctcctcgtccccctcgtgcggtcggcgatggaggcgcgcggctgcggccatcatcaccgagatcgactcgacgcctctgccatcaagtcgctgccgtcggtgatgacggtgcgcagctgtggccaacgggggaggcagaggaggtacgcacggatgccctcgcccccgtcgtcgccgccgccaacactaaccaactgcttgagacgtcgcacacgtcatggagaagaacaccgccgccagcgggcaattgatgacctcctccgcggaggcgacgccgtcgtcgccgaagcggccggcggggcgaaccaagttccaggagacgaggcacctagtgttccgtggggtgcgatggcgtgggtgcgcggggcggtgggtgtgcaaggtgcgtgtcccgggcagccgcggtgaccgtttctggataggcacgtctgacaccgccgaggagaccgcgcgcacgcacgacgccgccatgctcgccttgtgcggggcctccgccagcctcaacttcgccgactctgcctggctgctccacgtcccgcgcgcccccgtcgtctccggactccggccaccagctgcccgatgtgcaacgcgctgcctgcaaggccatcgccgagttccagcgccgggccgggggagcaccgccactgccactgccacctccggcgatgctgcatcgaccgctcctccgtcggcacccgttctgtcagccaaacaatgcgaattcatctttctttcttcactagattgttggatgttaatgtcaaagcttatcagcagtagcagagcaaaaggatcgttgtgcctgcgaaaaaatcccatttcattttgcatggttacaaattcttacactgctcttttgctcgaatacattatattgcagatgaattcaatgatcgttttaatccacgaattatcaaaatatcaagtctttctgctactaaccatgataacacaccacctttttcaatggaggaggtaggcgcggacgccctcgccatcatcgtcgatgtcgccactgatgacgaggtccgcgccgctcaccagctcgcacgcctcgtcgtcgtccatgctcgccacctcggtccagcagctgaaccgcctggcgacgtcctctcacctcagtcctccctcccagtgagcgaacaatgaggccgagcggcgcagagtcgttggcgccgctgctccccatccgcagccgcgctcgcctgctgctgtcgccgcctctccgccaccgcgctcgcccgccgacgccgcctcgccccgccgccgtcctccctttctcccatgtctccgccgccgcgtcgctgctgccacatcgccggcaggctgtcaaacctccctgctcccacgtcgccgctgcgatgcaagtggagactggagaggccccggggcatggtggaggggcacagcgttctccccctatcggctggctgtcgcactccctcctgccggccgcggcggccctcctaccccggcagccgtcggtgcggcactcctcccctgccggttgtgctcctcgagaggagaaaagtgagagaggaaaggaaaggagggagaggggctgctgggagagagggagtgctgatgtggcatcctgacatgtgggacccacggtgactcagcagccacgtcggacaaaacctgggtcaaaaccgccaagggaactagtttaccctggttttgtaggttgcgggatgcgttgtgtccggttttgtggttggagaacgattttgtaactcgatgacaagttgagggaccgtcggtgtactttttccttaatcgcaggctcgcagcagctaacacttgatccactgggccgtcatgcctgaatcggcccaaaggagggagccagcagatgatcaggtacagcgcgggacacgacagcgttggtgtcgtgtggtcatggtcgcctccaaactccaaagtctccaagactccaactgtccaacacctcatgcctgccggtacagttttactcgtcagcatccccctttttttttttttgaaactgtcagcatcctctctccggatactccgccacctgtgtgtatcttttttcccttggagaaaccgttttgctgataccagcaactgcccggccatacaataataatatcatgtccagatactcctatacaattacaaaatagcttgagaatgaatagttctgctatcaattattcaaaaatagagggtgtaataaacatagagttgtatttatcttggactctcaggctctcagcttaccattttatatattagtttaatttgaaatactctgaaatattaaaatacgcaatgtaccgggcggacgactggtattattactgatcttgctcaaaatggtcatcgtaatttcagaacgaactgatcgttcaaacgttcctcatgttgcgcgtgtgctgcaactactgcacggtaaaagtgataggaatcggtcggaaacagtattaatgtttttattatttttacaaaaacgaattgaaataattggaaattttcatatttatatattaaactattcagtatcaacttcaattcgacgtcaatagaaattagaaaagcataattatacacagtaataggcgttcaagatattattgttattatttagttttgtggaaatggtatcaacgtgatcggaaaattttgtacatgttttcaccctgcgggatatctcaattccttctcctccctctaccgccatatcagcacacgttttagagcaccaatcataacccataaatccgtgggctactcacttatttaatttatatgtgaattcgtgacctgactcactcacatactatcaaaaatttgtctcagtcacccatctccttctttcctggtccgataagggtttatcctacggttcgacggttatcacgatagtcgtgcggttactgaggtataccgtgatttaaaaatatgataaagttaccgcaggttttaactgcgcggtttggtaaacctgttcctcctcaccaaccttctcctccggtctccttatgtgtctcaccgaggcgagccgccgcgagaccgcatggacgcggtccacgcacctggcggtgcacctcctcctccccggcgaagaagacgtggaggagagtaaatgagcaatcaggcccacggcccaatcgccgtccaccacccaccaccctcagcgacccaaaaccacctcaccaacccaactctgtaccgtactgtacccgccctcccctcccactgacactccgggcccacctgtcggcgcgactcttccacggtccccttctctcctcagagattttttccacgcattttttaatttttttttctgcagttcacatgctcttctcccactcttccgccgcgctatataaaccgcgcgaggcgtcgttgcctcgtcggcgaagtcaatccggcgatccccggcgagcgagagatcgaagcaagctgctacacagatctcacgacatggccgaggcggcgtcggcggcggcggcggcgacgacggagcaggcgaatgggagcagcggcggcgagcagaagacgcggcactcggaggtcggccacaagagcctcctcaagagcgacgatctctaccaggtaacccgccgtctccggccatcccctcctcgccggaaaacctccgccgccgtggctgaccttgcctgactggctgactcggtgcttcgtttccgcagtacatcctggagacgagcgtgtacccgcgcgagcacgagtgcatgaaggagctccgcgaggtcaccgccaaccacccatggtacgccacgaatcccctcctcctcctcttgggccccgaatcggagctcggcgacatcgatttgattcgattgggagggatcgatgttgttcttgcaggaacctgatgacgacgtcggcggacgaggggcaattcctgaacctgctgctgaagctcatcggcgccaagaagaccatggagatcggcgtctacacc

SEQ ID NO: 18371 - DNA, 9396 bp, Oryza sativa
cgatggacatcaaccgggagaactacgagctggggctcccgtcgatcgagaaggcgggagtggcgcacaagatcgacttccgggagggacccgcgctgccggtgctggaccagctggtggaggaggagggcaaccatgggtcgttcgacttcgtgttcgtcgacgccgacaaggacaactacctcaactaccacgagcggctgatgaagctggtcaaggtcggcggcctcgtcggctacgacaacacgctctggaacggctccgtcgtgctccccgccgacgcccccatgcgcaagtacatccgctactaccgcgacttcgtgctcgagctcaacaaggccctcgccgccgaccaccgcgtcgagatctgccagctccccgtcggcgacggcatcaccctctgccgccgcgtcaagtgagcccgccgccgccgcgagtgcgactccggccgatgcccaagaactagtcattttaaatttataaattataactaaattgtataatttttgccttttttttttaatttgcaagctactggaaaatgttatttaatatatgtataaatgtcgagacaataatattattgcattataaattgacctggtttttgttagctttcgttgcgcgtgagaatggtgagtgtgtgctgctgatgaaactcgaatgttcacttttgttgtcttgtccagctttgctaaactttggcagcattagcaaagctgttttgttctgtttctgaattgttcttggattgaaatctctaatattgacttgataattaaatttgaccggtttttggcagtaaattccttcagtattggcagctcaaactgaattcttctactaatagtttagtgcttgtggagagtgtagtcgtgtagagtggactggactaattcagatctttacttggttagctgaagatggcatccgttatctgaattcttcagtagttggtggataatgacaactcgatgtagagagataatttgctgcatgttagtttggaagtagcttcaaaggatttaattctcagcgtccgaagtcttaagtacagttggtttggagagctgttcctgtgaagacttttatgatttgtgctagttatggcatcacatgatcacttcaattatcacttatcgatctagtgagaccaaccatacataccatacaaaggtaaaaagtgttcaaactggattgaacaagttctgtctccatatagatcctactaaaatgcatacatgttgtagcaatcccatttcatccaaaccaaacaaaatctctttcattcggctctaaccaatcaaacagagccatttgtatcccccgaaccaaaccagccgagcatggatgagggatcgagggcatccgagcaaccaaacaggcccaaagtgaatgctttggtcgattttcgatttgttccctacgaatccaattttagtccttcagccagaaaaccagatacaattgatccctcaactatcaaaacaagtgcagatgagctccctcgacagtttggacggcggttttggttgacgtggcgcctacgtggctaatttgactatgtttcatctgatgtgacagtgacatggtgcttatgtggtagttcgatccaaaaataataataaatctcataggacccacatgtcagtttcacacacaagataataaaaaatcgtgggacccatgcggccccacatatcatcctcactactcccctcttctctctgtcctctctttcccctcttatctctatcatctctctctcggttgggaaagcaacggtacacgggcatcggccggtgggatgataggagtggcgcgagggcgccggccggcgagaggagaggagccgcggacggaggctgggaggaggaaaggtcggcgagatataggaggataatgagagggagaaacggtcactacccgtggctcctcctcccaccgaccggagcccgcgcgccgctcctttcccgccggtcgccgctcatgtctcctctcccgctcggctccaccactcctctcccgccccggcgaggtcaacggctacgacgacattcttctcatccacccgcgccgctccacccctctactccgccgggacatcggggaagtggatctagaggcagaaggggttgcggcggtcgacttctcgctccgcttcctctcctgccgccgacgaagacgacgacgacaatggcgacgggttcgaggaggcggaggacgcgcacctcatcatcgcagccgccgcccccgttttcgttgtcctccgcgacgccctccaatgttgacagcatcatcgccatgggcggcaacgccaccgccgccgaggatgatgacgatggcgacgggttcgaggagcaggaggaggagaacacacagctccgctatggtttgtcgccgggcggccatcactgtggtttgttgctggcccgctccgccccgccggcttcgtgcgccgccactctgcccacaccaccccgccggcttcgcatgagagagagagagggggataggatacagagaaaagaagagagtggatgagggaataaaatttgaatatatacctttgtttttaaccttttgcgtttatatacatgcataggaaaaaattgtgaaaatatacctctgccacagagtggagatgcgggactgagatggtgccactcgctcccgcagaacggccgcgtggcaccgtcgctcccgcggaatggccgcgcggaaccgtcgctgccgtgctcgctcccgcgcgcgacgcgcgacgtcacggtcccgcgcggcgggtgcgcgcgaccggcgtggcatgcatgcaccgctgtgcctgcatgcatgcgtgcgcttgcgtggccgtgttccgcgtcggtcccgcacagctattctgcgcgatcgtcggttccgcagaatggtggtgcgggaccgtcgtggtagaggtatatttgtgtgaaattttatagcatatgtatataaacgcaaaataaagataaaaacggtatattttcaattttttttctactagacggtagccacggtcccgcacaaccagtgtgcgcgaccgctacggttccgcagaaccagcgcgcgcgaccgccacggttccgcagaacctgcgcgcgcgaccgccccctgttctgggactgcaacggtgccgcacacccaacgtgcgggaccgagtttcccccggccagtcccgcagtccaccgcggtgccgcacggccggtcccgcaatccgccggtggcgcacgcccggtcccgcaatccaccccggtgccgcacggcagttatgcgcgtgcgcctcggtaccgcacgcccaatgtgcggtaccgtcgcggtaccgcttctccagcgtgcgccaccgctccgggatcggtcccgcgccgccaatccgcggttgcgcttcgctcccgctgccccgccctgcggcttaggtataatttcgcaattagttgccatgcatgtatataaacgcgaattagggaaaaaagaagtatattttcaaatttttttcctggatgaggtggagggtatgggtcctactattttttatcttttatctaactgacatgcaggctcacatatttttgttttatttttaaaattgttaaattttgcttcatgtgccatgtcggatgaagaccgggtcaaattagctacgtaggcaaaaagaaaaccgccgaggtatctcatctgcacttgttttgacagttgagggacccattgtatctgtttttttggttgaaggatggaatcggattcgttgacaagttaagggacctcagatgaacttattccatcaagaattctcaagctttaaatatctcccagtattaggtgataaggatttttgttgggcctagccttcactgtcctgctaggtgaaacgggatcgatttgggctagaaaaggacagataccatggtgcacttttgttatccattctggcctagtggcctacatcgaaatgattaggcttattctgcttcaaatcagacgatcacttaattctctgttttagacttaaccttatggaagtgtaagttcatcagattaaccatcttgaaaagaaattgtgtccatcatagtgtcatactgacaaaaagtggcatcttataggacagttcgatcgaagcaactactaacagagtttgggttgggttcgtgtcattgtctccctcacatgtttttctcaacgcttagttggtgagatgtttacatctggatgcgttatcctgatggatacactcacagagaaatgatttttcttttaaaaaatatcagatatgcaaagaattctcgttcaatttccgtatagaaataataatgaatccataaatctgtatagtatacatttattctgtatttctgtatgcgcactaatgtacaagccaaaatatacacaacacaacacatcagcacaacgcaagggtcatgtaaaataaaacaataaatcaacacaacacaaagaatcaagacacagcacgagtccctttcatgaatcttattcgattcaaaagtgaatcattcacgaatctttctttctttttcccatttactttatgaaatggatggtatttttcatcaggtctttcatgagacctggacgttggcattgaggatctgagggatggacctgatctgcagcgccggtctgatggcgagaagtccggcgaagctctccggcggcaccctcatcccgccgacgttgatgcactccagcctccggcagccgccgacgagcgccaccaggccggcctccgtcacgtggcggcagctccacactatgatgctctgcatcgccggtcaatcgcaatccacacaaaaaaaaaaacacgaatattaggaaataacctaatatcaaataattagaaagggtgagacttcgaatccaggtcgtctagcccaccaccttatggagctagccggaagacttttgggcgtttctcgcaacctaggactttttttttccacaccaaaacaaagtcaagcaaaaaacaccgtgcaaatgtgactagagaattgatatgtactttgtcagtgtttttattaattcgtacttaatctgtagttcgacacttcaagtaatctaagcgtgtggattagtatcaccatgctgtgtttcaacgctagctcttgatgacgataaatctatagttatatttcaattgtcgtaagtaaattttgctggctatgtaagtgtgatagtgatggcatagttctaggtaattttatctgatactatgtgaagaacatctagaagacttttttattttttaaaaaaaagaaagaaagaaagaaagaaaataagatgccacagatgagcacaaatgatcacatactagaaggctttagttgcctaggattctatgaccatcttaagatgatcacgctcaaagatgttacttctttcctgaacatatcctcatctcctactgataccagaaccgatgagaagcttttctcttttttttttgaaacgcgaactgatgagcaacttcaagacaggaacaggcataattctgaagcaattgatcactgatcagtattgaagtctttatcatagaggttgagattatatagtagtacatggcccaggtatggtgcaagaaagaacaagatcatcaagatgatatattgatataggttcctatcccccaattaagcatggcacagctcccccatcattttttccaaaagaactacagtacccttttaattctaaaggcaggggtgtttttaagcagaaataatagcaggatcgcagccactaagataatagcagaaataatagcaataactgcatacatatcctgaccacacgaacctgagaataaacctcaaccagtaacatcatttgtctacttcaattcaaagaacaagccatggcgaatctgccaaggttgtcagttcaaccatcattcttttccccatgaaatgactcatttcaaagtatcaactactgtaaacacatcgtacatactgtagacagaatatttgttgacttctaggatcttttttatgtggtaccttgtcatgtttaatttgcagacacgaaagtgtttccagattaagaaacataccttcagatttatacaactttttgcaactgcatacaacgattcatctgtgataaatgttccaccaatgttcaggtgctgcaaagaatgcgctcttgaaacctacagggaaggttgacaaaagcacagtatttattacgacacatcaaagatgtccttcggtagtgcagggtaaattatgaaccaactgattattgttgcaattttcggatatgaacagtggattattattctgaatgaaaacaacacgttaacaatgcatcatgagttcatgacaacatcctgcaacactataaattcctatccaaatccttattggcttcttatacactatgatagcaatagccaataatcaataatcaattgacataccattgagtatgcccttgaaacatctaagacggttttattaccgaaacaatgacacaaacatagcacaatcatgagccaagttgccaagtctcccaacacaaaacagcaaattttttgcctgttttctccatgtttccaagtaagacggcttaaaagttcaatcagagacagggcacacctgcctggtcaatcagaaaattcccaatccttaattgcaagatgaacataacttaaaaactactaatcttttagacggggatttgaaagaaatgattaccagctggatgacgccattatcggtgatcccagccaatccccagagagagatggaggtgaggttcttgacgcaatcggcggtggaaatcctgatcaatccttgatcagtgatctggcagccccagcagcttcgtgaactccaagaacggggaaacaaagttaggcaaaaaaaaaaaaaaggtcacaatctggcagcagcagcagcagcagcaacaagaagttttagcttgatcgattgatcattcgagggttgtggctgaataagggggaatcaatcggctactactcacatgtcgaggtctcggaggttgacggcggcgcggacgaagcgcgcggtggagtcgtcgccggtgcgctgccccgcgaagctcatccgccgccgccccgccagcgacctctccaccgccctgcgccaccgccggctcactccccccgccctgcagccgagcaaacaacacaagcaggtcacgccacgccacggcgtcgcgcgtcgatcaccacgagcagagcaagagcgcgtacatggagaggtcgtggaaggatgggaggagggagagcacgtgcgcgaggaggtcggccggcagccgctcgacgtgcggctcgggctcctccgccgccgccggtggcgcgacgccgatgacgaccccaccagccatggctcgcttcggctcggttgcttctcctcgcgctcgccgtggaggcgagaaaggcggggggcggctttgcttatactttctccatggtcgaggtcgccatggctcacgtgagcttgacgcgacgcgacgcgcgcccatcgcttggaattttgctgcgcgctgcggccgaggtcgcatgaccatgtggacatcctcgcgccatcgagacgcccaccgaatacgcctcttgccaaaattttcaaaaaaaaaaaaagttcacacaaatttgttcaaattttgttaggatttgtagtgaaactgccttagttattggtaaaatctgctataagacatccaaagtttacggtttttgccgctgaaggatatcgacatatcgtctgcctccattggttaatgatcagagttaatccacaaccatccactaatgttgcgggtgtccagcgatcaattgcccctttttagcccctccaaagaaaacatccttacggtgttctctaccaaaaagcacacaaattgcgtgtatcctatagaaattttttgcctaattcatacgtaaaaggaggccttgactttgaaattggtaggggagcaaggccgatctgggctgggttccattgggccgaatgcatcgaggacccacctgtcagacgggtccatgtaagagtctccaagaccaggtgcacgcagccacgcagcggagcaccaccagatctcccttggaccggttccatcgtctccgccgtggaccagcgccaaccctcgccaccgcacgtcgccgggctccggcgaggccgccggagtgtcgtcgggaagcggagggcctcctccgtgccgcgcctccctccgcccctcaccccttcctcctcatggctaggtcctgacctgaggtggggctccgcggctactgctccccgcctcgccccgcccccgcccccgccccctgcctctccgccgcggcgccactccgggctccggcacctccctctccgtgcgctcctgcggggtaagccggtgagggacgcttagtggaattgctagtgctcttactcttgcgttagttagaggtagagctgcttggagtgaggaattgatgttgcttttttttttgggaagaaaaaaaaatctactctgaacttctgaagcaagtaggattgcttgatgttgtagatgaaaccagtgctaaggaatgtggtccttttgtttgttctgtattgtatcccagtttcacgatgttgtttagattccagcatttgcatactccatagctttgttaccagtctgattatgagtgaaaccatggagctttccgtagtatatatgaaaattttcctttcttttctcagccaggaatgccaatataattgatagtcaacatcctaggatatgagacatgttgcatggggcttcagtttagtggatgagtgatcactctaacaactagtacggtagtaccaactagtactgccagcataattgaccacgttgcatttgacatcttatataaagtaggggattttattacgacgcatatgctgtagatttctcctttctatcgattttgtgtttatttttgtaccacctgtggattttaagtggaacaattctctccttttgttgcagaagttgtgtggagctatctctgatgctgtttatgcaaagacttatgctcacttcttgattagaaatggacagtagccgagattctgaagaagaaaggcctcaaaggaaggacaatggcgaagaaactgaaaatggggaagatggtggaaatgctttgagcctcaaggatgttgccaatgagcttcttggttgtgttgtccatagtgaggaagaggcatacaaactgtattgtgactatggacatagaattggttttagtgtccgcaagggtaaacagtcttacttcattggcacgaagaatattcgtacaaaagattactactgctcaaaagaagggcttaagtacgatgagccagttacagaagcaaattttaatcgaccagacacaagaactaattgca

SEQ ID NO: 18372 - DNA, 690 bp, Oryza sativa
agttgatcaagaaggtcgtatgaccaactttttcttcagggatgccaaaagtagaaatgattttgactgctttggagatgctgttatatttgacacaaccttccgcacaaataaatacagcctggtatgtgctccttttgttggagtaaccaccattggcagaatattgtttttggatgtgcattcttgttagatgagtcctcagcttcctatgtttggttatttaaatcattcctcgagtcaatgggtggccggtctccaaaatcaattttcactgatcaggatgacgctattacgcaggcagttgagctggtttttcctaacacgcagcactgtttttcctattggcatattctgaaaaatgcacagtctcatttaggcacggtaaatacctctcaaacatttcaaaatatgtttattaagtgcatgcaaggacctaactcagaaacggagcttgaggaatcatgggccacaatgttaaatgaatataagttacaggagaatagctggcttagcgacctttataggtcccgcaataaatggtgctcagcatttaataaagatactttcgatggtgggatcaattcatctcagtggggggaggtctcaaacaatacatttactggaatatctgatgaatctacccctcttacacgatttgcccttttactagaaaaggttttcaagggt

SEQ ID NO: 18373 - DNA, 32470 bp, Oryza sativa
  unsure (1)..(32470): unsure at all n locations
cattcacaattgagcaaatgacaagaagaaaccatgcttcacaacttcaaaatacaaacatgaatagtaccaatttatcatcaaatgtgaacgaatacaaaatattgtctgaagagaaagctaagctagttgctaacttaaagcaaatgaggtgtcatggttggaaaagttataaagcatatacgaattttagtgttgtcgcaaagtttttaaaggcatttttatgataaaaccttgtacgcacacaacaaacgtgcatgaattattaaatgaactcttgtgagattttatttttcaactctacactttaagtaccttcatttagttttaatgtataagaacttataagggagtgtgaataatgacatcatttaccatttccatcggggtatagaaatgagtatagatgtcacttatttctattttgctttgaatggcaggaaattatctattcataataatgagctggtttttatctacaaaatgactgggaaagttaaagttttgccaaagataaaataagaaagatattgctgtaaagtgcccattaatactcattattgtttcctaagtataaaaaaattccccctatatattggtcactattctcctttgatagtatgtcagatctaacagatctctcccttgtaaaacagagtgaacatttgaagaacggtttgtgtgtgctgagatcttccaagcttttgttaatttttgttattgattttctttactgtgcttgcaactggtatctagactatcttgtatcctcttgatttgaccgcatatatgttcttctgctataagcatgatttgtatttgttggttttttggatcgtgttctaatataaagtgatctgcatatataagctagacctgcatgttatccatcttttgtaatactttgccacgtactttgcataacatgttattatacgtagtatagtttctgtatgagggaggaacaaagagccggtaagatttttaggtatataccgctgaagtgtaaatatggtatgtgccatatttacttcacttctagttcatcctaagtatgatttgtcaatttatgtattagagaaaatgttgtacatctaacctcaatagatcttgactgatgtatcactgactttgtttttccttccattttctatccaggcaaacaaaaccaactgagggtctttcacatgggaaagtacgagccagaggcgccaattgccacagtggaagatcccatatcatcgcatgataagttagaaaacactgagatggtggccagcctagagatgctaggtaatatgactgacaaaccgttagcgccattggagatgctacccaaggtcaaattaagcgtggagactcctcctgctccaatgagtctacctatgaggtttggtaatggaggttgtcacattgatctgaatgatcaaccaccagaggtagagaagttagttgatgaaactctgaagatatcaggagaagagatcaaagccaacatagagctgcctgctccagttagccctccaaggagctttggcactgggggttgtggatgtgatctcaatgagatgccagaagataatgatgagtcctaaaaggtggtattatttccttaggaaccattgcttggggtgctccaatcattcatatgtgtggtttttctcttaggtttcgaaattgtctggtgaactggttggttaccttttcttcattgtcgaatttcatagcctttgatctttcgaggctggaatttagtaagaattgatggcaaataaattatttacagttgcttttatgttcccttttcggcttttcctatgggttgtttttgcttgatatatgttcttatgtgcaaagaaaaaaaaaagacacatcttgcattagactctgttgctaccatttgaaagggcaaggatttcgggatgagtatttgaagtaaacaaatgcttttagtccagaaaaaagcaagatgctcttaaatcaaattaaaaactgaagtttttttttgaatgcgcaaaaggattgcatgttatttgattaggagaaaacatttaggttacacacaatccataggccggagttgttagaattatatataccccggaatgctcccagcgtaggatattcatcatgcacgtagcagggagagaaatcttatcttagctaaaaggagctacgagtattacagcaaggagcgctacaaaggaaaaaaatacagtccaaggggtaaggaagaaaggttcatatgctcccaactaggctcctaacttagatgcgtcggacatgaccattcccgcccctcttgcaggattaaatcgatgacggcaagcattgagaatagggtcccattaagacgcgagcattacactccctccacagttgccaagaaacaaggagcacaaatgagttgaaggcacgtcggaggttgggtggcagctgctaccacgcatcatgctgtcttgagcccttgacgagcgaccgagagcaatggcagcccagccaagtaaggaaaacaccctaaactacaaccggtgagcaaagacaaactacaagaggtgtggttgactgtttactgatcctaggcacagaatggacttgtgcagtggctgtccataccccacacagcatcagagataagtggtcaaacaccatctttgtagcgccagccaaaggaagaacctgcacttccgcggtccttgtgcatgccatagaagattggcacatgtgaagaactgctgcccacgaaggatgcttgcagtagaagaaacaaagaactcggcatcacttgtccatcgtcaaagaaggcagtcccccacatcaggctgcaattggaatagctgcactctttaaaaaattgaagtattctttcagatacatccaattcaatcattttactttataggttacaaaaagcctatttaactttgtgatcattcaaatattgttccacatgatattcctttgcttattctttacatatttattctatgtttgatagatcaaatgattgattgaaaaaatcctatggacactagcggctcctactagaagaagaaataataaccattagctcttcaaccaaaaagatttcaattccataaatccataaaccaaaccttgttttttcaatttgtactagatactgctgttgttatttgaattcaatgagtggttggttgctgacatttagatacaaaccagcaattgaaaattatttgaagaacactaggaaatgggaatttactaattcttctctatgatcgtatgcctatcaatcaattccaacaacacgttccttgtgcagctagagggtagtccctaggagtgctcgggggaacccaagctcttctctctgctagattggttcaagtcctgttgtttctcgtcaatgtgcatgcctttcttagaggctatatatggcttatatacattgagatgctcccttgggggcaccgacaaatctactattacataaatcatggctctattatttctcgcaacgtgctctaccatcttgctagcctgacacctttggacatgctctacagtgacctcttaagatgtctgagatgggatgcctacttttcccgctcctgatggtacatggaagttgtgagagggggcggaaatatgcctaatgaagcttggcaatgcgacatgcatcataaataaggaatgacaggatgtagtgtgcacactccctattgcgtgtgcacggtgagtaatacctctgaccacgtcaagaccggtcaaagctagatgacttccacgcctctttatttggtggtcgtgggccaccatgacatgtcatggaagcttgattttttaagttttaatttcttgttttgtaagtgatgggaataggtagagttttggatagagaactaggttttttattacgatggagtgccaaaatttgacatgataagataaaggggattgaaaaggagagatttattttgaccggaactcttgtctgcgttataagcaaggggttcccatcacacctagactaattccatgtgggcagggggttagcccctgaactcaaaggcacaaaagacagtccaagaataggcagagcacaccacgtggcgcagctgccccctgagcagggtaggtccaatggttgccaaacggaggcagctagaggtcttgtcgatcgagtgagaatgtgccaaaggataaccatctgatctgctaggccgaatagaggacgaagcattaaaaggcccatctgatctccttggtcgctctcttgtagcagcgtagggcatctatgtcaactaccgaagggtggctagaagttaattctataccgagtcgaacaggtttcttcggttttagcgagaagcttcggttttcatatggactttcttcaattgttggtttgcatcctcttgaaccgaactcctagataaaactgaaaacaacattgtcagcagctggaactagggtggctgttctcgatccggttttcttggtcggtctataaaaagttcagtctttgcaaagtaatgacaaaagttagcatgaacatttgatggaactcgagtccagtctttggttttctcagtttggtctttggtcttgaccgagtagaccgaagtgaagaaacttcaacaaaatcagacaaacaaattgaacgaaaaaaaaccacaaatcgactaccacatataaatgaattagagcgaaaaaaatgatctatgatgttctgtgttttgttgtagggatgccagagtggctggggagacacctgtcatcacggggaggacagtagcattatgccttttagcacagggaggctagggaattatttgtcgttgtggaccacagcggaggagtcggactggacctcgcaaaggcaaagcgccttgactggtggtggaggcgtacgtagttggagatagcagcgccgccaatgcacgccgcaagtagcagccttgcaggccatgggatctcatgatgccttgacatgaggcctagcgccctgacataggtaggagtggcaatttccaccagagtcgaggacgggaaatttggtcccatgggtggattgggacagggccccgaggtaatatggggtggggatggcgacatgatttggaatcataccatgcacctatgttggcccgatagccctattagaggagttcacatacatttggagaaactctaatcgtgttatcatcttgttcccttaccattgccgcatgccaagtggatacacgactcagcttctgctatgctcggtgactccgtttcattgtcgcacccaattagaggtgggcactcggtttatttggtgttctataagttcagtttctcaaaatttctacctgaatatcctcattagaaaataaaaccgagaacaataaacctcattcaatttttgttttataccgaactttatggtataaaacggttagtatgcacacacgtacaaatgtgcgggaattattaaattgactcctgcaggaacatattttttcaggtctattatttagttgactttcatttagttttgaatgtacaagaacttattaggatgatgatgaatcatgccatttaccatttccgtaggtgatatagtatggatatagctgccaattatgtctcttttcttttgaatggtagtaattaatttgtttataatgaacaagacagtttttatctaggaaattaaagtttttccaaagacaaaatagaaaagatattgttataattaatgtgttcattagtactcattattatttcatacttataaacacatttacccaattatatattggtggtcgttctcctttgatagacacttcgaacatctatcccttgcagacagagtaaacatttcacaaacagttggtatgcaatgatatctctcatgctttttttatccttttatcaatgcatgttattgattttgtttactgttcttgcaattgatatcaagaggatgattttgtatctcttgatttgactgcatatatgttctttttacataaacttgatttgattatttttgtttgtttggattgtgttctaacatgaagtgatctgcatatatgagacctctatattatgcatcttacatacttttgcccactgtatagtttctgtatgaggcaggaacaacaaggcatgttatgtttttacgtttataccaccaaagtgttaatatattactttacttttagttcaacctaaatatgatttgctaatttatgtacttttgaaaaatgatttatgtctagcctctttagatcttgattaatttcactttgcttttcctttatttttttatccaggtaaacaaaaacaacttaggactgttgaatagtcccacattggttgtggaagggcaaaggacctaagatataagtgggggagcccatcacctcaatggctagcttttggggtgggaatggccatttacgatcctacaattggtatcagagcctggctaggttaacatctctggcccgatggacacagtgtatgaaggcctaatggaccgtgggtgcctgcggggcccatatacctgatggactgtgggccggtggggcccgtatacggtgaaggggcggtgaagggctgagggacaccaatgtgtgaagggagagattgttgaatagtcccacatttgttgtggaagggtaaaggacctaagatataagtgggggagcccctcacctcaatggctagcttttggggtgggaaatgctctttacgatcctacaaggaatttcaacatgggagtgaaagatcatgtttcgtcacaagatcattttgaaaacatcgagatggccagttcagatatgctgggtaataagaatgataagccatcaggaccattggaaatgctccccaagctcaacttaagcatgggggactcctgctccagtgagcccacctatgaggtttggcaacagtggctgtcacattgatctcaatgaccagccaccagtggaagagaagctagctgctgaagctgtgaagatatcaggagaagagaagatgctgatcaaagccgacaaggagtatcctactcctccagttagccctcctaggagctttggcattggggtttgtgggtatgacctcaatgaaacgccagaagagattgatgagccctaaaccaatagatgtttccttatgaaccattgcttgggacgttgcagtcattcacatttgcaattttccgtttatgtttttaaattgtcttgtaaaatggttggttagctttgtttcattgtcgaattttatagactttgaccttttgaggcaataatttcgtaagaaatgatgggaaataaattatttacacagttgctttatgctcccttttcctgtgggttgttagatatatgttcttatgttatgtcgcaaaaggaaaagaaataagacatcttgtattagactcttcttttttaagattcatgcatttatttacaatagcatgcgttagaaacaaagtgcatgaccttgccttagactctgttgctaccatttcaaagggcaggaatatttgggatgagtatttgaaataatcaaatactttttgatacaggaaaaagcgaaatgcccataattaatcaaaaaaaatgaagtattcattcatatacatctaattcataataggttacagaatccacaaccactccatatcatctcccccagagcccccccccctctctctctcacacacaaaccagcagacggattgagatcctttgacgtaacttccctctgacttggttgcctgacatgtgggcccgagagtggtgggcccacatgtcagtcactgtgaacagtaacgccatggtgaacagtaacgtcaaaggatctcaatccccagcggaccttctacctctccctcttctcagagcgtgcaaggagaagggccggtggcggctcagcgaggaggagggccgacaacggggatggcttggcgaagcaagaaggagcagcgaggaggaggaggaggaggaggaggagggtaggggacgggagcgactcacgatgcaaggaggagcagcgccgaggaggaaaaggtccggtggcggggtggctcgtctcggtgaggaggagcggtaaagagaaggagggccggcggcggcggcgacagctcatcgaggaggaacgccaacgagttggaggctagcggcagatcggctcctcccctcccctccaatcccgccggcggcagtggctctacgacgaggaggaagggcggcggcttggtggagatagtgacgaccactgcgccagcaagggcaacgtacagcgacggcgaccgcgtgggaagagtgatgtcgacagtctctagacctcctcagttgttcttcttcctctagatccagatccataattttttttctctttatttctgtggaatatgtgaatcttgttcttctcatttgcatggtgagatttgatttgatttgcatcgtgcttaatctgtgcaaatggcagctgaatggggatatttttcaaatgtatttttttgcccaaaaatatcttcgtaggtggtctgctttaggtgtccacctcgaaaatgattttcgtgggcggacagggggtccgcgcataaaatatttttcctctagtagtgttatttcagtttgtactactagatattgttgcagtcgaattcagtgagtggttggttgctaacagttagatacgaagcaacaattgaaaatttgaagagcacttggagttggaaatttactaattcagagatcgtatgcccttcaattaattctgatcggcacatacccctgtgtagcgagagggtagtccaggtgtgccaaagactacccttcagttttggaccagagaccacttccaaaaaatcatcaagcctatgtttaggtgctgttaagtttagaaagcagtgcggcaagaactctcaggttaagtttagaaagcagttagacttttcctgcaattttctgtagtaagctttaggactggctgggtcaaagtaaggcatgaagttctttttccttttacccaaacttggctcaatctgacaatggtgtaccccctccataaaaaaaacaaacttagaataaaatatgacatatcctaatacagtgaatctaggggcggagctagagcgaaacaaagggtggtgccacttgcttaatttactctactttagatcaagtttaagctcatgcgagtgcctaagtttgcattgagggggtgcatacatagtgaaaatatatgaggtatagctaaaaaattttcttaaccagattcctgggcacccccctaatatatactagctccgcccctgagtgaatctgaataaccttttatctagattcactgtattatgatatttcacatccgattctagatttgctctttgggacacagagtacctactaatgctagaatcctcctacctgttatccacaccaatcctactagggctatttggcttttttttattactagctctgtcccataataattgtgtttctagaattcaagtttgttccaaaatagttgtcacaatagagtactaattatcttattaatgaattcccgttcaaatttctccctattcaaccctcaaccattctcccactcttacctatgcatcacttaatgagaaacaccatattctttcttcttaaatcttaatatatgctaaataatttataattataattattttgggacagtggtagtatctcgttgtctatttacagaaaaaaaaatatctagttaggaatctaaaaagagaatattggggatatatttttgggcttttgttcgaaggtccttcacatgcatattagaggcagaaaaatgaatgtgcgtagtgagtctgcaccttccccttttttcccctctatgatgtttgagacattgtatttttcataagtactccctccgtcctataatataagagattttatagggatgtaatatattctattactacaaatctagagcggatgtgtcacatccctctaaaattccttatactatgggacggatggagtactataatggcccgcacggcgacacaccgtgcacactaactttgactacggaatacttccgttgaacgcaacttagctatcgttgatcaaatgttttccattagttcaactactccaaaaggaaacattcaaaacgtatttatatcatgcctatttcactacttaaaaacaaatatgtgcgggccaaaacaggttttcccgtgaggagctctagcccatatgttcggaaggatctgtgaaaatctcgtttctctatgcgggtggcgcacccgtacatgaaaatcggattttcacgtgcgggtgtttatgtcaaccgcacaccaaaacaaaaatccaaaaagaataaagttaaaatcacggaaagaatcaaaaccctagttgccgccgcagctcattttcgccgttcccgtcgccgcagctcgtcgtcgtcatcatagttgccacagctcgtcatcgccgccagatccgcacgggggagggcgggagagaggcgacgccgccggatccgggcggcggaggggcgccaccatggagggagcatggggacggccgccaggggagcagattaagttagtgtccgcctccgctcctagccaccacctcctcctcctcctcgtcaacgggggcggcgtggattcgcagggccaacggtgccactcccggccatctcgttgtcatcgtcagcggtaggggtgacgtagttccggctgagtccgctcagggccctactcctcccgccgtcgcctgctgccgagccgcccaccgttgcctactaccgacctgcctgctgccgtgacgcatgagtgcgtgagaggagaggagagaaagtgagagacatatgagggtgaggataaggatgaggaggtgagatagttggagagcggataaggatgaaatttttgaagtattgagagggaaaatgagggatggtattttcacgtacgattccttaagggtgtgtttggttgcttgcattgccttagcctggtccatctctcatatccaggctgagtttagcctggctaggatgatacacatgcaactgtttggttggttgcattagttcatcctggctagtatgagattttgtttggttggttggatgagatatacggtttggaagggattttgtttggttggttgttggactttgaatatagttaccttctcttgatggggtagggtgaggttacctccataatatcactttcactgtttatgaaacaaaaaatcgcatggacaaattaaggaagaaaattgaaaatatactttattttttcatattttgcgtttatatatctggctgtgattaatttgtaaaaatatacccaatccacggaacggatgcgcaggtgcgaggacgaaccgtagactggggatgcatgagcggaacccgagccggtcacgtggacccgggatgcgcgaccgagccggtcccgcacgactggactgcgggatcgagtcggtaccgcggcgccattgcgcgggagcgatggagccgggatagcgagtcggtgccgcagaacagcggcgcgggaccgaggctgtcccgaggttccaacgcgcggaaccaagcaggccgcgtgttgttggagttgggttcttcccttaatttttccaactcatccgcgcgcacgcttttcaaacttctaaacggtgtattctttttgtaaaaagtttctatacgaaagttgtttaaaaaaatcatattaatccatttttttaaaaaaaattacctaatacttaattaattatgtgctaatggtctgctccgttttccgtgcatatgagatcggatccaattcgggtaccgagatggtgggcggcatgtgggagcaccggtcccacacgtccggcatgcgggagagttgccgcgctcacccagccgcaggaccgtcgcggtaccgcggtaccgcgtccccggccagcgagaccggctggtttatccttgctcccgtgcaaccgttccgcggattgggtatatttttacaaattaatcacagccaggtatataaacacaaaatatgaaaaaataaattatattttcaaatttctttcgacaaattagatgtatttttaacacatacaaaggctaatatcgttgtgcaaaaaaacacaacatcgcacacgtcagcacgcacagtgaaaaaaagttcagtgtggtgaaaaataaagagaagaagtggcgttcaccgcttaaaaaaattctaacagaataagaggttaatcaccggatgattaataaaaccaaattacttggtaaaggctacagatcatcaccggctgattaaattagttaggaaaaatagatgaaaaaaaaagagagaaaggactcgaagtctcccagcctcgtctgtatcgccgttgaacacaaggacgccacttttcccctgcgcgcaccgccgtccgtcgccgttgttggaatccatgtcgccggatccactgcaggcaacctccaccgctgctttactactcgccgaccaggcacctgccgcacctcctcctcctcctctgcgccatccccttcttcctcgccacccacctccccaaccacaccgctctccactttcatctcctcccctccattgtttgttgccatcggtggccagatccgtttgccgtgagctcatagccaccggatccggtggtccggcggctggagaaaggaggggacggcggtggcagcgaaggggatcgcgaggaagatggtggtgatggggcgaccgtcggcctctggatttggcacgtgggagcacatgaagggaggaagcaaccggtgaggaagatggcatcggcgatggtgaggaggggaagaagaagacaatggaggcgccgccccttgacctcgagcatcgactctttcctcttcctccttcctgaatcgtgtgtcgagcaaatgtgagagaaggcggtgaggggatccgccaaccccttgcccatcactgcaccagcccgtcccacacttgcactcgtgcccgcgcctgcacgagccgggcctggctgaggagcgaagctcatttcctgcgttcctcctcagcctggcccggagaggcattttgcacccgcccatccttgctcgctcctccatccaggcaaccaaacacatctgcagaaataggcttatttttatgagcggatccttaaaaggcccatctataaaaatcgattttcacgtacagtccttttaagagtctgcacgtaaaaatgggaggacgatgattttttcagaacgcgaccaattacggtctatctgtaatctaaacatgtccttgtacaggaaaatcgtttttagtagtgtgtcttaaacattaaaaaataggattgcacatataaatactgtgatagcaattggtctataaataattaacagtcaattaatatatcagttcaattaaattgggaaaaattgaagcacacaaaacgcgtgtaacaatacaatttggctcatgtgataattattaattcagccaaattttatcaacataaatgaaatgaaatgttccttttttttttgaaagacccgacgtgaatgaaatgatgagcctaaaccatgtgagaagggtgctttgttagggaaagcaactttccttccacacatcttgggttccaatgagaagaaagaaattgagaaccattaacttggtgttccaccccaaagggaagcacaaatttatggttttcagtctattgaacaaagtcgagcacacataagggtatattttacctggcctctacatccaaccggatatatgcaaccatttaaattagaaacttagccccacaatgatgacgctctctctctcgtggcccgatcttctggtgaagggataactctcgctttgatcgagtgcgacgtttgcgacgtggctaccaaccagaacaagtccaggacgccatgcaatcgctacaccacaaaccatgtcgtaccaactgtgacgcgcggttgatgatccctgcaatgcaaacaagagaacactgcaagaacaagataagatccaatcgaaatattgcgaataggtgattaagcacaaaggaatagttgcgattgaagtgatagatctaatcgacccggcaaatcaacacaccaactattaggggctctgaatcaatagtcgccgactaatcgagcgaggactagagacaagatgaatgacacttggcaaaatttaactaaacaaaacccaaatgtttttgaggatgtacaaagctatttatagaggaaaataaagctagggttaagtgctaattcgtggaggtggagggagacacttccgagatgggcctattctattacaaggctcaaggcccaagtttggtttcagcaacaacactgtcttgttttggcgattcccgttgactcgagatgaatttggacacgagaccggatgtgtttgaaaggtagcgagataagctttccacgaagtccaagatcacctaaatcggagttggcatgaaggcgctaggtccgtttgaagtcagtgctgtctccggaggccgaactagactggacttggaattaacattagagcgtgtgaagttatgagcgtatccgacgaagtgatgttctcatcacacaatgacctaatagtctagtgaataaagtcgagcacacataagggtatattttatccggcctctatatccaaccagatatatgcagccatttaaattagtaacttagccccacaaatgacctaacctgaaattcgttcatatgaagatttaaactctcctatgaatatttgaactcagggccttggggtgctactcagatcattacaaccactaggctacatgcaatttcataacttttgtcgacttagtcacataatttgaaaagagtaagaaattgttcggcatcaccttgaaacggatcatgatctcctggaggactgcttttggctgaaacaatacgtttaagagaacaaaatgactgagttgagattttcagacgctgccatatcctacctatgttaacaaagttttgggaacaaattcaagtagcaatgtatcacattgctatcatagcatggctaatcaagaaaaaaggggagtaaattcaactggaggaaattttacctctcattagcattaacacaatacatgtttatgccagccatcagcccaccgtatgctgggccttggaacgacgcatgctaggccacagcccactatatgctgggcctctacttagctatgacgaaataatttgttagggcattcccaacccaatgactagaatggtgtccatagcattaaataagctgccacctaagatgaaaaatgacgtgacaagtgaataaatgagaaaagagaagaaaatcatgtcttacatgagacatgatttctacacaacatacaagacattatgtgagataagtaacattaaatttaagtatggaatagtagtgtttgtattggaagagtagtgtctagtacgagttttttgatgatgtggagtttatgaaaactatgtctagtgtcttgggttgggaatgcccataggaatggttcgccaactcagcatatactcccctgtcctattttattttaagtgcaaacatgagtttccacgctcaactttaatcgttcattttatttttaaaaaattataattagttttttttgttgttatgagatgataaaacatgaatagtaatttacttatgtttttaaatttttttaaaatttttttaaataagacggacgatcaaaagttaggcgcgaaaaaatagactggagggagtaccaaaaaccgcaaattgcaccacatcgggtctacgtcatcaacttgcttgtgactaacggtactttcttttcttttcttttttttttgtcacaaaaggtaatcccagacatgagttttaacggcgcccttccgtcagaaggtcatctcagaacacagtttttatgagatttggcaagttcttgacggaagtactttgtcaaggaatgacagaaaccgtggtagtgatggcctcggctatatattagcatctgtgggcacagcataaaaccaccttggtagttactatataggggagaagtaaaaaggaaaacacagggattatgtgttgttcatgaaaatttgaaaaaagaattacaagaaaacgatatgtagctggtacttacagctagctgggaaattatttcataccattttcaaattacttttattttattaaaataacaagatgtttacgatgtttctttccttaatcttcgttgtgtctactagatatagaaataagaagtatgattttggtgctgaaaagtaagagacaaatagtagaacagggatttgctaaataattatcgacagtttgatttttttcaaccataaaaattgtattaagatgcctgcaagtgagatggaaaaaaccgtcagattcgcattaagatgtccgcaagcgagatggaaaaaaccatcagattcatattgagatgcctgcaagtgagatagaagaaaacagtgatcgatcatgtgggatgtaagctgagtggacctagccaaatgaacgtaccaactttttattattttatacatgagttacacatgagttacagtatactacactatgacctatatactacctccatcccaaaatatttgacgccgttaatttttttaaaaatatttgaccgttcatcttattcaaaaaatttaagtaattgttaattctttttctatcatttgatttattattaaatatacttttatatatacatatagttttacacatcacaaaagtttttgaataagacgaacggtcaaacatgtttaaaaaagtcaacggtgtcaaacatttagggaaggagggagtaatttagtttagatataaaaaggcacatatattttgttcatacttatgtacaagttatattacagttatagtatagttatggtgaaattatattataattatagttacatttgaaagtttttcaatcgaaaaaacttacggcggtactttagatagagccacgtactagaaatcccaactagcatgttagacatgaattattcaaatttcaaagccacgatttgcattttgtcctaggaccctaaattcctaaagactactactggggaactcatctttagtcccggtttacaacccctttagtttcggattgtaaaccgggtgggtaaagatcacttcttctctagtagtagatggccctgcaaaatataatagttttaaaataagaattccatattttttcttagcagtctaaaagctaaaacaagtaggaaaacaatgagaaatagaataattctaaaaatcaaactctaaaatactccgtaaattgtttgtaacaatgacgtcgttacacgtgtatatatacctagatacgtttgggagcggcggcgactgcacacgaaactaaagggcatgtgaggtgtgaagcgagaaagagacgccgacgctgtggctgatcgccgctttgaattggctttttggctcggcgcagctagcccgcgaccaaaacgtacacgagcaagcgagcggcgccttttccacttaaattggaacgatgtgacagaaaagttgaaagtttatgtgtgtagaaaagttttaatgtgatgaaaaagttaaaagtttgaagaaaaactttggatataaacatggccagcttaagtgcaacaagtgtcaacgaagatcttcatggatggatggatatgatcatcaaaccaaccaccacaaacccacatgccgccgcgggggaggcctacgctactacgcgcctgtcgccgacgcgtgacgcgccaacgacctcatcaccgtaatcgttttcgcataaaaaaaatgttttactcgatatacaaaataaacttttttttttttgcaagatcctcgatctgcgattctgcatgcattttggtacttattgctggttcgcctttgaatcgcaatgcatgttttgatgaagatgatgaatgtcattagtgaagggggcatcattgaattggaaacttttctgcaagaacagctcgagtttctgacctgagtatgatggagtaatacagaatgtgagtggagatatattcttcgtgctctgatctgggcccatgatagggggtgcaagcaggccaacccgcgagtttaaataaataataatttcgagtttaaataattaataatttattggttttcgcatcgcggcccggcttgccgcatctaaatatacaagtggatcaatctataaacctatttataagtcaaattcatagttaacccgctagtcaaactcgcggattacgctttatttttgcctataagcagccacttgcacccctagcccatgataacatgtcgtcttaaaactcacgcggaattggaacttgctgaatttgggtctggagaggtagtggcaggaatggtagggggaatgcaggatgtcatcatgatccgagtaaaattcattcagggtgtgtttagttcatgttaaaattgaaagtttggttgaaattggaacgatgtgacggaaaagttgaaagtttgtttgtgtaggaaagttttgatgtgatagaaaagttaagaagtttaaagaaaaattttagaactaaactcagcctcagtttgaaatttctaaattaattctcacctgtgcattaattcaacacttgagagcaagcaagcaaacaacacatccggcaattacgtagtatgtgcgtaatactcctctttctgaccttgtttttcatgcagaataaaaatagctaccgcgtgacagagcggctagctgcatgcacctgagccagatactttctccgtctcaaaaaaagacaaatcctaagttttcgtgtccaacgtttaaccgtccgtcttatttgaaaaaattatgaaaaaaaattaaaaagacaaatcacacataaagtattaatcatattttatcatctaacaacaatgaaaatactaattataaaaaaattttatataagacggatagttaaacgttggatacggaaagctagggtttgtcttttttgacagagggtgtagaaaaatagggtgatcaatattttttttttgagttgagggtgatcaatatttaagcctctggctggcagctggatggcttgtccaccgacatgcatgcatgtacgtatggcagcaaggctgagtaccgacgaaccgatcgaacgatgtcgtggttgagtagcacaagcaagcaagcaaccacacgagaaaagcgcgcgcatgttaccgcaacatggattcgaatcgtggatcgatccatccaccaaccgcaccagcagcggagaaaaggtactggagtacgtgcaacatatagctaggagcaatgcaagctacttcatagtagtatttccgtcggcaaatttattgtattgtattcccaatcagcaggatacatgcatggaacatggcccgctcgcacgatcgataccgcgctcagctcgatcggtcgctccctccatcgccaccgccaaattccgcgtccccgtccgtccgtcgcatgtgcgcaccgcccgcgcgacaccgaagctcagctcgatctcgcgcgtgcaggctgcaggtgcagatgcaggggggaatgtctgtcgctgccgccgcacgcccgtaccgaccgcgcgcgctgacaagggggacgcatttgccttgcctgctggctagtgaatcacctcacctagctacctgcagctacgcccacgaaggcgcaggggcctcctccgatctattcccgcgcgcgaggtggcgacggctcaacgcgcgggggcggagatggcgtggaggcgacggaggtcacgcggtgggctaaatccggtggctaccgacgatgtggaggacgatggcgacagtgcgaaggacggcggtggtcatagggtatgcgaacggagggaggcagctccggcgcatctctcctccatgccatcgtcgacacttggccagcagcaagtgagccgatgcaagagaggagccgtcaaggagatgggaggaggaatgtatgtggggcccacagttggccagtgacttttggcttgtcaagtttggctagtggagggttctgacttagccatctggttggagaggctgttgaaggatatattttggctggaatggctaaaatttggcttagagagtcatttggagaagctgttggagatgctcttatgctgtgttcggctatttatattgggaactagtcattcacgcacgtaaaacgaagcaaggcattagcgcatggttaattaattattaactttaaacaaatggattgatatgattttttttaaaaaaacaactttactatagatttttttttaagaaaagaacacaccatttagcaatttaggaagcgtacgcatttaaaacgagaggagagagaatattggctaccgaacaaaccttacaatttagaatttgtctaaaaattacatggacatatttacctagttcttcattccaaccaatatttataacccctcttatttaattttctcatatatttctgtgcatttcaaccaatcacgatcattcctcatatacttcacttttaatttttcttttaaaaaaaggttttatgttcttaaaagaggtaagagggggagtacagtacattgatgcctgccgcacctatacatggatcggtggtctgcatatgccgatatgcgtagcctaacggtgccgttggtgccttgtccctagctaatcatttccttctcatcaaggccggccgtgctctctctctctctctctctctctgattggagttctgcaaaagggaaaagccggcgcgtcggctgctcgatgatgctgatatctgcctcaatttgtgggtggtgatcgatgatgatgatgcatgatcgaccatgatcagctataggaggggcgtgatatgcatgttacggagcgtaaacctaccggacagcggaacatgcatgctttggctgttgttcgtagattcgagccggccagggcagattctcctccaaatatatattatcttctgtcttttggataagtgagtgggaaatcatcgataatcgatcgatcgtatatacacaccttgctaacagggtcaacgacctccatctgctagctactgcccgagcgatcctaccatgttgcccgtcctgctgtctgatgatgctggtggagataaaatcggcccattttgtttttgttttttaaggtaagcacgggacaccatctgttgccactaagctttaaatatattaattgtgttgtttgtaatttcaaattcaaggctgtaaagtagaatgatgaagaaaaaacacaaattaacactaaattaagttcaaattttaaattttgtctacggctgataagccaataagcaaacgatcaaaagccaacattcactactagaaaaaaaaatttttttccagacggactaaaaaagttttcgcaggcggacaactggttcacctacaaatgaacgcctataaaaatagttgattttcacaggcggacaactggtccgcctgtgaaaagagctcctagcattaaaaaaatgcgcagccaccgcccaccgccgtttccgcaggtagcaacagcttccctttctctgttctctatctagttcccattcccccattcaatctagtttccgttccccatcaaaccaaatcaaattcacaaaagcatcacaaattaacatagaagcatcatagttcacaattaaaacaaacgaatcacaaattaacattcactatcaaaacaaacgccatcgccgtccacgccgtcaccgccggtagccgccgccgcgaccgccctccgcgccgccggatctaggaagagggaggggagacgccgccgcctccaccctcctcgccgtcatcgccggtagccgccaccgcgaccgccctccgcgccgccccggatctgggaggagggaggagagacaccgccgcctccaccctcctcgctgtcaccactagtagccaccgccgcgaccgccctctgcatccgtgtaagttcaagtgctttaatttggtttcggtgattaatgacaaatctaattatatgagactaacgtttttatgagcctttctttgactagtctcatttggatatggaagtaaaaatgatgagaggtatgtattaaacttcacatattctaacttggtctctcttgtggatccaaaatatagtatgagcttcctatttgatctttattgattatgtgcatatgcgttccttcatatccatatgtatgcacatcttgagggggagcttattctatattttgtttattataaaatttctatcttgatttgaaatcatttttcatctcatctctctatattgtttatatcgggttattatccatcaccaaagagagaaaagattaaaagatattggattaaacaatttgtgtaattgttactttggtgatagatgataaaccgatgtttatgggattaacctctcttttgcataagttgtctactaggttatttcccgataatgagatgtggaagacatgcattcttttgtgatggaccttaatcatgacaaggatgaaatgcatggagataaaacgatatgtaccacttcttatctcctactttttgataggttcatatatatgatttccatgttattgatatataagtgtgagactaatgtttactcaaatgttatcttatttagtctcatttacattgagaacatggagatcatgaaggtatatgttttatgttgctctacatcattactacatatgccttctctatatgtataggataaacccccattggtcattctctaattgtgcatacacttgcatctcttgtatatttatttgtatgcatatatttagggggagcaaatcctatacatttattgtgcatgttctagatccatattgttcacctattatttatatcggatctttgcacttgagcttgcatacgagtatatgacacttgtgatgttaatgaatactcaacaaacatatccatatctttcatatgcaaccggttggtcatcaagtgaaggatgacaactgatttgttgagactaatgttctcccttgaggtgtgaaaaggaataggtcacactacgatgaggctaatgaatgacaccatgggttagtggtcaccaagccaaggacatcgtcatgttggcaagaatgaagtcaagcttgtgatgagaataaagtcttgacaaaggatggacaagacctcagcataaacatggttcaaccggatggtcacaagtgttgatctcggctcaagcttgaccccaagatggatggcgcaaggcaaaggtataatgtagctaagaatgttttcttagtcttttcccggtcttggtgtttggtgtagactggatttgctagataggcgccgtactatcaagaggggtctatgaagcgagcttgtggatgatcttgtgccatattagttcatatgcatgtaggtgcattttgtgggcttgtctaaccaagtgtgatgagttttctcaagtcctaaaccaagagaagtgggcatgtccaataggagtgagtgacatcttgtgggtatgtccggtggatatcctttggagtgtgagccctttatccttgacttaagttgtgtttcttggatggatttttcatgggttgaatggccctttgaataagctttccatagagtccaagaacgccaaattccgagacccgagtcaagagatatcgccgttttactaacggtcggttgagctgaaaagtgacatgcggtctgaccgtgggccttaggccggtctgaccgggtctgttagccggtctgaccggcgtggtaaggccggtctgaccggccccactggtctgttgcactggtctggtttttggtggcgatacagagctgccagagccgcaaccggtcagaccgagctgacggcggtctgaccaagccgtggacggtctgaccggccactacactgcggtcagaccggccaggttgagtaggctcaatgattgccctgtaacagctagttttctagccgttacaaagtagtccggtctgaccagcctcacaacggcggtctgaccggcagagcacaaagttggggatttcggttccaacggctagttttggtggttgggggtatatatacccactccccagcagcaagggtaaggttttggcactccattgcattatcttgaacccttgcaagagctctcacacccttgtgcacttagtttatctagtgaggtgttagagagtgagttaagtcaatccaagtgcgttgcttcattgttatagctagtgtggcacttgatcatattcggcaagcatcctagacttgttactcttggaggttgccgcctcctagacggcttgtggaggtgttgcccggtgacctctccgaggagattgtggaggaggcccggcaccgtttgtgagtggtttggagttcaccaccttcggagtgaaggaaaaactaccccgagtgatcgaggcttgggtagtcctctccgtgggccggctcccgccttgcccaccccttgacgaagggggcgtgcggttgcttcgtggttgagcggtggagttgggctcgcctcaacggggattaggaaaccggcgagtttccgaacctcggtgaaaaattccttgtctcttgtctcatttatttgttgcatttacatttgtgctatttacattcatagagacatatttgagcccatatcacttaggtttgcaaaacttaacttagttacttagttaaccttgcacctcaccttgcctagcaacttaggttagttttgtttaagtgccattaagttttaaaaccgcctattcaccccccctctagtcggcctccttgatcctacaatccgccgctgcatgccgccgcacggacgcgccccgccgccgtccaacctgcgccgctggccactggcctccccctcccccctctggccagatctgggagggagggaggggagccatcgctaggcgagcacacgccgcgccccgccgctatccaccccgcgccgctaccggcctcccccctccccctccggctagatctgggagggagggaggggagctgccatcgggcgagcacacgccgcgcaccaccgcgtcggggtgtgccgccaccgcccagtagccgcctccggccggcggccagggagaggaggtgaggtgaggggaggggagaggagataagaggtggaggttagggggaaggggaggaacgggagaggagaggagaagcgagggagaaatcggacttagaaaaaatcgtcccaatgtcgcctctatttatattccacgccaattttcgcaaaggtctgcttgcaaaaataaagggtatttttgtaggcggaccggataagtggtccgcctgcgaaaataaacaacgagcatcaccccggtttaaatttttgttggcggttatttggctccaagggtcatgtccacctgaaaaaaaaaccccatgtctaaaaaatgctttttctagtaatggtttccaatactaatttgaagaaaaatcgattttaaaattttggactgaaacttttggcatgcatatggtttagatgtgatttttcaaaggttcgacatattaaatacattaattaataaaataatccattataaacattgcaattaatgataaataagaaaaaacattgaaaataaatcagaaaacatcgtggttgtaaaataaaggaacattgcagtaacaaataggaacacgaaccgacattcagttgattcataacactatataaaaaattatataatttgaatttaaatctaagttattcttaacagtaactaaattctagcaccgacaaccgctacatgaccatttcaatcacttttaattgttgcaacttaccaggatatccatttttgccaaagtatgttttacgattaaatgaaagacacaaatgcacacatttgccacagtcgcacccttagcagttagcacatgctcaagagatcgacataggtccaacgattacaagtgatttctaatgtatggatttcacaaaagaaataaattaaactgggttctacaaattttataagaaaacctaccacgtgttctaaccaattatatgttatcgttggtatatatccacatgtttctcttaatcaattgatctatcattttgtctatcttatctacatatgtctgccgtgtattttcaattttcaccccaagaattagaaattagtacattaatcagagggggcaaaaggcccagtattgtcaatcatggtgggtctagattataactgtatatattgactaatcaaaataattatatgtaaaatactaatgcatctatacaaatataaaaaaaagaatggtatgtcaatcgtaatttcatattttaaaataaatttaagctagctttgcgcagaactgggcatgaaattaggttgcttactggttagctctgcaatatatttttttaaagaaaatttgattttttttttaatttttttattttgaaaataaattgtcccaaaacttaatttcaaatttaaaccttttagccatgtcatctaaactggtgccagttaaattggcgtgccgagacaatactagtggggtgcattgccaaaagggttggatttgaaaataaattaattttgggagtgtttacttttaaagttaaaaataaaacacgtagaaaaataatacaattccgtaaacatgctgatgatgagcccagcagacaatggtaaggacctaccagttgcgtaggagcagtcctagaaatatataaaaaaaagtattctgtatggtgctatatactgatagtactgtagtaccaatagatatgaaataagtcgtccggttataacaagagaaaatttcttgtgtacacctaattctttctattctttctatgtccctgagatttgctcatttccttctatacccctaaattttagtttggatccttcccataccccttccattagctgattgttagttgaccgttaaatttctatcataaagtctattttgctctttgctatctagaaaatataaatttatgaagtatattgatgaagcgtataaatttattgcatgtgactattatatgtatgagtttattttgtgagatattatttaacaaaagtaatattttagtttcgcctcacgaaggaaaaacaaaaataatgtttatctatgacaacccctttggtatcaagaaaatataaatttatgaagtatattgatggagtgtataaatttattatatgtgactatcatatttatgagtttattttgtgagtccattaatatacttcataaatttatattttctttataaattaatatactttatgatatgaatttaacagtggtatagaagggatccaaactgaaatttaggggtatggaaaggaatgaacaaatctcaggggtatagaagagattggatgaactttcaggggtacagggaattttctcttataacaacgtaatactaatttgctaattctctatgattaggggtaattttagtgtttgcgttttccctttgttttagtctcttatcactcaagtgctcttgccatgtccctccgtttccgttcttgttgtcggcaatcactcacgattggatggcattcgtccatgtatgttgcttcagtttgttctccgcattctccgttcgtcaggccattcacaatgcgcctaggtggagttgggcctcaacaccaaaagtgaaatattcgctgccacgtcgtctatcctcgcggcctccttaggaacgcggagcaaactttagacacagattcctcgtcgtgggcgttgcaggtgggacccatgctcgtgctccgcaccgtcaaggaagagagagggaggaagatccatgccgccgagctagtcggctaggggaaggagggccaccgggccggataagctcaccggctcatcctactgccctcgaccccgccttgccggcaagggcctcctcaagctcgtcctcctcctcctctccgcggtgctgggctcgtcggcccatctcccagatctaagctggacatcatcctcctcctctccgctgccgccgaagaggcaccatcgtcctcctcttctccgccgccatcggagagaggagcgcaagagagagagaggagagggagatgcaccggggtagaggggcaccgacggaaggggaggaagagcagcgcgggcggagaggagcgctagtgtggaggtgctgaggcgagcaaagaataggtagggacggctagggccgcccggcatcgtcgtcgccgctcgggccgcccggcgccactcgcgccgcgcgctgccctcgatttgccaccggcgctggcaccgctagggccgcttggcatcggtgtcgccacttgggccatcaggtgcctccgtcgccactcgtcttcgtcccccggcagcctcagttcctccggtggggaataaaaaaaagagaggagagagggagagttgaaaagtaaaaaaagatggtaccggtggtacaagcaacttgcactgtggaacatgtagcttaacacattcttgatctacgtggcacatgaggaacggcaaatacaagcgacgcactgctaatgccctcatcatcatcatcatcatcatcatcatcatcatcatcatcatcatcatcatcatcatcaccaccaccaccgtatgatctcccaggcgatgaccccgattgtcccaacctagcaaccataattgtgtcaaaggactcttttctcatgacctcgtgcacatgcgtcaacctcctcctcaaccataactgagctgaccatctcctcaccgctaaccatgcaccgctattctttttttttattgttttagtgagaaaatttttgaaaaattaagaattctagtacttttttattccttcagatatagataagaactagtttggtgaatcggaaactttttttcaattttatagaaaattgaagtaaaattttcaagtaaaaattgcaatttcttttctgaaaattgatctttgctgggtggtgaaaaacagtattagtcacagtttgaatagaaaccgggactaaatatcatttttagtcccggttaacaaacccaccgaaactttttgatcttcagtcccggttggtgctaccaaccgggactaagaatccgaaaagcgcgtcgggtcgcacgcgcgcgcctccccgcctcttatcttctcgatatctacacgcctagtcatctgcgtctcctcctctccctcgagacgtgtctcttcccctccccttccttctcctcctcctcctcacctcccctctcctccttcctctcccctcctcctcctccccctcccctcccctctgtcagcgacggcncaaccagnaggaggagacgcggtgccagctgcggctgtggcgggagagggagcggcagccccgttggtgggagcggtgcggcggccggcaaagccgctggggacctcctcctccccatcccctctcctccccctcctccccttcccctcgtcggctgcggcagcaaccggtggcctcctttcccgccggtctccgggtcgacgtcgccatcggcgggagggaggagcgtcgggcctgggccagcgacggcgcgaccaagaggaggagaaggcggtggcggccagcgaagcctccgggggccctccttctccccctcccctctcctccccttcccctcgtcggctgcggcggcatgcgagtgttggtatttcttaacgatattactagaaatagtcatttcagcaatggcgctagaaatggtccttgtatatttatggtcacagaattaatccgcaaacgcacggatataccattgtagtatttcacccggaagtatttcaaggtattgtatttttaatcccaagggaagataataacagtgaactttactaatgcactttatacatatgttacttataattgtcagagcataagcaggggttaaatataatataagggtagagtgacacaaagcaaagctatccaatcctcgtaacagaataattctaactaagtggaagaagaaatagaaagcactcaatttctatacttctagtatacactcgaatcctaacttacatctactaatgtacaattttgtggccaataccccttaacagtgtcctcctggtacttcaagagaccaccccgggttgccgagtttcttacaacaacctgtcatggctgtccaactggggctaaatacggaggagtaccctccccaggaatttgtcttagaaatatatactaacgtggaggaatatccgtactgagctgtcaccatcagcagcccacctctactgtcccgcagcatatatgcccaattaatgatacttaatagcctacattattaaatactactatatatccgcatgcccgacatatatagagtaactaataaatcagacattaaacccgcaccattacacctctctggaaggctacccacacaatcaacataatgcagatataaagaaagaccagtactcaaactaagtaaagtaccgaagttatataaagaagagtatttcattaattcggaaagtattacagaagagattacaagagctgctagagccataccgaaaactcttccgaagactccgaggacttttgaacactattctactctactccacttagcactatgttactaatactaaagtatgaagaggaattttgcttgctcgagtgtgttgtgaagtgagctcctctttttatagggccggtatgacggttatagaaacgtgaaatgtcaattttgcccttgtaaccgtcattgaggagtgatcctggacatccacgtggagggccagccggagccgacgccacctggaccggcccagcatgcctccagcctcggcaggtcactgacaggtgggttccttagacggttgtggtagttaaaagtcggtttccgacggttgcacctgacatgtgggtccatcttatccatttggttgcttaggagtgaggttttctccactttctctttattttatttgataaattcctgcaacatgttattctccaagtacaagtggaaatatattatttagaaataaacatgcattgtaagcatagctagttccccattattttagttatattgacggtcaaaatttgtcggtaacgaccgtcaacagcgaggcgtcaacagcgggtggaggtgcacgaaccgccgggatgatttttagatgtgatatgatttgttggatgattttgtgatgtaaatttgtgaatgatttcatgatgtcaatttgtggatgattttgtgatgttaatttgtggatgattttgtaacatcaatctgcgatgttattttgatattggtgcattccatctgtggtgttggaaaaaataattttgatgtttgcattcgatatgtgattgttggaactgtgaatgttggaaaaaaaactcgatctgtgattgttgatatgtgaatgttggaaaaaaacgatgaaaaaaatatgcaagcagctaaaaacaatgggaaaaaaggaaaaaaaaactctactcccggttagtaacaccaacccggattaaagatagccatctttaataccggattcggggtcccgattgcatactcgggattaaagggggttgcgaaccaggagcatagatgcattctccagcaatgatgaccacaccaacttcttccaccccgaaagatctcgtccagcgttggcttcgacatcaaatagttccactcactgctacaaaaatcggcattggtgtcggttggaaacccacaaaggtgtcagattcccagccggcacctagatgtcggcactgatatggaggagaaatagatgccagtttaggaacctgcatctttgagaatccacgaataaaaaaaaagtcggcttgacgtgagctgatgcattgagcagctctccatcatccccatcaaccaatcataatcaaaatcatcactaaaatcatccaaacacaatcacacgagcagctctccatcatccctatcaaccaaacacagtcaaaacatcactgtaatcatccaaacacaatcacaaaaatgaagaaaactgcaaacacaatcacatgccaccgtcgccgtcgtggatctagcctcgcgtcatcaagttgtcgatccggccacccccaccgtcgtggcggctagcagtagagaggaggccacacatggccatggcggagaaggacgtgccccaccgcggcagagaggaggagatccttcgggggagaggaagaggaggagagccgcacggtggggaaaccaccgccgcctcccctcccaccagatctggcggaagggagagccaccgtgaggagcctaccattcccatggggagcccaccgctgctgctacctcccctcccgccgaatatgacggaggggagggcgtcgccgccgcccgtggagtgccgctaccgctgttgccgagacagagagagagagagagagagagagagagagtccattgaggccactg

SEQ ID NO: 18374 - DNA, 11443 bp, Oryza sativa
agtcccggttggtaagatcatctttagtcccggttcaaatgctgtcagggcttgtcaggtccccccgggatctttagccccggttcataacaccaaccgggactaaagtcccacccctatatatatatatgtcttcttcctcctccagctgtccgagcaagcttcaaaatttcttcaaaaaagaggggaggtcatgccaaaatttctagtgaatttattttggtgattatatacaaatcggaggtgcctaaaaggttagcaacttcatcctccaatgtttttttttgtcatattacatttggagctatgttttgcacatttttatgtctccaaaatttagttgtaagttgatgagagagaaaatttgtgtggggaataaagaatatatagaaatttagtttatttgctaaagaaggttttataaaatagttgagaaggaaaatatagtgaaagttaatcttaaataatagaaaacaaactaaaatgaaaattaaaagaagtacaacacattaatattagtttaaaactttagaaatagtaaataagaattatttggtgtaatattttataatttttgtatgaataatgatatgttattattgtatgactgttgaaagagtttgtaattattttataattattgtatgactgtcattattgtaagaataattatttgtgtacgatttttttttcatgtcatgtagatggattggcaatggatgtacgctgaccggcggtccaaagagtttattgacgacgtgcattatttttgagagtgaccgaagctaacaggcataaggcttttatttgttgtccatgcaataagtgtaagaatcagaaggactattctgcatccaggactattcatttccacttgtttgagttggggttcatgccaagctataattgttggacatcccacggagagcaaggtgttgaaatgcaagaagatgaagtggaagacgacaatattccggactttgctcagtacgttggatttaaaggaaatcaaacgggcgaggaggaaagggatgctgatggtaacgacgttgcggatgatcttggtcagatgttgcaggacgccaaggaggactgcgaaagtgaaaaaggggcccataaattggacaagatgttagaggaccacagaacgtcgttgtacccaggttgcgagcaggggcacaaaaagttggataccactctggagttcttgcaatggaaggcaaaaaatggtgttagtgacaaggcatttggcgatttattgaaactcgtcaagaacattcttccggagggaaacaaattgcccaagacaacgtacaaggctaagaagatagtctgccctctaggactggaagttcagaagattcacgcatgtccgaatgattgtatcctatatcgcggtgaggagtacgagaacctagaagcataccctgtttgcaaagcactacgatacaagattagacgagacgatccaggagaagttgacgggcagctaataaagaagagaattcctgctaaggtgatgtggtatttccctataataccacggctaaggcatttgttcaggaacaaggggaatgctagaatgatgtgatggcacgctgaagagcgtcaacaggacgggatgctgagacaccccgccgatggttcgcagtggcgaaacatcgacaggaaatttaaagactttggaaaggacgcacgaaacatacggtttggtttaagtacggatggcatgaatccttttggagagatgagcagcggccatagcacttggcccgttacgatgtgtatctacaacctcccccctggctatgcatgaagaggaagtacataatgatgtcgattattattcaaggccccaagcaacctggtaacgacattgatgtatacctaagaccactggtcgaagatcttaaactgttgtggaaaaaggaaggtgtccccgtgtgggacgaggacaaacaggaggagtttaacctacgagcgctgctgtttgtaaccatcaacgattggcctgcacttagcaacctttccggtcagtccaacaagaggtacaaggcttgcactcactgtatggatgaaacagaaagtacgtatcttaagcactgtaggaaggttgtgtacatgggtcatcgtcgattccttgctgcaaaccacccggtacagaagaaaggcaagcactttgaacataaggtggaccaccgtacgaagcctaaacattgcagcgggaaaacagtgtttgctatggttaaagatcttaaagtagtgttcggaaagggcctggaagccagcctatagagagcaaagatggtcacgcggcgatgtggaaaaagaacactatattttgggagttaccctattgggaattcttggacgtccaccatgcaatcgacgtgatgcacctcactaagaacctttgcgtaaaccttcttggcttcctaggtgtatatggaaagtcgaaagatacagtggaagcacgtaatgatctgaagcatatggaacaacgcggcgaccttcacctggaaccaaaggagaaaggaagccattacttgagtctagccagctacactcttagcaaggcagagaaggaaagtatgtttgaatgcttggagaaggaaagcatgtttgtatgcttgaatgcttggagagcataaaggaaagtatctgataatccacgaatatcaagcgaataataagcacgaaggagaagaagttcacaaacctaaagtctcatgactgtcacgttttgatgacacaactgctaccagttataataaggggtatccttccagacaatgtccgggcaacaataacaaagctatgtgcattcatgaacgcaatttcgcagaaggtcatcgatccggatagattagaagcccttcagaatgatgtggtgcaatgtctcatcaattttgagttgatatttccaccttcatttttcaatataatgatgcatctactttgtcaccttgtcaaagagatcagtattctcgggcctgtgtacctacacaacatgtttcctttcgagaggtacatgggcgttctgaagaagtatgttcgtaaccgtgctcgtccagaggcaagcatcgccaaggggtgtggaacagaggaggtcatcgaattttgcatagaatttattgaagaccttcgcccaattggggtacctgaatcatgccatgaagggagactacatctcatgggtaacgagacgaacaaccaacaactggccttcctggcaaggggacaatctgggtcgatcacgacattccagggatatgagatcaatgggtacacattctacacgagagcccaagacatgaagagcacgaaccaaaacagcgttgttcatatcgatgacatgggtcacgatggaacaactggcacgtattacagtgccatcgaggacatatgggaacttgactatggtcctctcaaggtccctctattccggtgccaatgggttaggttgactggtggaggcgtaatgattgatgacagtgggatgacaacggttgaccttaacaaggttggatactcggacgaaccttttgtccttgccaatgatgtaacgcaagtcttttacgtgaaggacatgtctagcataggaaagaagggcagaggacctgacgagccgaagcgtcacgtggttctcccaggcaaaagaaaaatcgtcggagttgaggacaagactgacgaggattacgattagttggatgggcaaccccctttcacggtgacgattgaccctagcatcctcctatcaaatgaagacaccccttactcacgtagcgatcacaaggagggaacaatagtgaggagaaagtatgtgcggtcaaccgtcaccgccgatgtattgccgtaattattgtgtacacgatgtaaactattttggatgtattgattatccatataaatcaattgttgtatggcatatgttaattacgtacaattattagaagttttaacaattttaaatcatgtaattgctagttatatgcgataattagaatttttaaaagtttaaatcatgcatgtggcatttacatatgttaattagagtttttaacaattaatttaatatcattcatatgctaattatatatgattatttgaatttttattaattttaaatcatgcatgtggcatttacatatgttaattagagtttttaacaattaatttaatatcattcatatgctaattatatatgattattagaatttttattaattttaaatcatgcatgtcgtatgtatatacatatgttaattacaatttttaacaacttaatatcattcatatgctaagtatatatgattattagaatttttattaattttaaatcatatatttgcttattacgttttatccacttaatttactacagacaacaataatttttcgaagtaattgtcattaatttttcgactttaaataattttaatgcattattttctattttagaaacacatatataatggaaattaatattcagtgtgcttatcagtagtcccggtttaaaaagaatttggaaatagctggaaaatatctttagtcccggttgatgagaacatatctttactcccggttgttctcatcaaccgggactaaagatctaggggtatatatattcccgatgtgcgccctcgtcttctccaccaacacttagaagttttttccccgatcgatctctctctcggcttctccttcgctgccactgcctagggcatccccacgccgacgctgccatcgtatctcgtcgtcgtctcgcgcgcgtcgtcgtcgccgcctccgccgccgccgcatctctggggtgagagccgccgccgcctccctctctctctccgacctcgatctctctctctctctctcccaaattaaccaccgctggccgcctcattgccgacgccgccgccgacgtcgtcgcggccgaacacgactccgccgcgacgatgatgccgaccccgacctcgatgtggccgccaccggcgacgacgtcgcgccggccgtgccgacgaagccgcgccacgacgccgggccgcgccacgccgccgcggcggcttgacgccgagacgccacgatgccgccgcggcacgccaccgccgcgccgccacgccaccgccgcacaacgccgccgccgcgccgcgcgccacgccgatgccgcgccaccacgccgccgctccaccgctccactgccgccacgtgaacgaacgaacgatcatgaacgagaacgaacgaacgaacgtgaacatgaacgtgaacgaacgaacgaacgtgaacgtgaacgtgaacgtgaacgaacgaacgaacatgaacgagaatgtgaacgaacgaaacgtacgtgaacgagaacgtgaacgaacgaacgtacgtgaacgtgaatgaacttgaacgaacgtgaacctaacgtgaacgtgaacgaacgtgaactgaacgttgtatgtgaacgtacgtaaacacatgaacgtgcatgaacgaaaagtgaacttaacaataacgcgaacattacttaacgtacgttaacatgaacgcacgtgaacgaacgaacgtaggtgaatgaaacttgaacttaacgacaacgcgaacgtgaacgatcgtgaacgaaacgtgaacttaacgagaacgcgaacgtgaaatacaatatatgttactttgcgtttatcctaatacatctttttgtatgttgcagaaaagacgttgtcgtcgtcgtccctcaagccggagtggtcgctagccctcgaaggaattcgcgcaggcaagtgatgtaaatatatgattgttagatttttaatgcaattaagactattagatttaatatacgacacttagacttagcaacataattagagttttaatacaatattatttgagttttaatataagattattatagttttaatataagattattagatttgtaattagacttagcacataagattgtgtagggttctaatatacaacagttagacttagcatatatgactatttgagttttaatataagattattagagttctaatacaagattatttgagttttaatttaagattattagatttgtaattagacttagtatataattattgtctagggtcctaatatacgacacttagacttagcatagttgactattacagttttaatacaatattatttgagttttagtataagattattatagttttaatataagattattagatttgtaattagacttagcatataagattgtgtagggttctaatatacgacagttagacttagcatatatgacttagcatatatgattgttagcatataagattgttaaagcaaaaatgacctatagacttagcaactatttcttgtatgaacagatggctgatcgtgatgaggaacagatattgtacgatacaatcgcggagggaaggagccagtactggagcgaagaagaggggaatgaggatccaaaccagtacttgaacaaggaagggaacgtggagagggatgcggaggggaaccaggaggggaacgtggtgaaggatgtggaggggaaccaggaagaggaggctagtggaaatcaaccctccgctggacagaagagggcacgcgggcaacaaggtgccgcgaagaagctagagggtcggcacatcataacggaagtggacgaagacggctgacctagtgccccggcggaagcagccaagaactacgtacgacacagcggttgggttgtgtgggataacgtgcctgtcagtacggtgtactggcgcagaacaagggcacgcggagatcatgagagctttgtcccagattcggagaaagagatgctgtggaccacaatgctcgagacattcacccttcccgcgggtacagaggacaaagtgaaaaggtggactctaaagaaaatggcagaacagtttctgagcttcaagggagatctgtaccagaaatatatcctgaaggggcagacaccgaactttgacacattcccaaagctaagggatcactgggacgagttcgttgcatataagacatgtcaacaagggcaggtgatgatggaaagaaacaaagaaaatgccgccaagaagaagtaccatcaccacttggggtcaggcagctatagcgtcgcgatgccgaagtgggaggagatggaggcaagcttgcttgagaggggtatcgaaccggccaccgctaaatggctggatcgatcgaagttctggtactatgctcacggtggaacgctcaacccagttgatggctccctggtcttcagcgatcagatacgcgaggctacgcatcgactaacagacgcagtggaagcctcttctcagggcacgttccgacccgacagagagaaggacgagctgtcacttgccctgcagactccagagcatctaggacgaacacgagggaaaggggtgattccttggaagattggactcaaggaggacatccacacgtacaggagtcggatgaggagcaagagagataccagggcgaagattgcagatcttgagtacagggtaccgaactacgagctcagcatgtaagaggaggtggcaaggaaggttgatgaacgcatggccgcacatcgatcccatgatccccagccgaccattcctcctgcaatagtgagcccttcaggaaatcgtaacagctgcacctcaacggggcagataggatcacagagcatggacgccatgcaaacccaggacaaaaccacctgccccgttgatgacatcactcagcggacaccatgtgagctgcatattcccttcaggaacttatcaataaaggtaagctcgtagtttatagattttagatttgtccattccgcaagttgctccttatatatgttaattactaataaataacctctcaccacgtgaaggtggcgtcaggcatggccatcccaacgaacccttcaggtacttaccactgcaggccgattccagcaggatactccaaggtcgaagttgagttggtcgaaggcgcgtacgaggacctcgagttggattaccctggaggagacggtgagacgcatctacgagacacaagccacgccattatactatggcgcaagcgggacatcatcctccctgggcgacaagctgtgtctcgtgcaccatctcctccggctccgccatctcctccttaggctcctgcaccgtctcctcctcaggctcctgcaccgactcctcctcaggctcctataccgactcctccgcaagctccttatccagcacctttcaagtcaagggccccccaagctccaccgcctgcccccacaagggcaacgaagaaggcaaaaattgacgccgccaagaacaaggacccggggtacgattgcacgcaagaggagcttgacgcttatgtggcatcaaaagtcaggagacaattgaagcctcgaagtccaaaaaagaagattcctatagacccgagtgtcaggaacttcttcaggggtatgtctgcacctgccaaggaggccataaagctatcggactatgagcgaacactcaagaaagcatcttctgaaaagtccaaaccagtccctcagcttggagagcaaccaaaccaggagatcgagccgttggtgaccggtgaagattttggaatagaagaatttattactgacaccgggctaactacagatcaattactacgaggcgcaccaatcgaaaagacgaaagtgaaatacatgtacgaactcagtaaaccgcttgtcaagcctgagcagctgcagtccctacccacacaaatgtacaagttccatcaactgtacatggagatgagcgccaccggtagagagatgatcggagcgaggatcagggacacggacttcttgcaaggagatgacattctctggatcaatttcaagggtatctacgaactataccagctagacgctctcgacatctctattatgagttgctggattttgtaagtatcgttcagttagatttcttattacgtttcctttaattaattaggtccttgtatataagtagactatatataatatatacttccttttatcattgtagaatggagattcaaagggcccgacggcgggggttttcgatactggattcatcgaccctcagaaagtaaacgtcgcaatgctcgaccagtatccacaagccacagaggacaatctcgtccatctcctgaaggcgcagcattacaagacgtttatactattgctgtacaacacaaagttagtttaattttactgtcttcctataccaaatttcattcccgtacgaacatgctaagtgtttcatatgtaatgcatcccacgcacattgcagattccacttggtccttttactcttcgacctggaggcctgcaccgtcaacgtatatgactcaatggataaaaaagaatctacgtttgacaaggttttcgaacttatagacaggtactgtcataagttcctatgttaattaagaatcttgttataattaattgctactacgaatcatagctttaaactccatgtagggctttgtatcggttccgtcatttggtccgcggcaaatggagagaaagacttacgcggaagttcaattttcctgtgagtacacatgctctacattgaatctcccattcaaatgcatacaagtgtatattaattagatctctcgccatttatcatttatttatagtgcgcaaagcaaaagcagggaactaacttgtgcggctactacgtgtgcgagtattgccactgccttgcagaccaaatcatcaccacaagagagctcgatgtacgtacaaataaattcaaaatttcattgcgtacatatcgatttgttgtttaattactaattaatttcatacattcatatagtttattcgcatgagagataacctgatcacacacaaggaatttattgcggcggttcaagaacaactcatgggattcatcaacgaacaaatccttgatcccaagggtgaattctactacgacggaaatacaattcatatgtccttagcttctgagataacgactactactacgtcgaaatcgtagctagctaggacatcataatggattgtaattaatacatgtctatttttctatatgcatgtacacattttctttaatgtaaatatatatatatatatatatatatatatatatatatataaaccatgcaacaacagggccatgaaaaaaaaaaggttagctcgttctttagtcccggttggtaacggctcagccatggctgagccatctttaatctcggttggtgttacctcgatctttagtcccggttatttcacccgggactaaagatagtcccggattggtaatcccggtttgaaaaccgggactaaaggggggttacgaatcgggactacaaacgcgttcttcacccgtgagtgtcaatctcaatgtgttttttttgtagtagtgacttccccaatccactggacgtgatgaatttaacccgcccccttgatccacggaagaggcacaatgcgggaggtgataggtgttggcgacgggtgtcaacgtttgcaactgcaggtgccactccgtacgctcggcctaaaataagggcaaaattacagttttttcttttgatgttcatattacgttctctcacatttctactactattaattatgatggtacaatataaattcatccaatctcttggatgtaaagatattaatatgtgttagatttatctctactacgggccgcaaagaggcataaggaaataaactgctaggagaatgcagggtatcgaacaaagcttgaacagaggtggcaatttaactggcaatgtgggcgcgcggagtcatggaccttcttcccaccgatccttacccttaacttgagcttgtcggtgaagctgaatcggttactaaaccaaactaattattaaactctgctgatgagtctcacggccttttccagtttctctatgcagctgaccaacaaatagtggtgtggcttcgaccatctgaggatcagatcgatgtgccgctttttctacagaacacaggaccatctcaatatgtctcatcgcatcgaatgtcctatttggcgaatgacatgcaatgcatgttaatttcctgctaattctaccgttcgcgtgtatatcgatcgagccctgaagagagattaatttaagcgatgattatccgatcgagaccagtcgttgccaacgaactcctgctcaccaagtacatacgatcgagcgagtatatatatacgtacattcatacggccttgacggctggggcccacaccaatcaacgccgaaaaatacaccccgttctacgtacacgccggaacatgcagatgtatatacataccggccaaaatgtgatgcaaatacaataaagtaattaatagtcgagacgtcgacgcatgcatgcacgttgcagagctcggaattaaacataacatggcctgtcaattcttaatctctcgatcactgaata

SEQ ID NO: 18375 - DNA, 12793 bp, Oryza sativa
actttatatctaaactcggccatagtatctcgatactgaggccatgtttagttccaaagttttttttccaaactttcaactttccatcacatcaaacctttcatacatatacaacttttctatcacatcataccaatttcaaccaaacttccaaacctcggtgtgaagtaaacacagcctgactacgggtgtatttagttcatgtcaaaattgaaagtttggttaaaattggaatgatgtgacaaaaaagttagaagtttgtatgtgtaggaaagttttgatgtgatggaaaagttagaagtttaaaaaaaaatttggaactaaactcggcctaccttctggtggtaggggctgcagctgcaccatcttggttgctagcatctctcttattaactcctatcaactgatccaccctcactgatcactcttgtagagtcttggtgtacatttactcctactgcactgcactaccaaactctccttcggccctcacctcacaccttctgttactgttagtgggccccacatttgcaaccttctctctctaccactctcttgcgcaactcctcctctatcgatctccttcctatatatacatgctcacttggacacaacacattccatctcccaaagcagcagcagcagcagcagcagcaggccagcagctagcattatcagagagagagagcaaagtgtgctctcttcttcctcttctctgctactaatcaaagctagccagctagagacatctatagcttgggagaaagaagaaagctgagagctctttcttgctagctagctagcaatggcggcttctgctgctgctccggccaccgtggcggggctgctggtggcggtggcggcgataatggcggcgtcgccggccggcgcgcagccttcgccggggtactacccgagctcggtgcacagggcaatggccttctctcgtgactacaccaacaagtggggcccgcagcaccagaccctctccgccgaccagtcctccctcaccatctggctcgacaaaacctgcggtaatttgtttcattagataactaattaattatattagcagctaattatttgggtttagttttaattaatggtagtaatgttctcgtcggaggaagagaaaaattctttaatatactttgtcgtgtcacagcgacaacagtcgccgggcaatccatgtgggtcatttgacgtgcccagacttgtgttttttttttgtttttttggtgacagttacaacactggcgtaatgttaatgtgggtttttgtttgtgccttctgaaactctgaaaaaggagggggaagcacacatggttttctctgtcctttttactgtttccagtcgtgtgtggtccacgtcagaaaattaaacagaactcttaacaatatctcgtgtttgtatatcctaatctttatctaaatgtggtagcttataaattaattaaccaagttcaccttttagtttacgtgaaagaagaaatgggtaatttgttggttaatcctgccgctaattgtgatggtaattgatgcacagggagcgggttcaagtcaaggaagtcgtacaggaatggctacttcgccgctcgcgttaagctccccgccggctacaccgccggcaccaacaccgccttctacgtaagcttagcatatttcatcaaatcagcctcaaatttcgacccaatttcaaacgaacaacgggtgaattcaagcttaatttgaacactattgcagctgtcgaacaacgaggcgcacccggggttccacgacgagatcgacatggagttcctgggcaccatccccggcgagccctacaccctccagaccaacgtctacgtccgcggctccggcgacggccgcatcgtcggccgcgagatgcgcttccacctctggttcgaccccaccgccgacttccaccactacgccatcctctggaaccccgacgccatcacgtaaaacccgatcacaaatacttgtcagttttgactattaaacgttcgtcgctgacgtaaattgattggttcgggtacaggtttttcgtggacgacgtgccgatcaggaggtacgagaggaagagcgagctgacgttcccggaccggccgatgtgggtgtacggctccatctgggacgcgtcggactgggccaccgacgacggccgccaccgcgccgactaccgctaccagccgttcgtcgcgcgcttcgaccgcttcaccgtcgccgggtgcgccccgtcggcccccgcctcgtgccgccccgtcccggcctcccccgccggcgccggcctcacgccgcgccagtacgccgccatgcggtgggcccagcagagccacatggtgtactactactgccaggactaccgccgcgaccactccctcacgcccgaatgctgagctacttttttttttttacactcgcttattttgatttataagtggattcacgagtgccgttgccgtgctgattcgtgtgtgttgtgttcttgtttggattttgggaaaggtaatgtgggtgtgtgtgggccgctgccctaccgctgctgccgcctgtgaggccggtggttgaggcgttggttggtcgttcgtttcgttgttttggcatgtttttgccaaaagggcactcgtcgtttgctatttttttcctctttcttttggcttgtgtttgtccgttttcatttcacatgcttgcgtgccccaaaggggcaggattaaaggtgaaggtgcatgatccgtgatattctcatgcctgcttgctgtaaacacaggatatatatatatatatttgtaatattgatacgtctcgtgtcggtaatgatatttatgaaccactggaattaatgtggttggtttgtgtaacatttgtttttattctctctctccaaacattgatatatatccattttcgtcaattcagtttaaatagaagatctagttacttgtgttccaaggttgtgtaccatatttccctgtctgaattttgatgcatacgcgtcgggtgactagaactttcgtactactaattaattatcgatcaactagtaacatttttcaaaacatcatttgattgatcctggatttttggatgactcagtccgatggccagacacctttcttcaacctctcttttttctccatttgctctatcttcttatctaccatcaattgagctttatactaaccctgtacgtttcacttacctattgtctcctcaaccactactgattctttcctcgatgatggcaagcaccaaagaagttagggcattggggtgttgcagctaaagtacatatacatggaggccttgagcagtcggtaaactagtggcggtcagcgatgaagacgatacaatgtggagaggtgaggtggtgccaccggagctatgagtaaagaggaccggatgtaggcggtgttggcggcatatgaaattcaaagcaacttaaggagtatatattaggccatgttcttttctccaacaaaaactggataaaattttggatactcgtgacacgcttttcaaactgctaaacagtatgtttcgtgcagaagctttctatatgaaagttgctctcaaaaatcacattaatctattttttaagtatgtaataatttaaactcaatcaatcatacattaataccacatcgttttgcgtaaaacatttaatcttcatcttcagaaaaaaaaagaccaccttagtacgagatgggtaattgagcacgtgagagtagctctagtgcgaatctaaaaccaatttcaacgctaaaaatccgaacagtacaatctattttaataccctagggatcgaataaccaaatttttattcggcttttatagaccgaacttgccgaacgaacactagagctgatctaaaaatagatagatgcagagaaaacctacctatcaattgaatgcacgtccaactgccgctatgacacatggacaacctcattgaagcaacattgatgttgctatagctagatttgcggaattttctgttctaaaaccctatttgcataatattctattgatttatcgctgcaaataggaaaatttgaaaagaaataaaaaagaggttgcattgatatcgaggggaccaggatacatgggaagaaaggtgcacaagcgaaaacatttgttgaccatttccagtggcggtgccacttgctacagtacaggcgcaggccctcatgtgtggacccgggcacgatgcttccgtgatacactcaagatgctgtgacaacagtagcatcggtattattgtttcttctcccttttcgtgaagcaaacagctgcgacagtaataactagtctagggttgtgtttagttcagcgtaaagtttagattttgattaaaattagatatgatgtgactaaaaagttgtgtgtatgataggttgatgtgatggaaaagtactgaagtttggatctaaactttagatataaacacagcctagatgaatatgatcgattttggttggtataacccatgtcacgcaccttgtgcttttgggtgtacatatatatacatgcattggctatggtgttttgtctggtacacatgtgcagtagtcgtggcatgtactgtaggtgtctgtactagcttagggagtgtttagaatcatgggtataaagtttcggcgtgtcatatcagatatatagacatatatttaaagtattaaacgtagactaaaaataaaacaaattatagatttcacctgtaaactgcgagacgaatttattaagcctaattaatctatcattagcaaatgtttactgtagcaccatattgtcaaatcatggagcaattaggtttaaaatattcgtctcgcaatttacatacaatatgtgtaattagttatttttttatatttaatacttcatgcatatgttcaaatattcgatgtgacaagacgaaaaatcttgacgggatctaaatacaccttagtaggaaaacactgttctcacgggtactgttttcttctgtggtactccaacgagcaattattgtccgttcatcgtcgattggacgggtgtgatttacgcaaagctagtatatatggtgcgtagttctttgagtttgctcaatggagtttgatcaatctaagtcagaccatgtatggtttttcttgttttggggacgaaatgcaagcctagggagatggcgaaattcgtaaaaattgattgattttgttcaaaattcgacaaatcctgagcagtttgggtgacgaaatcagacatcgttttggtaggtatcgttttcttctactctataatattattacttacacagttcgggaaagtaaaatccccgatccaccgcccaaaacaaaatatcatacataacaataccctaaccctttatccttttagaaggtaagggtaaacggactatcaaaacaaccttgcgaatgaaacagtacaacagtaatggatgtttcttagggtgatcactactagagaaacaatttttctgaatgagaaccctataggtggaccataattgttgccgcctgcaaaaatcgttttccaggggagtgtttcacgagccacatgtgaaatacattttcatatgcaactccttaagaagtccgcttatgcaaatagacttattttttcagatgagcattttaaatgaataaatggaaaaaatgtattttagaaatctaacttacctcctatttttctagtcgacacttcaaattttttcaagtcatcatccttatatcctcaccttctctctcgcatcctctcctgtatatattatctcccactcctctctctccctcgagttcccctctcaagcgacggcggcaggtggctagctagtggtcggtagcaagaggtggggtggcttagtgacctcgtgtcgtagattggattggtctggcagtttttgagacggggagttgactcagatattaagagttttttctttttcaaggattatcctttctcatctatctcgaaacaaaatacccttaaaatgaggcttttcctaatcttacctaatctgttcctccaaccaaacacgtgtcagagtttcgaaaaagatacatgcatggtttggtatacagcatattgggccttggtaagggacagtggcatactcgtgtacatggctgggccttcagtgaagcaggccgtacgtgcgcgtcaacggcggcggccgccgagaccttcggaattgccctctcgggtggcgccaaattggaggtcgcaggatcgcagcctcgcaggtgataaaatcaccagccactagcgcccgcacgtacgtgtcgcgaactcgcgccacggccgcgccgctcgccgccgtcgagcgacaggcgtccacccctcacgcctgcatggctgccacttcgcctcctcctgcatcttccaacgttgatataaagaccagtgtcataccacgccaagattctcgatctctcccaccaccatggctgctgcacctgcacggctcgtcgtccttgtcctcgtggcggtcgtcgtcgtcgtcggcggcgacggcgacgccggcgtcatccggcaggtgacggacggcgggtactggccgccggggctgctcccggaggcccagttcgcggcgttcgtgcggcggcacgggcgggagtactccgggccggaggagtacgcgcggcggctgcgcgtgttcgccgccaacctcgcccgcgccgcggcgcaccaggcgctcgacccgaccgcgcgccacggcgtcaccccgttctccgacctcacccgggaggagttcgaggcgcgcttgacgggcctcgccgccgacgttggcgacgacgtccggaggcggccgatgccgtccgccgcgccggccacggaggaggaggtgtccggcctccccgccagcttcgactggcgtgacaggggcgccgtgaccgacgtcaagatgcagggcgcgtgcggctcctgctgggccttcagcaccaccggcgccgtcgagggcgccaacttcctcgccaccggcaacctcctcgacctcagcgagcagcagctcgtcgactgcgaccacacggtacatcacaaatcacatcacacgcacacgcaacactcctaatctcatctctgaactaatcgagatatggctcgtgatcgttgaagtgcgacgcggagaagaagacggagtgcgacagcgggtgcggcggcgggctgatgacgaacgcctacgcctacctgatgagctcgggggggctgatggagcagagcgcgtacccatacacgggcgcgcaggggacgtgccggttcgacgccaaccgggtcgccgtccgcgtcgccaacttcaccgtcgtcgcgccgccgggcggcaacgacggcgacggcgacgcgcagatgcgggcggcgctggtgcggcacggcccgctagccgtgggtctgaacgcggcgtacatgcagacgtacgtgggcggggtgtcgtgcccgctggtgtgcccgcgcgcgtgggtgaaccacggcgtgctcctcgtcggctacggcgagcgtgggttcgcggcgctgcggctgggccaccgcccctactggatcatcaagaactcgtgggggaaggcgtggggggagcagggctactaccggctctgccgcggccgcaacgtctgcggcgtcgacaccatggtctccgccgtcgctgtcgccccgccgccgccgtgatcgattgatcgatatcgatcggccgccggcgatctcacgttaccgatgtgttatgtgaagtacggagtactactgtatactggatgtgcttgattaaagctttgcttggttagcggtgggagacgtggcggtagtaggtgcttagtactacgttttacaaatggttttacatagttgggttgtatgtcgatctactactagtgaatacagaataacaaaaagttatggacgtgtacattaagctagggtatattgaagtcatcttcaagggctttattattaaaccaacgcccaattgtgttgtgtatcaactatcaagcactcatcgagttcacaatagattttaaacatagctacccctgcaaaaaaaaaaaacattgtaacacaacacactagttcacagagcatttttaatgttctggattgggacccatttagattgcagatcgttgggaaaaatcgttctctcatttttaggcatttttaggtgttctcccatttttaggtgcggtcccatttttaggcatttttaggtgtcctcccatttttaggcatttttaggtgcggacctaggcccgcaggagaaaatcaagagaaaatcaatttttacatgtgagccggttaagatccacacacaaaaataattaaaatttttttaattatttttgtgtgcggatatttaagagacccgcaggcgaaaaaataaattattttttacccgcgggcctcttaatcgtccacacgtaaaaataagctatttttgcgtgcggacccttaagaggtccacatgcgaaaattgattttcccatgcggacatcttaagaccaccgtgcgaaaattgattttcccatgcggacatcttaagaccaccgcacggaaaataccctccctcttttcccctctcaacacttcaaaaaaattccatcctcgtccttatcctcacctccacctccctccctcctttcttctcctctcacaggcgcgactcggcatcccgcgagcgacggtgggaggagcggggcctcgaccgccctgctgccgtcgccgccgccgacgaggtggccgggatccgatagcgcgacgcctctccgctgttcagatccgacggcagcccccctctgccgccctccgtagcccggatccggcagcgccgcccctcttccgccctcccccacgcgacggcggcggcgacgacgaggaggtggccgggatccggcagcgcggcgtctctcggccgcccgtatccggcggcggcgcggcgcctctccgctgctcggatttttatttttgtgtgtgggcaacataaccaccccggacgctaaaatgtgattttcgtgtgcgggtacaaaaattacgatttttctagaccccttagtgtatttaaattacgattttcctagaccccttagtgcatttagagattcatttgtaaaaaagtttttattctgagaagaacattcaaatattggattgaaatttcatgatttcgagcggaaagtttatgaatcttttgaatttatttggaatttcatatgtacaaagttccttcgcaaaagtttctacatttgaaaatttacgtggataaagtttctgcgtgtttttgtgcacaaagcttctacattcacaaaattacatagatcgataaagtttttgcactagaaatttattattactccgaatccgatattcgcgtgcacgtgttcacgcgtgaggattctcggacagttcgggacccacacagccacactccaaaccgcacaggcccagtttgggcccaaaagaacaatcccttccttgagacgtcaccgaactttgggctctatgggcctaacgagctccactgggcccaaatcacaaatgggcccatttcctcccactccataatttttttcatttttaaatttttattttttaatatttacataaatattataacatctaaaatatttacagaaatgacccctgccgcctatgtggagttttgccgccctctgcaagggctgtaagggggcaaatgcaattatcgtcctgccaaaaatacatttttatagtttttcttttcatcttgttcgtccctcatgccaggtctacttctgtaaaatattttcgtcgtaacaatatttctttctgtaaatattaaaaaaaattaaaaatgaaaaaattccccactctagggaacgccgagactgagaacgccccctttcctttccccctcctctcgttggaggcggccggggaagctggtgggcatatggagtgcgcggcgaaggggctggtggcggagccgtgtgccggcgaggcccgccggcgctgcggcggttgcggcgccgtcgcctactgctcgcgcgcccaccaggtagcgcccggtgaaaactttctaccttttctgcccccccgttaaatccgtccagctgttgccgttctagggagggtttcgaatggcgggcgtatgcgtatgcctcgaccaaatctgtgtttcgtaagtaaggatttctgttgggatttcctggaatcccggtaggtgagagtatcctaacgttgtgggtgaagctttgagtttaatctgaaaattttaaggaggagttatttgtattttacatatattttctttgcaactgtgtagctatgtgtaactttgaaacctacaatttgcagactgtgcattggggatttcataaagaagaatgcgcaaggctcgcagagcagatgagccgcatcgatatgctgaaacaatttccattcacgttctctgtggaatctcctgctccggtacttgactcattgtgatctccatttttttttttgcatctgaagttctctccgtgcatctaaagttatttttccccctctgtcataaaattgtttctacctatgcttcctgaaatgatttggttaccccttgtgaaccttgttttgtcccttagtagtattatgtagctctctctcacacttactgttcttacagaatcatacattccctagtctaagatgtttccttttggaatcattcaaacttcaccaaaaaggactctggaaatcagaatgcatatgtgatccagaggttacttcagtcaaggacttaaggtttgcttttgccctgagatctcatgatcccagctaccagccaactcgttaattctataacactagtatatttgctcgtgcgttgtaacagatctcaaataaatatgccataagttctaggcttacacaaatgcataatagttacccccacttttaaagcattcgcatcagattgacctatgaccatatatttgtatgctctaagaactcaaacctctggaaaactatacggttaatgatatcaatgtcttgttgtgtattatacaaactaccaggctttatgtcctttaatttttacctaattttagtctcagctaattttacttttatgctctttctgcatattatacagcaaaacaactgactggagtatgggaagcgccctctgcccatgcacaggtggatatctcattgtaatgaggtggttggcactattttcatttcatggctcctaaaagcatttgattttgtgtacagagcctgaacataatgtatccacacccctgacaagctggaaagactactataggtggagatcgcttcctttgcaatcacctgttgctgttttacttcactgggtatgcacaccacaccaagttttgagaaatattttgttgtacgatcgtagatatacgattctcttgtttgtttttgacgaaaatatgattctcttgtcaatccagaccaaaggttcgaattcatttagacaggtgcaccaagaaataatcgtgttacttatgctatggaaggacagaatgaaaacaagatgcaagcttgtattgtcagtatcaataaaaaagagaatgataatttgttcattatctactttgggtgatgcggtcattggtttttataatttgacatacttcaaatttactgattgatttcattattttgcaaatacatccaagcatgctgtgcttgtgcttgctatattgcctatatatgcaatcttctgcttaaaaaaaaacagttggctactacacttcctgtacgtgggatgttttccttaaaatatttaattgaagcaaatgtcagcttggcagaatttgcgttattaaaaatatggtgatgtttcctatcatgtcttcagtcttatatctacattactagctatttctttgaaaacttcggcaaagaaccagtttactgaagcattctttccagtttacattcctggtcctcttttgttgagaaaatcgccttgatttcctttgtagattcctcttgaccatgtctcttaatatgctgtatactgcatttatagctcatatcatacatgttgaggttatgaatgtgtattgtgcattactgattattttgaaaggagcatcactttttttactaatatctgtttacaccaatgactagtatatttatcgcacttccaattttgcagccacttactttatatcattgcgttcaactatcgcacctccaaacctcaaaatatgatggccaagacactctatgtattcactatttaggtaaagtatattgtgcaactctcttctctgttgaagtacttatatacatatgtaggaatccttttctagtcagtcggtcatttgctgccatcatggttttgggctgaactatttttcgagttttaagattattattatatgccacaactattgagggcaattaactttctggcaaaattcttgtaagtgttatgtcacttgaacgcgcatttcacacaaagtaaagccgcttgtttgtgcccactgaatactactggacacaagccagttcttggatttgctcgatgcaattgtgtctaattgcctatacatagttttggctggcacaatgctcagggtcattatcagtaaatgtatgagcacagatatcaatcattgactagtaaacagtctggtgtgcactgtgcagttcaggacactagtcttgtctatctgcactcatgtatttgttgttagaatgcttcctgttgagcttccttagtctgttattatggagatcacatgaagcattgatagctctaggtactgtcacatgagaggttttgtcttccattgttatagaacaa

SEQ ID NO: 18376 - DNA, 14509 bp, Oryza sativa
agagctgcttttgtaaatcttccattggctccaaagatttaagttgcagtgcagtgacattcaaactacgaaaagggctgtatcatgagagatatagtgatattgtgaaggttctatgcacagtaactctttacttatttataatgtgaagctacccatcatatgtgtatcaagcctttttttatttgaatgtgaagtgttttttataatgtgaaactataaactttcctacttgctacatgcaatctgtcattttgtaatacccaattccgtgtgacaagggtatttgcgtgtattccctctcacaaatccaactaactaggtttagagctactaggcttcttaatattacttgatcatgtcatttgtagcttgaatttcttaatcttctgttcagtgttttcggaaatacttactggaatgttagttgttatgtactagaagtttcattgatgccatatatgatgcactaaatcacaaagagaaattggcatttaattctattggcatgtgtattgtggtcagggaatactagaagctttgacttttgtactgaatatatataattagcccaccaagccaattcatttgggaattaatgatcgagttattttcattcaggattgactttctctgctaatactttgtttcttggtaggattcaaagcctcatctcattgttgccccaaatgctggtatagctgcatatcctagttggattccaactattgtaagtataaatgttcttgattagcaacctcctcccattttggatatgagcatgattggctatgaatttccttgtgatactaccactcttaacttcacaaagttgacattgttccagctagtttcatgctaaagcatacatctggaacttaaagtgtattcttcacaaatcgcaaatcatccctttatctcagttgatgatattcaagtaaaaatcgatgcgtttaattggtcatcttttcttctctaacccagacaattttcaacagacatgttatctatggaagaaagtgttagcattatattgtcctcatgtgaacttaaattaaaaatacaccacactatgacagctttaactgatgattgccagtataacacagtatactctatgtcttagcttgtaacagacttccattttttgtgctcattctattcaattttcatttgaaggaaataattaggaaagttgggattcctgcaattttcacggacttctgtgaagaagctgcacatctagcttcgtcctgcattacctccataactggtcaacccctcagagtcccagtatgtgttctgtttttccatcgtttcctttctgattgtagttatggagtatcaaactaataccatcatcatctatcatctcctctctcagattcaggtaaatcctttcaggcaaccggttgcagtggataatagtgcactatgcttaccatgctactccaactgctttgtttttgggatgcagaattgcaagtttgtatcaccatgaaatgttcagagattcaactcttaacaaataatatcactaactttttcaaagaaggcaaggataccatgaaatattttcatggacgaaattgccacctgtttttattatttagtctttcagaatagatgccttggttacttgtaagaatgtaagatgcactcatcagctcatgcttgtaaatacagttgtcgtataattgtagacctgtagtaacttgtaagatactacatatataataccctaaagttgcagaaagacttgctagtaggtagtagcaatcccatgctggacatggtgaaatatggatcagttatcaacagcttttgtgccaaggtactaatgaggtagtgccgaagaagcttgttggagacaaactttctgcaatagtaccattcatatggtgagttttctgcttttcatctaattcagtacctttagttatctaaatgtccctatcactgcatttcattttaaaactgacgctttcaaatttcttgtggatgagaagtttagatctaactttgattcataaatagaatgaccagcgttaacattttttttgtctatgagaatcatttcttgctattcttgttccaaattttggaaatattcccaatataaagtaaggttcttatggttttaatgataaaacggttaagttttttggtctcatcttgcaaacttttcttctcatccacataaaatctgcatatatgatgaagcagtcataaatccaattacacacactgcctcatataaaaaaactagcattgcacacgccactgcagtgaacacactgttgcatatccaaaactaaaattccacacgccactgcagtgaagtaaggagtccaatcacagagaatcctatattacaaaaggataaactcattttctatgttagttcatcatgttcagtactgttgaggagaaagcttgctgaactcctgcttctgcattctgatgttatgccctttcctggcattcccatctgcaatgagaacatcatctatccatgagacaatattgtaggctaaactttccagcaccctcgagtagctttcaagtattgcctgcccaatgtcctgtagcaaagtaaaatggagacacgccagcattagcaatgatgaacattctttgatccaaaggagatggctcaatcagttatttcgtatatgtttgtatgtttataccatgtatgatagttctaaatattttgtattagcattcagtatacttctgtctcttaaattgtagaataaacacacagtacacttttatgtttttgcttccaacattaatcatatctggtgtaaggaaaatacagatgaactctgagataatctgaaatttgggtatttcttatgtataagcattaccttgttgtactgaatcttgcttgtgtccagggtagtctgtgacaagcctggaaacctctgcttcaagcacaacaacaaactcctagccctacttgcaaggatcagattcttgtccccatcagcattcagctcagtaacattttcccattttgacaccacatgggtcatgcttgcttttctccgccatacgtacatcgcagcctcaacacggtctgcaatctcaagtgcctcatgttctgagctcaagttgaggaagttgaggaggtggtctggtgagaactgatcccctgcagacatgtaccggtatatggcatcacccacgccaaccttcccactctgttgagtagcagaaatgcatttatcagggggaaatgataatttcagtaatcaggaccatagaaagacccagatcaagcagtttctctgtacctttggcagtgtttctatgtatgacagtggaacctgcatttcagagaggatgccgctgttgatctccatggccatcttgtggatttggcttgcttggtccctcttttgttgcagctcacggtgcatccgatcagacaggcctgactctgggacacatggttcagggagccaccacttgtcctcgctgcgctgaaacttcatgctgtcactgaaggactgctttctctgatctatgtaccagaaatctgtcttctcaaagctatccaatatttcctgcaaaaatggtgtgcaattattggtcatacattgtactacaaaagttgttcgaaaggagccttccggaattccgcaaatcgggactttaccaggagcatagtttccagtttttcaagtgctggaaggttcattagtatgtctgatcttggtgaggttgccatcacctgtagaaaacagaaatttgtgcctaagtagacatgccatgaagatgaaacttatcagagtgtgagacgtgatattcttgcaatggaattacatcatgagtgcttccatctggcatggcctggacttttggtgagaattcaacaatgtattcgcagatggagaggaggcagtccatctccctgttccacatcgccttcttctcaggaggcagtggctgcaacctgtggcaggttccaaacacagttgctgcagccaagaacaagcacagaggtcaacccactgttgcctgcatcaaagaccaacttaacagaagattcatctgcaattctcagaactaccatatagattggtgatggcattggagatggccacagccgtgcagacacccttcccactcccagacatgtcctctccaagaagcagcttggtgtacttctccttcatcagctccatctctgaacaacacccatcaatcaaccaccagaaacaccagaggacactaccagaaatcaaaacaggttggcatatctataccttcatcctccagggacttctcgttcacaacttgctgcagcttcttcatgctgagcttgctcaccgatggcgagaggcgtggtgccgtggacgtcgtgcggctcatgcttctccctcgtggcggcgatggcgtatagtgctcctgctcctcgccaccgccattgtcggagaacgacgacacacggaacagcggtcgcgcgtagtcgcgatcgtagccgtgtttgtggaagccagggaagcctgaacctccactcatggttgcagctgttcttgctgcctgcttctgaagacctgcaagaaagacgatgaatgggaatggcacaagaatggaggcatgccaagaacagagaggataggtacctggtgttattgacttgctttcccttttttggtgatcatgtcatggctgtcacttacaagtgtatggaacaataataaaggcataggggctatctttccttgacatgggctgttgcaatcaatatggtttgcaattatgcaggcatgtgagcgatttgcccccacagtgtaggacaataaggttggattggttggatgtcttgcaggtttggtgaatgtgttaactgtcaggaaggtacaaaattttggcacttggtgctgtcacattgtacccagattttgactcacattttcggtgaccatctatttcttcaatttaagtaattgcctctcaaattgtctggtggatttggaatgtatttattgcctccatttatttggaaatgcatggttgtttttcaccgaaagagagtatgcagtgtattcatgtaattacttcacaaaaagacagagtagcctatgaatggttgggacttgggagttgaaacgaatggtgaacatctttaatttctaacccatacctaagctacatttatttatttttacttcagtttccttgcataaatgacattgtcctctattccagctcatggaggctgtgtcggcatgtgaaccacgctacacatatggtaatgttttttccacatttgatctgccaatgtatcgtagagagatgttattgtcctggattcctcctggttataagcagggttcagacaagacaaccagcacaaaccgttttccaaaaaagagattataaatccaaagtacgtagtactactctatgcaaatattagatgtagaatacccataaatatcagagaaaaattcaggcatcttctaccctaaagtctctatgaaaaaaaaaactctttttgtctgaaaaaccagcggaaaatttgctctgaaccggttcttggatctgaatcagcaagttttttttttcactcctctgtttttgtaaccaaagcctataggtcatataaatatgatcctgtgggcaaacaatcttcccaaatacgttctgggaccaaagggatgatgcttctcaaacatgcaatccataaaccggtccatttgattcagaagacttctaagcaaagccacatctatctatgaaacttagtgcttgccatgatcgtctatcatgatgtattttaaatgctacctaggcaaacataatggctgtcacgtagtaggatatataagaacagctcaatctctggaccccgaatataaaatagggaaggagtggaagcccaatctgaagaaactaactaaaatcccttacaatcttggaagacacatgaaaagtaggaaaaatctctcacgaactcattagaaagaaggaaaaatctctcacaagcacatttgaattctacacgtacgagtacaatatatcaagggatgatatgatctatttgtaagagattttggctttgagagccagttattattattttttttgggttctcacaggtattacaaggtgatattgtctggtggcaataatcaagaggcatagttctatgtctgttttttaatatatggcgtcattgtttttttatcatttattttatttaaaagttgtgtgcaaatataaaaaatttaagtaatgcttaataagacgaacgaccaaacgtttatcaacgacgtcatatatattaaaaaaaatagagggagtactaagaaagatagatcgtacaggaatagcaaaattaaggagcctaaaaactgaaatcgctaattcgcgatccgtcagattattatttttttttgccagcacgaattgggccggattttctattttgcgtgtttaacgattgggttttctcttttttccccctttttaagtccatgtccattttcttttgggcttttgaccttttctcatttcaggtttctagggtaggtaggctgaattcaaatgttgggctaggcatgccggcctcacagcccacgtaccttttgtttttcttttcaaattttcttgtgaattcgtatcaaatttatacgtacgtgtacaaagtttatattttttacgtatactaaaaagtttgtaagagattttggctttggagccagtctattatttaatggttctcacagggtattaccaggtgattttgtctggtagcaataatcaagaggtataattaatatgaaggtaatgaatcgtacacgaacagaaaaattaaggagcccagaaactactactgcctccgtcccaaaatataacaacttttagtccttataatttgtcccaaaatataataacttctccactaacattctcttcccaaccaatcacaaccctccaccattcacttttcccacctacctccactactcatccaatcacaactctccaccactcacttctacctactttcttaataaccgtgtccaactctaaaacttcttatattctgggacggagggagtatctattttcgatgctgaactcgactgattatgtacatataccgtagcaatcgttcaaccatcggtcacacttgtgcaattttaccaaagggcttaggcgttcacttgtttcggacttatcgaaacatcacaatagtttgtcaaactcgattcatatgtaccgagatatttcactctaatattttgttacaaattactcttatattttgtgacaaattacatgatcatcacagcagttctcattgggattacctaatttgaattgctccaaattttgacgtactagcattacaatgtccaacagcccaacacatcccattgggtatgtgcatcctgactaacatcatactccactccatttcctccaatagctagcacatcatttgaatgcttaaaccatgcatggtatgcctcaactcagcctcagttattgcagagaggcagtgcccgcttattgcgggctaagccctggtgactatgcggtggaagggttgtaagttcgcagcgttggtggtggtggtggtggtggtcagcagcggtgccaagaggggtaggggaggtggtgctggtagagcaggtcaacgataatggcttggaggcgacggcttgctgacaagataggctatgatggtagctcaacagagtcttccagcgacgacgcctatggcggcaatgactcttcggcaagataagctatgacagtttgacagttgttgtggtttaaaatgacaacgacgtgttaatggcagtcttctggtgatataagctttagcagctcgacggagtggtgatagataaccacttttggcgagataagctttagcagcgatggaatatgtggagtagattggtcaagaggcgtgagttttttcttggcaactgcaaggtagttggcagactactattatccccttcctttgctcaatggcggatcaaaggaacttttgtagttgatgcaacgatagtgagatggtgtggcaatagtaatgcaggctagccccgcatctccttatagttctaagtgaggaagaaaagtttagggttagtcttctagtttttgtttccggttgttcgttggtttatgtttatcggttatgaaatttagaatgtcagcactcgtgtaatctttggctgttttatatccatttatggaaaatagaggccggatttctatccattatctaaaaaaactcagcctctacttcattgagagcctcacttccccagttaacctcaagcatgcagatgcaagtggtgcaacttaatccccttattttgcccatccttcatcaacaatccgcattgagaatttcgaagaactagtcctctatgaaaagggatgcaaattgtggtaccaaactcctaatctaaggacacatggttcatcaaaattataggcaacacaatttttttaattgtccatcatgacatccttcttccattattattccattatatgataataaaactttttatggtgtttggtagctacttagatattcagaaatgaaacaatgtaaaccattcattaagatatgataaggtacgaaataaagctattctagttttatctcattattcattgtcgaggtacctatttaggttacgacaaatgacatacgattagattttacacatcgaacaatagattcactctcactttgttaacgggcctccgggccggaagtttcaaaaaagaaaaaccaatcccaccaaatcaaaatttaaattttttcaattcataataatcccattaataacaagggtggtggtagataaaagatcccacccattttcattttcatgaaagaattaattcctccaattaacatccctcccaatacatacaaccactccaccagtccatcatcagtactagtactaaacttggaaaaaaaaacaagaaaaaggtgagcaaaacatttttctaaacagaaagcaaccaaccgcagtccacagcacacgtgggactctgaacaacttctcctctcttctcttctcttctcttctcttctcttctcttccatgccaaaattggattttttattttggtctgcctctttctttcccccaccttgacctgtagttgccgccggccggtcatcctccctgagctcaccttaatcttgcctgacctccaagaaaagtagctaaacgctgctagctaccgtggcctccctctctctcgcttcgcttcccctgaggcttcacctactcgtcgtcgtctccgatgccttcgtcctccccaccgctccgaggtagtcctactaacaaaggccgtacctttgccttcccctcttcagtcttctttcttccccgtggaggcttcccttgctttgtgagttcttgtttcgatctcttgccctggaagtgaagtttttgattgggtagtttgtgggtggttattgagagagagagagagagagagagagagagagaggcgtagagcagttgcggcaaaatcggtggtgttttggtagagaggttcttgattttggattatgcggttgcggcggttggaggatggatccctagcttaatcgatgaatttcttgggggccgggaattcgatcttttattatccctgaaatttctgtgtagtgtttcttgttttcagatatatttttcagtactctctttcttggtttttgaggtaggtagtccgccgtcaattcttatcatggaattcctcggtagaaacacccaaattccaatttgttttgtgatcgaatttaacagcaatctcaattaattgttagaatactgaacccggttaaactcttcttggaacctccctgaataacccaacattttgtttttttgcaggccttccactgttcagtgtctcacctctgaactctgaagctccactaatgtgatgtcaatcgcatgctgcttgccggttgtcgagtgcgtctactgcctggcgtgcgcacggtgggcgtgccagcactgcttccacaccggaggctatgacagcgagacctggggccttgcctcgccgaatgagtttgagccggtgccgcggctatgccgattgattctcacggtgtatgaggatgaccttgagcacccgcagtgggcgcctcctgggggatatggcattgagccacggtgggtggtgcaccggaagacatatgagcacactggtggacatgccccgacatacttgttgtatgttgatcaccaccattcggatgtcgtgctcgctgtccgtgggatgaacatggcgaaggagagcgactacgccgtgctgttggacaattcgctcggccagaggaggttcgacggcggctatgtgcacaatgggttgctcaaggctgctgagtggttgtttgatgctgagtgtgatgtgctaagggaccttctggagaggaatcctggttacacgctcactttcgcaggccattctcttggttctggtgtcgtggcgatgcttgcgctggtagctgtgcacaatagagaccggctgggtggtgttgagaggaagagggtacggtgctttgccatggcacctgccaggtgcatgtcactcaatttggcagtccgttatgcagatgtcattaactcagttattctccaggtgagattaattccatcattttttttagataatggaatagaatcccagcctttgctcaatgagctacagccaattattacatcaattcatagaaataaaaacgcatggcaaaaaagtcataaaaacataggcctaaaaggacaggaacacactcagtactaaaaaccaacgcaagaaaagatcacaattaattccatcattagatgttgccaacatgtgtttatatacctcttttccaattgtaaattatgtacctcatttgcatgtgattgtgcatgaaatttcataggtaaatttctttcggaagtaaaactgtaggaaacactttaccattcccacctgctttcataatttgtttgatcaacaagttcaactgaaatctgttttctgattcatattttattagaacaggatgattttctgcctcgcacagacactcctttggaggatgtattcaagtcacttgtctggtaatggaactttttcttatgtgtagtgaacacttgaactcgtatttgtagagatttatgatcttcttagtctatcttttcagggtacctgatgtagtcctttgtatacagcttgccatgccttttatgtggaaggtgccttatagacacgtgtatacctgaaagtgcgatgttgagagatccaagacgtctctatgcaccaggccgcctttatcacattgttgaaaggaaaccattcaggtacgacttccagtcagttctaaccatacaagtaattttattatctgttaacacaagaataactatgcaaatatattcagtatatgcttatattcatcttcataataacaatataatatactaactgcaatacacaactaaatgctcagggaaaatattctttcagtttttactttttctaattttgatacctcaagtttagaataaatattccattgaacgcttgctggtagctgcagatgtggaagatatccccctgttgtaagaacagctgttccggtggatggcagatttgagcacattgtgtatcttgcaacatgatttctgatcatgctattatctggatcgaaagagaagctcaaaggggactagatgtaagtctgaatttgttgttctcttcttgagtattctaccatgacaaacagataattgtttctggcgtgtagaaaaatggtaactaattctagttctcttatatccatactgcaacctatggatcgtcattatttatttcacagacgatggagcttaaaagtattagaaacaaactaggaatatagcccgcgcacatgcgcgggcatcttatgagatgttgttttaaattgtgttaagaatgttttatgtgtgggtgacttttcttaaaatttttctttgacactattgtaaacgtgtttttgtcactaatttgtttgggattgcgttgaatgttggttattattttcttatatttatccttggaagtttaaattctaaattaaaattaattggaactacgccgttttgaaactatgagaaaatatggtgtcataataatggagctggttcttataaaactatgatttgcactatgtgtatttactttttaatatttagcatatcttatcttttttatgtttctatgctttaagtaacaaaattgcttttataccatatatgtatttatgaatttttggatatattaagtgaatatattttctattaaaaaatatggttaataggaatgtttcatctaattaaaaaaacttctattaatttgcttctattctcttctcttttttttcatacgttttcttattttctttgaaaaataaaattgatttgaaagaatagcacaatcatataaatttaattagtatgtgtaaagcgtttataaatatttaagtgccatgggctaaattgcacttttgttggatcaattctttttatcaagtatgttctactgcatgcattctcatatataagtttagtatgatttcccctaataaaccaatcttagtatgaagttcccatataccatgcgtacttaatagaaagcaaagagagaaaacatgacttgtagtttgtctattattttattattatttagaggattaatatagtctctaaaatgtagaacaatggtagtggtaaatatgattgatacattaggttatcccggtatatacggatcaatagtatggaccctatatataagcatatttaaacgatgatataatctatatcattatttttttcatgatttgtcaaatctccaatgccatgcaaagtaccaagatttgtgaactgataaccgatatatagtgatataatttatattgtcatctattttccataattttcatatctgtttgcattggattacatgaaaagaataaaaatactatctaaaatataatttcctttcacaagttgaaatatagtaaatatacataataaattattaatttaatggtaaataatataattatgtaaactttgttttaaaatgcggtaaagctaatcgagttatgcttgtttgtaaagtgatttaaataatttgttaaatccgatagatgttttgtgtttttcttagactttctaggattttctctaatttattagacttttattatatgattgaggctctttggatggcacacaaaagcaaagtataggtccgcatgtctgttttcaaaatatacatggtttttcattgttgttattttggccatgcatatttataaagttctatacttaataatctacacggtaaattttgttttgtatacttttatgagtaattggatggtgtaaaaaagagcaataatctaagtcaacatgttagtctttttcacaacatatacgggtcttaaaattgttggtttaattgccaggaatacaacttttgaattagcctttttaatataataatccaatgatagggtttgtcggccgaacgtaatcttttttgacacgcaacacgtaaatacgaactacgtattagagatcggatgagtgattagccggattgatctatatacatgggaaaagaaaaaaaagaaggtaaaatacgtacgtacgttcatccttttttttttatctctacgtacgttcatactgaacggaaggaatagtgagatatgtaagggaggaggaggttggtgggtcatcggtttgttttaagagatctaatctaacggtttataatattggacccaccgatttaagtgaaaatcgatggatagatgttttgttttttcctcagtttttctatgattttctctaatttattagagcgccaagtggtggcttgagagcgttttgaggaagtttaatggacttttagtatatatttaaactaaatatatgatattttgcgggcatgcgttgtatggtaggtttgagacacttataaaagcgaaatattaaccggagaatatctgccatgatttctttataaattgttttcatcggcattaattgcttttataattttctaatctgttacctttatattatattatatttaagtaataaatgagtcagtcctgtctcgtttattcgatgataataataatactaatataaatactaatctgtgaaaacaatttggagatacaaaatcaccttacagtaaaaacaaatactaataattaaaccacaaaaaattgcaactacacatatatctgaaattccgacacaacacggctgattgatcaccctgtcactacccaaccccagaaatcaaatttggaactactaacatgaggattattgtgtaatctatttcttgaatgatcgatcactgaggtcgatttcaggaggtggcgttgaagctgaggagcttcgacgtcttggactcgatccgg

SEQ ID NO: 18377 - DNA, 4584 bp, Oryza sativa
attatacttcctgatgataacctcctgtgctcaagccctcaactgtaacatttccaagaatgaacagatgaaatattagcatctccatgttttcttttgatttctttaaacattttaccctttcgatcgcactaactataaatgcaatcttactatcaacagtttctccactggtttacgataccaccaaacctttatgggatgcgatacaagactttaaaaaccagtatcaacagtctgaatatgaaaatggatggcattttacagaagggctctgaattaggtcttctaccaatcgatcaggagatcctgaatgaaaggtctgaaatctctttggaagtgatacctgatgattacattgtgggtgacattgaaaatgaagcaaacaaattgattgatatattgacagacaggaaaagtgcgaagacacttgttgccatagttggtggtagtggaacaggcaaaactacactggcatggaagatacatgatgatcatcgcacaagaaatgcttttggtatgatcgtgtgggttagtgttttcaatgactttgatgatattggattgttgtctgcaattgtaactgctgctggcggaaatcctaaagaagcaaaaaacaggacgcagcttgagttaatgctggcttccatgcttaaaggaaagagattcttgctggtgcttgatgatgtgcggggtcatcaaattgaagaaaattccctagaagctcattggcatgtttgtggtcatggaagtagaattttgatcactactcgagatgagaatgttgcaacaaaactaaatgcttcttacatccaccaggtaaaggaattgagttttcagaactgttggtccctgctttgctgtaatgcatgccttgatgagaaccttcatggaaacactttaaggaatatagggataatgattatccaaaagtgtaagaagattccaatggctgttaagattatcggcgctgttctaagaagaaaggagcaaacccaagaatcctggcagagagtttatgagtttgaaggatggtcttttgatgaccttcggggtgatgttcaaggcttaactggggccatatatttgggctaccatgatttgccgtctcatctgaaacaatgtcttctttatttatcactctttcctgaaggctctaccatcaggcagcagtttgttactcaactgtggatttcagaaggtttgattgatcgacaagatgactgtagtgctgaaaagatcgcagaggagtattatgaggagttgatatcaagaaattttctgcagctggagactggaaatcgcgatataactaggtgcacaatgcatgatcaaattagatcctttttgcagttctttgttaaagataaaatttgctctggtgaagtgaaacctggcaccaatggaacttctagtgaaggactgagacatgtgtggattagcggcaccagtacaacaactaacctcgaagaaactgtgaccagcttgaagacagttattctctacaagaacccattgagaaatcaagggttagacaagctatttaaggggctcaaatatttgcatgtgctggaccttggtggtactgaaattaggtacatcccaaggacactggaatttcttgttcaccttaggctcctaaatctttcattaacccgaattacagaacttccagagtccattagttatctcagaaatctacaattcttgggtctccggtactgcaattggctacacacccttccgaagggaattggcaacttgcatagattacaaactctcgatcttcgagggactagtttgcatcaagtcctgccaagtttggtaaatctgaagcagctctctacgctgcacggtttcacagtaaatcgaacacccatacctgaggatgatccgagtgggtggcctcttgaaaacctaaaagatttgaatgcattgaaagcctgcagatactgaagatggaaaaagtatcagacttttcaagggtgaaagaagcaatgctagagatgaaatctcaacttaaggaccttgaaatatgttgtagcaatgatgatagactggctgaagcacgagaggatgattctaggacgctgaaacagatatttgattcactttctcctccacagtgtctgaaatctctcaaaatagtgagctattatgcaagacactttcccaattggcttccttgcctcacaaatctccagcggcttgttcttagtgattgcaaattctgtgagcatatgcctgacctgtccaagctaaatcaactgaagttccttaccataactggatgctctaagttgcttacagtggagcaagagtccacaggtgtcacacaggcatttcccaagttggagcagttgcacctcaaagatatgccaaagctagtatcatggataggatttgcatctggtgatatgccctcccttgtgaaattttgtctcgaaagttgtcccaagttgaagtgtctcccagaaggcctcaagtactccagagtcctaagaagtgtgcaaatacgacatgctgatagccttgaggtcattcaggacttacctgtgctaaaagaattgaatgtccaagcctgcaatgagctcaagatagtctcaaaccttccattactcgaagtgttaacaatccgcagatgccctagattggatgatgtcagtggtgttcactatctaagtcatgtctgcatcacagataaagaactgaggaaattaccagattggttgtcaatacatgcaccagtgcttcagacattcaatatagtcggcgtatcagaattgcttgatagattacttcccaatggtgaagactgggaaatcattcgtcaaattgacaaagtttatgctaacttacttgatgaatcaccattcttcacttacacaaagagctctggtgatttccatgtcgatcaaagaattggagaaataaacaaaccacctgttgtgttaggacatggaactgcagtcggaggcttgagcattcctgatcactctgttgagataagctctcaaattggtgtgtctagagtacctatgaaccgaatatccacactgaggtgggtcgtaaggagttaccttgttccgtaccttatcatggttatggttgttatgcaatttctttcgtattatctacacaacaggtcaactagggagatctggctggttcagacccttttcatcttcttcgcgacagtgtttttgcttctgcttgtatttctggactgatggttttctcctaccaaaattggagagatgagaccagtgaagaaacagagtttttttttctaccataattgggaaaatgagacagctggcccaagagacagatagttacaatgaacttcataatagtgggcataatcatgtatctcctacagttgggggtgtgctgcaattgattcatgcttgcttggtggaaggaaacaatgaaaacagtgcctcaacaacaaaaatcaagagaaatgttgcctcaaatattgaagttgtgatgtgagatttgttaataaaagggtgcaatatcttattgtcattcttaaatgagccaagaaaaacagattctgccagcctctcgcagttggtttgattagttgtatacttgtattgtattgttgtatgcacagtttaggttatagtgctctttcatatatagtttgtagtgtttgacttgccctttttcaaagagatcatagggggttgtgatgcctacagaaattgatttgttttgtttagggcacagaaattgatttgttgtatatttgtatacaaaaataagggtgaataaacaatttgttcctcccaagtttagctcagggatgaatttggtctcacatatttggacaaaatagagcattaagagtcaaattgactatggtgcaaaacttaggggggaataaattagccattctccctaaaaataaaacaaaaccatggagagcctggcaattaagttgtcatcttttgtcctgtgtactttctgttatatattcttcaatgttgaattcgattccgtcgataatcgtgaccaaatattgtatgacactggatattattacccgtcatcgtcacagtggttttcagattttatatgacgtccatatgcgtagttttaatagataaatcttcagtatttagcttgctgcctgtcaacagatattctctctattacctataaggctttatcatagtaagcaaaatacatgagcaaaactaaaactcttcatggagttttctgtaacattctttttcaagttgctcacacacctcaagtaaaactctgtaaattttagctcacagataactcaataatacaacaattaatgtgtcaaataggataaaggtgtagtgacaaaacataagattttacagtcatattttaaaccatttccatatggtggaattctttttcaccaatacattagcttagatttttataaaccgtgccaattcaagcaaaacattaatatttgaaagctgtaagtaaattgtgacaatcagtgcaagtttcagaagttaccatacagtagagcctgggaccatgagaacagaaacaatgaaggtacaaaacttgagctattatttt

SEQ ID NO: 18378 - DNA, 2519 bp, Oryza sativa
cttcattctctgggagaagaaggcctcttcctaacaattcatcataacatctttcagcttcttcttcaactgttgcagagtgcctctgtgttgagtttgtctgggtcacaatgaatccctccgcgatccactgctgggtgatgcactgccgctcgataacagatccctctgggtacaacgcacagtacagaaaacacctcttaaggtaatatggcagttccaggtagctcatgttaatagtgctccgtatccttgcagaaatgccacagaaatcgctcgagtagactcttccccattcatcctccttatgatccacatcccgtagatggcatccaatcctccttattgccattggaaggccattgcacttttgcacgattcgtcttcccatgtcctgcatgttgccagcaccctcatcaagaaaggcccttgtacgaagcaaccaccaaccatcatcctcattcagcatcttcacacggtgaagatggatagcccccatcctcctagcaacacgctcatcccgggttgtcacaaggactctactgccaggggcgccatgttgggcttgtatctctagccgcccatcccaaacattctctccccatacatcatcaatgaccagcaggaacctcttatcttgtaaatatgatagcaacagtgcttgttgttctgcaatttctgctttactgaacatcccatcagaccacattgttaagtgccgcaaatctttggagacgtgtacccatagcctggtctcaaacatggctgctgccttatggtatactttacgagcaagggtagtcttgcctactccaatagttcctatgatagcaaacaaaggacaagtagtattatagtctctggttagcagctgtatgagattatcggagtcattctcaacctctctgcctacgatatcaggctcaagatgtggagcaacatcaagatctaatctgatttgatcttctgccactggattcagatggagcagtgtactctctgatctaatgctctccagttcctgatttagttcatgtatatcatttgctataatgtagtcaacagcgacatctctgcagcacttaaaaagcgatgaaggattgcactcctgcacagagattgtaaatttaattcatggttgaataactagatagtgcaaaatatgaagataatatgaaaaatgtactacagaattttctccttgagactggaatcagcaagataagcacattaggctatttcctggtgaataacatataaatttatgcaatgcaaattaagataaggtactatctttactcgcggttcatatgccaattccagtgatcttggcctcttgacaggaaaaaggaaaagagcactaccagttctactgactaggactggtagatgtcatactgattaagaagtgatttcatactttcttttttatgtagtcttaatgctaatgattttatcattttaaaggaccaaaaacagtagttttatcccttaaagaaaaaacacagtagttctaccaaaaaaaaaagacgaatcaaataaaaatagcaaacctgaactaccagctaaggtctggtaatatttcaaataatctttctgtcatccaaactatcaacaacatgtggccacagaagcagatgttagcagtacacatatatgttaaggtatatttaggatatgcagcccaaattgcctttgattaaatattagttcgctaccacaggaactattggagtgttattaagtattagttgtagagaatgttggttacgatagagtgaatggttgtttttgctagacacatgtatattcagtacacagttcgtggtcttacatgtcttaataaccattcatagatttatagaaactaaaaaaaaagagtgtactgaatactgatactaatatctgttaaaatttcagcagaaataacacactagtttcctatatatctgcaataagaaactggactgagtctgaaatgtgtccaaaagtccatcatacatttgtggtgattgattggagcattcctagaaggaccgagacaagctgaataatgcccgttgcctccaaccccatctaaaagttgaggctatacacattatgttggcatatttgagtatccttagacaacagtgagccctcaaaggctcaaagctcacaatattcaaatacattgtatgcaagcatttttttttttggacaagcattggaaatggtcttcaatgaaattacaaatctaaataagctaaaaataattatcaacaaaagcagaaaggaaaataacaatttggagaaatatgttcccggggttaaaacaaaattgatgaagatttgagaaatataacctgtggttggaacatttggagcctctcttgttcaatcctgcagcggtcaattatgttttctgcctcataagctattcctctcaactgcttcaaccaatcccttgtggtttcatactgcacaactgtctgctcagcatccctgatgatagccgacatggtctcaagcttcctctt

SEQ ID NO: 18379 - DNA, 7845 bp, Oryza sativa
tcaccaacgagaacaagtagctcaagggacaaaaaaggacaaccacaaccaacaaatcaaatcaaatcaccataccagcgccgcactcgaggagcgtcacaccggttgagcttttcgccacgggttgtgaattacttgtggagcaagagaggagaggtgcatggcgatggccggccaggttgtcaccgtcatcgtgtggtgcgattgcaatgtggatagcagcaccctggctagggacgacgtctatggcatgaacgataagcatcctgtcgggtcgacgagttcctagacccaagcttgcctgacggagcgaacgacgggacacgctccttgacaggttccatgagcgcactaatcctagtgctatgccgctacgctccgccgccactctcgtccgccatccgctccgtccacagccagccacctctcagctacctccgctccgccgccgcgctcgcccgccgtccgctctgcccgcaacccgccgccgttctgctaccgtgctcgcccaccgctgcacttgccccgccgctggcccaaagaagggaagagagaagagaagaaaaaagatgtgcggttgacatatgggccccacgtactttttttaatttttttttctaactaggatgccacgtcagcgaaaccacccatatatattgccatagaaccttgtgtgcacggtttgtgcaattctagaggtacacattttttgttttgtggttaagggatcttaaaaaaatctcgctattaagttgagggacctccggtgaacttattccgaagggctttgaattagcaacgctcctacatagtgaattttttttatttttaattttttttattaaaagttttacaaaaataattttccattttgaaaattgacggaagtagtcgcctaccgccctctgggaaggcgatttttaaaaatcgccctcccagagggcggcgaaaatgacgtggcagacggccgttcgctctcgggcgacggccgtcaacgaaatttgcaggcggcccccttgccgccctccgcgagggcgattttgtactgtgcggggggccgcctgcaaatgggcggcgagggggggcatggaattttgcaggcggcccccttgccgccctccgcgagggcgattttctactgtgcggggggccgcctgcaaatgggcggcgagggggcatggaattttgcaggcggcccccttgccgccctccgcaagggcgattttgtactgtgctctatatttttgtataaatatcaatagttatcaaatctttttatattgaaaactatacaagattaaaatctccaagactggtaaaatacaattttattattttttagggcatatttggattgttaccgtacaaatattttgttaccgtacaaatattttattaatttttagggcatatttggattgttagtgccaaatttttcttcacgaccaaatatttggtaaggtaaaattgcatttgatcatatttggtttgctgccaaaatgtaaaattgtagtgaagaatgttctacataatctcaaatctagattacgtattaccaatgaataggcttccattttcgtgtgttgtgtgctagtgggaaagaagatatgaagaggttgccttcagattgtcaattatatagcgtcgttttcactgcaatatatgtgaactcaatgagatacattattcattagatgtgacaagacgatcacgcgtgggcgtgattcactttatgtaaacaggcagcgccgaaagttgatagtgataactcgagctgccgcttttcatgtgtgctgttgtggactgtgcgcgctactggatctgacactaccgtgcagcgccgaaagtgtgttgtcgtgagcataagttgttctagcaccatatgaatgaaaagaactatgtagacgagacaaacacaagtagtactgcagtagtaatagcaaaagtagtactgctttacaagtttgtaagccaaaagaaacggtcacataaggactgaagaggtagaacactactgacgaggcctcttacccctgtccctcctaccctgcgccctaatgtgcccgtgggagtacgtgagtcggtccgggggtacggcacggccaacccgtcctgcctgtacaggtgtgacctctggctgctcctgagtgtgcgcctctggagctcctccaagctgagaggagcctagtacgtcgtggtggtctgcaccgtgcaagtcgtcgtcgtagaactggctagtaggaccagtcctaccggcgtgagacgaagaggccccagtaccgaagatcccggctgcaaatcctgctggacaaggaccatcagtttcgtacaggtatttaacagtattaataaaaagtaaagtaccgtgtgggcgagggatcgacgctccgtgagaggaagagctggcgaacgcacccgaagaggtggcgaacgcccctgcggagctcgtggaagcgccggtcgtgcctgcggccatggacggaccaattttcttgtatcgatccctaaagtacgcttgcgtgccgtgaaggatgaattcaacaatagcaaccaatggaagtacccgaactcctcgcattacccagttgtacacctctgccaaattggttgtcattatgccataccgagatccatcggtgtcgaacaatagagaccacttctccttaggctcattctcaatccactgagtgaaatttctgatggacgaccctgacctccttctcattgttggtgggtcatcatgtaatgcaccaagaggtatgggaggctcgtcaccttcaactagtggtctgcgagattgctcatctgtttgcttcgttgtcaactcatccaacttgtcccacaactcattaaatttcttctcttggttctgtgcatagagcctcttaaagagctccataagatgcttgttcttgaattgcttgtagaaatttgcacccatgtgacgcatgcaccaccgactccgaacatcaggccacttagctggaagtcccttctcatcccaaccgttctgcaagtagtcaatagcccgcaacatacccgcatgacgatcatgtataaggcaaacgttgggcctcatacgcaccactgcaatgtgcactctctctaggaaccagtaccagctttcagtgttctcactctctacaaatgcaaaagccataggtagaacctggttgttcccatcacacccaattgctgtcaatatctgacctcggtatttacctgtcataaaagttccatctatgcatagaacaggtcgacaatgcacaaaagcattgatgcaagcacccaatgagaaaaaggctctctgcagcacactctttgttcgatcatcaaccgatgtaaatgtatgtaggtcatagtacgtattattattcctctgggcaatggtggctaacaaacgaggcaaattatcataagaagcttcaatgtgccatacctcatctcaatgatcttttgtttggctctccaggcctttgcatagcttatggtgtacttgaatttgttctcgatgtgcctaataattgattttggttcaaagccaatgttaccaacaacactgctgtacatctcacttgccacaaaagctgaagtgatgtttcggtgatacttctccaccccttgtaagtagcacttgtgctcggtcacaatgctaactttccaataatcattccatttacccttatatgcatggacacgccacggacaatcttccttcatgcacctcacttcatacacataatttgttgacttgaccaccctaaactctctctgcaaggaaactgcccaatgcttcaccgcctccttcatctcatccttatgagcatatcttgcaccctcaattacctcgttctccttatactcccagggtacatgatcaccatctgatataacaagtccagagaagtcctcatttgcccaatcagtggccattacatcaccttcctcatcggatgatgcgtcgtcgtccacttcctcattatccgaatcttccctctccatttcatcaacaattataccgactctctccccctcatccgccatgcccatagcctgctcctcccttggttgattttcctcattttgcatcgatggtccaacaacatcccctgcattgataggaccctctacatcttcggtttgcattgaaacatttatatctttctcttgtaccgatacaaatataacgaggggccatgaccgttcaaaagccatttccacataccgtctccaagcatcagtgctgtccatcggcattagttcccaaaaataaccttctgttgcacgactcactacaactgacactgacattgtgtagacttcttggtctattctaaatcctctcaacaaccaactataaattgactgaaatgttctctccgcaggcctatcgatgcccttagatgtcattacaaaatctgacagatcaacaccatctggaccaaatctaatatttccttcaccgtgaactatctgaaatgtgaccttacttgacattgtgcctgatgaaaacaataactgcgttaacctcgcatttctgtactacgccctaagttacattctctacaatattgttctctaaatttctaaaattacattacattctccagatcaaactaaactacatcttacaattaacactactgtctatgtctcaattcatactattatattctatgctctggatcttcacatatgtgctgtgtgctacagatgtgctaaaatatatggaactaaaactaaaacgcaacatatatactcaaacataacatattagtacaaatgcaaaagatgtatgggagcatacctgtgatgaattgagcgaaccagcagggcttcgccgctccccttctgctgccctcccctctctctcttttgttttttttggatttttagtgaatataatgaaatttcacagaggagggactgggctttatagggggagaggcaaaaatcgccctcccccagggcggcaagggggccgcctgcaaaattccatgccccctcgccgcccatttgcaggcggccccccccacagtacaaaatcgccctagcggagggcggcaagggggccgcctgcaaaattccatgccccccctcgccgccaatttgcaggcggccccccgcacagtataaaatcgccctagcggagggcggcaagggggccgcctgcaaatttcgttgacggccgtcgcccgagagcgaacggccgtctgccacgtcattttcgccgccctctgagagggcgagggcggtaggcgactccttccgtcaattttcaaaatggaaaattatttttgtaaaacttttaatacaaaaaattataaataaaaaaaattccctacatagtttggttgtttggctgcgttggttttaagaatagcaaaccaaacaaaaaccaaccatggaacaaacggagaaattaaaaccgaagaaaaaaccaaacatagaaaaaactgctacttcggctcggttcggctcggtgtccggttttctatatttttttcccacccctacccccacccttaatccaagttactacctattctcagtcaacccaacacaaacactaaaataaagataaattcaatttccatttggatttaaattgaaggtccaactcaattcaatctaaacacaaatatagatatattcaaacgttggtctaggagcgatcgatctcatatagttgtgatgagtttggtgctaagacttccccctcagtggcttgtgtttgtatggtcggtgcatcattctcaactatgcgctccgatgcacggccaagcttgatggtcttttgtgtctccccccctcctcttaatactattagaatgctatgctgaaaaagaaaaaaaatagtactgctacacgtaaatactcatgtacaactaaatacatgtactcgtagatcaattaaagaagaacatctttacatacgtacgtgagttgtttagttagatcgtatgcataccattttccaaaaaaaaaattcgttgaaggccaagtccattgtgcaacgtgtgtcaaaaggtcaaaacgtttgtctgcgcctgctagtgcacttgcacttgcattgcagcaggtaggcaaaacgaagaccacccaaatcttccgttcccatttttcgtgtcccttccatcatcctttccccctctatattttcgaggcgggggctccaccgaccaaacgctgcgctcggtccaccacacacctccgcctgcacggatcacgaccgcgcggtgcacggcgtccacgccccgtggaccatgtccacggaggggaagaagaagccgacccaacctaacccaacccaacacattcttcctcctccgcgtttgctccaatctctttctctctcctcctcctccacctgaatctccctctctctcctccaagaacaggggcggcgaagcagctaagccggatttcgtggttggtggcctctccccttccaccaccaggctcgccccgccgctgccgcgaggtgcccggccgcctgtttcttctctccggtgcatttcgatctgattcccccgtccgatttcgtgtccgtcctgcttcacacccggatggttcgaatcgattcttaaggaggtgaggcgtttaatttgttgttgagctacgtgtaaatccccccctttacatatgcgtggagagattggagcgggcgtatggagcttcgctgagctcacggcttcttcgggataggcgggggaggagggggtgatggtgccatggttggcatgaagcttcgtttctcattttccatggtgttggaatgcagcttctcagcttgagcaatttgagggaaatattgtcaaacccagggagcgttttctcagagcagtgattataatttttcggtttattagcattctttttttaagtatacaacttcctattttcatgtaactatatattttcaaggattgttactgtttaatttgacatcacggctgcatggatccatttcctcctagatagttgcagcttcaactcaatctgcttacacgcctttcttgttagtgctataggtttatcgagaacctcataaatcagctgtattttgttcaggtaatgaccttcccccttatcaaatgtctcacctggaatacctaccagaacgttatggagctggataactatgatttctcaacaattggattattctaaagcgttagtggcgcctgttttcttgtaacggtgtgacctgttgcagattggttgctttagattaactttgtctgtggtgatgcaccatgcatctgattagtcaaaactagcatccagtaagcgatgccaaagtgattgaattggacatagcatggaagctttagagtgaatgtgttaattgataagtgtagtccctcctttcatttgttaaaagtctcatctgtttatttggacaaaaaaaaatctttggttgttataaaatggaatacttatgtgttgaaagatgaaagccattaagcatatgtcatgtcaagttgatctatatgtcaacaaacaatttttaatgtcaagttgagaggctctgtttttaacttgatcttaaggtgagttgtttagctacttgctgaaaacataattagtcgtgcattgtctgcccataccatatatagctgcaacaaggttatcttactgtgcaactgcacaaattacaatgactagtagttgttcattcctcagtattagtaactttatttaagtgaaagttttataatattctatcttttatttcagaaacaaatgaatcgtggcgaatgaagagtttagcgatgtgccttagttgaatggttccattgccaccctgtttggctgattttgttcagacgaactcatctt

SEQ ID NO: 18380 - DNA, 5769 bp, Oryza sativa
acgcaacccctacctggcgcgccaactgtcgaaactagatttcagcaataataaaagggggtggctatcaagctaggaaagtgtatgggtttgaagacaaaaggatttatacaggttcaggccttcttataaaagaagtaataccctactcctgtccggggatgaatccgccgagtgtgttattgattgtatgatttggagaaaatccaacctctgcccctagaggcacccggaccccccttatatatgggaaggagtccgtattacaaaagataatctatatccctaacggaataggaagatacagataaaacacagtcgtgaccgactaagtctcagggtgtttccttgatacacaagttaagaaacaaacccgagatacaaataagatattctatctacattaggtatcctgtacccagtccaaatactatcgccgtgtagatatgggatatccataatctccacaaggctattccccctaaagctcggattaattagtggttaggcctcgcctcctaataaactactgtatgttaagtatgcatgttatactgattaaaaataactttacccggctaactaattaaaatatactagaaccctctatacaacatacttcctccgtttctggacgccgttgactttataagtatatatttgaccgttcgtttattaaaaacttttatgaaatatttaaaactatatgtatacatataagtatatttaacagtaaatcaaatgataggaaaaaattaataattacttaaattttttaaataagacgaacaatcaaacatattaaaaggttatcggtgttaaatatttagaaacgaagggagtatataaacaaatttacatatactatagaaaacaatgtataaatcaattatcaccaaagtcaacccatatactgtaatctgccctctctgtcccccaaaattcttttgttgctgctccgtgtgctaattcataagaccagatgtttgtaccacatgtatcaaggtacgtatctgcgcagaacggtaactttggtacaaatgccaattcgccatcgcgagcaacaaggtcaacgtggacggtctcaggccactggtagaatcttggaaggaatatcatattctgcatccagttaaacttggtcttcttcatcatcgttgttagagacccggtgaacactgtctggctatgcaagctatctaccttctcccactccatgctttgctcgttaagcttgacgagatggaccttcttcccacgtcgttcaatcgctacaaccattaattcaccttggttggactcgagcaagtagctgtcttcacatttgaaaccgaagctattaggcttgtcaagaatcttaaatccttcatggtgcctgcaaggatcataaactgctaaccttccatcttgagctagaaggtatagcaagctgttatggagaactggattggtgcccggcgatgcctgaagttgcgaccagtcgggactgttctccgccaaattccagtcctcccactcgtcactgtttgttcggatggcactagcaacctcaattgtgaacatcgcctctataccaaatagcctctcatcacggtcggagacaacaaaattaaacagcgcataaggtttttgtggcaacacttcaacgaggacgccgctgacgaggtcgatatcaaacaccgaggatttatccacgcgcatcttgaggtgtcgtccggtggagcagcagattttcgcgccaggcaccttcagagtgtcgtcgacctcgaagttcttgtcgtagtaggggctatagtatcggatgttggcggtgccaacctcggcggtgttgagcaggagcggcgtgatccacgccgggtaaaagggacacagcgacgcggcgtagcgccagtgccggcacaccaacgcgacgatcgggtggctcgaccaccgcagactccccagaatcaggacgagcacgtccgccgggagagacgaccagccccgagcctgtgacgacgatgcggcggcggcctccatctagctcgatcgcttgctcgatctcgccggtttaaacccagtactgccggcctgatcaggagagacgacgtgcgtgagcgcggtgtgtcttcgtctgccaatggcgttttcttttttaaacattacagtgttatggagtatatcgtggtgtgccgcgcgcgcgcgggagcttatatatgtacgtagggcgtagtggagcgaaaataccaatcggtttacatgtggagttgcaatgcgatacgagttgtccggggaaaaattaacaaacctacacgtaaacgtacgtacatacgtgtgccgctggccggcacggtatagctctgctgcacgtacggtcggcaatttggaaaggtgattttccttagaaagggatcggattttttttaatagattagcaatagtgcacgtgcgttgcaacgggaaaaacactgtttgataatgtgacaccttgaaaacctcaaatctatattaacaaataggtagaaccgagtctaatttaatgaattagcataggatttaggatttagttttagattttatttttcgagcctacttaggagtttatccgacggagtttaatttaaaatatctgagccatattgtttgatcaaatatactttcggcccaggtcttcccaagccggcccaaacttgggctggcccatcttcggcgagccgagtcagttcgacggcccgcaagctgagcagctgaccgcagcacatatgcggggatggtctgatgcacttccgcggcccattgggcgcagcgtaatctgctgcggcggcggtgacccaacgctgggtaaatctgaaccgtccgatctaatatggacggctctgatcgtccccttgccggatgaagtgccgaccaggagagaggagcaaaaccctagctcccaaatccctctttctcgatcacatttctcttcggcgatgagcgagcggaacgacggcgaaggcggtccggcgagctggtgtgcgcgtgtggtgacgcccgtcgagcagctcctgcttcgccggctgggggacgcaaccgagggcggcacaaagccgtgccacggcgtcggtggtccggctaggcgggcgcgcaaacggcgatgagcgccgagcggcatggagctctcggcgggaggggcgacgccaagccgacgcttcccgtcttcggcaagggatggtggaggggtgctccaggacaacgcatgcacaaggaacccaatgtgactgcgaggaggtgaaggtgcggcggtgccacttcccggaaaactccggtgagctttgggacttcaagtgcggtaagtaacccgaacccttagcttaattgatttggatttttgactcttagggttcttacccgaaattaggtttcttcgaatttggggaattttgtcgggaaatttcaatctattttattccctcttttcgagttatgcgagtttcaatatcgtttatccacttttaattttgggaacttcaatctagtttatccctttgctcaatttattttttttttttttgctttggccggcgtttcatcacgcgggcggggacggagggcgccgctcggtcccgtcgaaaagattgagattaagataagatgatattttcacagacgacggaagtaaattcaatttaattttgggaacttcaatctagtttatccctttgctcaatttctttttttttaactttggccggcgtttcatcgcgcgggcggggacggagggcgccgctcggtcccctcgaaaagattgagattaagataagatgatattttcacagacgacggaagtaaattcaatcgtaagatactattttattcttttttgttttaatttttttaccctgttttggtttcgttattacggatgatggaagcgttttcaatatttaagcagtagagatagagatatataggctgtatttagatccaaaatttggatccaaacttccgtccttttccatcacatcaatctgtcatacacatacaacttttcagtctaatttcaaccaaaatccaaactttgcgctgaactaaacacaaccatagtacaatgtcacatataatagtattcgatttttttaccgcgtcacatataattccttttttttaattggacagaattcatttttttattttttttccgccctttttttaccctgtccacgaaatcggattctttttttttccctttttttcacctgatttttttcgcctgattcctttttatcggacagtcggttttttttttcgccttttttacacaggatcggattcatttttttccccggttttttctcactcgatttttttatgcctggtttttttattttttcgccctttttttaccgcgtccacggaatcagattctttatttttacccgattctttttttctatcggacagattcgattttttatttttttttttgtgttttttacacgggatcggatttatttttttcccggttttttctcacctgattttaatcgcacccggacgaaacggggagaagtgacgatctgaaaaatactaatcttttaattagttaagattaagataagaaaagaaaaggccagtgattttccttgtatttatatgggtagcgtttatgtgcaagctagacatttcgcatggatatataatttgtgttgattataacctgtcacactaatcaacgataaaaattaattgtatttaaaacttttatatttatgtgtttttagcgacgtaaaagctaatgttacaaatctctactacttaaaaaaaatttaaatgattttgtcgtccattctatcatggcaaaaaaaatcggacctgaagaaaaaagagcgaaattaaaataatcggtcctattcctaatcacaaaaggacaaaagatctaataaaaaagataaaaatatgtcccaccacaccttgcgcttgcttcgcttctcccccttccgatctcttttttgcccttattgttttaaaaaataaacaaacaatttaaattactaatcacaaaaagacagtgatctatctatctactactttacttaaaaaaagaagaggtgcttccatcgtccgtcaaaaaaaccgggtgaaaaaaaccggacaaacaaaaaccagtttgtccgataaaaaaaccggtaaagaaatttccttcgtccgtacagagaaaggaaaaatacgcgcgaataaaaaagtgcgtgcaaaaatagtttctgtccgattccaaaataaaaaaaattccaagcgaaaaaagagtttccatcttcctacaaaaggaaagaatagtgcgaaaaaaaaagtttctatccgaagggaaacacgcgcgaataaatacctaattaaaaataaatatctatctctaaaaaaccttctgtcgtaaaaaaagaaaaaaaagaccgactcccgtagagaaaaaaaaagtccgactcgtgaaaaagaggttttctcgtccgtaataaaaaaaaggaaaaatacatctaactcaaaatccgtaaaaagaaaaggaggaaaaaacgacccggccaaacttaaagtcgccttgttgtccgtatatatctctttaactctaatctaatctatcaatctaatctaactttttagagagagaagtttccatcatccgttaaaaaggaaaaaaatgcgcaagaaaaaaataatttccaaaaaaatgcgcgggaaaaatacggtttccttcgtctgaaaaaaacaaaaaaaatgctattaaaaactatcagaaagaaatacaccatttctaaaaaa

SEQ ID NO: 18381 - DNA, 1004 bp, Oryza sativa
caactcgttggctcccattctgtaaggcctcttgtggattggtgcagttccaggtaccaagtcaatccggaactcgatatccctttttggtggcattgttgtcagatcatccggaaaaacctctggatactctctgactatgggaatatcctccagcttcttagtggttttctccactgctacctcttgttcttcaccagcagcctggttcaaactaatccctggcttctgcggcactggagactggaagattaccacctctccttttgcattggtcaacttgatggtgcggctggcgcaatcaatcactcctctgtgccttgccaaccaatccattccaagtatgacatctaggtccttggattcgagaagaatgaggttggctggaaaaatcaacccttgaatttcaactgtcacagatgggcagtagtgagttgtggtcatgccacctccaggagtatgaacccgcattggtatcttaagcttcactaaagataacccatgtgcaccagcaaaacgcttggaaatgaaggaatgggttgcaccagaatcaaacaatattactgccggtgtcgagttgacggggaatgtgcccaatataacctctggtgctgactgcgcctcctctgcagatgcatgattaacacgggcctgaacgaacttgggtccggcacgtcttggcttcgggcactttccaaccgtgtgtccgggtttgttacaattgaagcagagttcgggtttttctcccaacctcttgggctgttctggcagagctggctgaactgattgggctggaatctttagtgaactcggagtagggttgaggctgtgctgctcactattgttgtgactgtcactatggtggttcttgttgaagttacccgggtggtagggacggtgctgccggataatcatggtggaaggtccaccgtgatgtcccatcgtgaaacgaggcttctgactcttcccctggggagtcctgaactgagctgccttcctcttac

SEQ ID NO: 18382 - DNA, 2689 bp, Oryza sativa
catcgctgccgaatctgctagtgggacatccccttcgatgctccactcgccccaatatgtcctcctctccttgttgcggcaccccccttcgctggcagcgacgatggcctcctcctccatcctcatcttctggtgttgggcgtaggagcaggcgatgattggagcgggtgctgcggtggcggacgcgatgatgacgagtgcggttgagggtggcggtagtaggccccaacgggccccaacatccccctcctagtgattttattttttgacgaatgttttaagagatttccttttgttgttttttcctctttttgattttccccttcctgtgtttgaatctgtgataaattgattagctatgtttttacttgtaaaaaatatgttgttttcggtcctatcctgacctgcatggctgcatgtcaaccaaactgtcaaaaacagatttttaaaaaaattgcaatgcacattaaaacatcatatatcaattagaaaacataaagagtcaaattatatgtagaatatttaaaaaacaaatgaagactctatttgtgacttagttccgaaataatattccatatggttctcgtaaattgcaattctcacatgtaaacatgtttggagatacgagaaaagaaaccaccatgagctctttttaccgtctcttataatctttcttattacaaataattatcgtttaattatggtcagctagctagtactaaaatcaacccatatactatagtctaccctctccaatccccaaaactctcttgcctcttcttcttgccgcccaattccatatgaccaaatattcatactagaggtgatcttctttatgctagacggtgagtacgactttggtacaaatgctgcttcaccatcacggacaataagatcaacatggacggtctcaggccactcatacaacctgggaaggaaaaccttgttttgcatcgatttgaacctagtcttcctcatcattgttgtgtatgttcccgtgaacagcgcacgtccttccaaggtctccaacttgtcccactccatcgtcgcctcattgagcttagcgacatggacaggtgcgccattgtagccgacgaggacagccatgagctcaccttggtccgactcgaagaggtggctgtcaacttcttggtggtcaataccaaagttgtcaggcttaccaagaagtctaaaattatcggcgtggttacatggatcatacaccgccagcttcccatctccaccaagaacgtacagcaagccatcgtggagcaccgggttgctgatcggcgccgccggaattagctgtgtccctgcttccacgttgaactcccgttcggtcccaaggcccccactcgccgtcgccatcttgcgtcgcgcaggtgagctgtagcgccagggtcgtgttgacgcagtacaccctccgtgagccatcgtcgtatacgatgaagtcgtaggagtaatggggcgtacacggcaactcgtaggcgacgctcgtcaggagatcgatttgggagatggagaaaggtgagaacaacgtgaggcgttgtccgttggagcagcagatcctggtggcatcattggacgacgacgccttctgcagcgtgttgccgatcacaacctcgaagtttgtgttatggtaggggctgtagtacctgatgttggttcggccgacggcagcagcgcagcggagtaggagcggggtgatccacgctggatagaagggtgacacggcggaggggatgccgccgaggtcgatgatgtggatgaacttgtttgtcctcgtcgtctcgaggacgaatcgttcacggcgatggcggcgaggtggagaagcgggcacaggttgaggaaaagctctggcgcgcgaggaaaagctctgtcctcaccaccccgctgcacgcctcgaaaaggccgaagaccgcgtgcccaacttgagctccgcgaaccttagttggtcacgccagaagccttgctggcaaggaatctcggacgtggcaagcctaagctgaacgccaactaggcgcattgtaaacgccctaataacagccaagatgcatatatgtattccatgggaaatagtttcaatatcccagtttccattcccatttgatgcgataataaatagcgttacatatctcatgcttgtcaaagagaaatttatttggccctggacggtaggaggaaaagtaacattatccttatccacatgatggtttggctactgacagtaaacagggcacatcggtccctgccatagataggttatgcaatcagcactattattattattttttttgaaaacgcacggcaggagctctacctattcaattcaggaaggaaagaaacatgtttatgtacatcccagcacccgctatgacgggtgaaaaaggtactaactccaccccgctatgtatgcgtgtttttcttcgtaccttccttgatactccctctgtattttaatttatgacgccgttgattttttatctaacgttttactattcatcttattcaaaaaatttatcaattatcatttattttattatgacttgattcatcatcaaatgttctttaagcacgatataaatattttcatattttcacaaaatttttgaataaaactaatggtcaaatgttggtcaaaaagtcaacgatgtcattcattaaaatacagagggagtatcaaggaagg

SEQ ID NO: 18383 - DNA, 3554 bp, Oryza sativa
cgcttgccatatccacggcaggcgacgactaaggcagctggtcgttatctctgctgtttgattttttatttttagaggcttgattggttggggttttacgccagcatatctgcttgatagctttgtaccatagcctgtgatgtaattgtaaaatcttggtttgtttattagtttagtatatgttcttttatatatgtcgccattctttctgattatttttgttatttgccatatgctgtacaaattgctcttaacggttgctgattgtaattgtggcttgcacaggctactgtttttacagtcgcccagcggtccacattgatgctagtaaagctttgcttctaccgcacagatggcaatgatagctgtagaaatgtttttttgggggacatttaaggcccctccaatgtacactacgatgtctcaaagataaccatatatatatatgtatgttcttgaattgcctcccaattaaacatttctcttacgacttaggcatcgttcgttcgggggagatcggggagattgagtctcgtttttcgcgcgcacgcttttcaaactattaaacggtgtattttttgcaaaatttttctatacaaaagttgtttaaaaaatcatattaatccattttttttaaaaaatagcaaatacttaattaatcacgtgctaatggactgctccgtttttcgtgttactgttccgggttggaaaccagcatatgcgaacccacccttagaggccattgaacactgaaccagggttagtattgttttctcgtaaaactataggttcttagaatctgtttatttcccaaacaaaaattttcaccctgtcacatcgaatgtttggacacatgcatggagtattaaatatagaaaaaaactaattatacagattgcctgtaaattgcgagacgaatattttaaacctaattgcaccatgatttgacaatgtgatgctacaataaatatttgctaatgacggattaattaggcttaataaattcgtctcgcagtttccaaacggaatctgtaatttgttttgtaatttgttttgttattagtctacgtttaatactttaaatgtgtgtccgtttatccgcatgctaaaagttttcgttcacgaactaaacagtcacagtccctagtccaaataacaaaaacacaccatgttttagaaacgtaattgacatatgggcacatgacatgtctgaattgctccaattaacttgggccacctaccatggatcagacgatggttaattacagacgcacggtagattgggcgctcgccgcgaggccgtcgctattggcctattgcctcatctagcttcctcgcacgcgtcgcatcccggccggcagccgtaagagcagtacaatagtaggctacaaaccagctgcagacatattttaaagagataaataaaaaaagagaagggcagcgggctacagatttgtagccagctgtagcacggactccaagacacagtgtgtgtatgacatgtgggaccatatattaatagtgtagtatataattattgtacgaatgagctattagattggctatagataaattggagctagtagttggctatactattgaacttgctctaagctgccgtgttttatcgcaaggcgcgcaggagctaatcaaaacattgttttcccatagctgtgatgaaaataaaagcaagaatttcactagctgagcgcatgccacaatggccgagcgctactaaccgggtaggctctccatctcgctcctattttctgtagcttcttgtcgccggtttcggcctttttttttttccaataaatttggcttctcattcttttgggcaaactatttgacaattgtaatttttaggtttggttattgggatgccggcatgttttagtgcacaatatccattttctctggatgggtttgaagtgaactgtacatcattcctcttgccactatattgtgctacctatacatggctggtaaaataaataaattgactcgtagggatttgttgatgtttcaagaataaaaggcgaactggcagattgaggcagcacctatagatttcactatttttcagttgaagttagggcctgtttagttcgcaaaagaaaaaattttagatgtcacatcggatgtttgaccgaatgtcggaaggggttttcgaacacgaatggaaaagctaatttcataactcgcctagaaaccgcgagacgaatcttttgagcctaattaatccgtcattaatacatatgggttactgtagcacttatgattaatcatgaactaattgggctcaaaagattcgtttagcgatttcctctctaactgtacaattagtttttttaatttatatttaatgcttcatgcatatgtacagagattcgatgtgatgtttttggaaaaaaaatttgggaactaaaccacagccttaataccgcaattggaggggggggaggggggggtagggcccgatgaaggacgccttcgttgaagacgttcttgatggtgcttctcacctgcggcagccaccagagcttcacgaggccggaccatgcgatggtggggggaggattttcggagcctgagtcgtgtgttctgcacatgcagtgaggggtcggtgcggaaggatgtggtgatgatgcgtgaggcgcgcggagacggcggatgacgtcatcaacaagttggtgccgggggttcaaggttggtaccaacaagatatcagttgaaaatgatgggttcttttctccggaagatgaagatgaagatggagattattatttttacataaaatgaggtggtattaacgtatgattgattgagttttaactattacaaacttgaaaaatagattaatatgatattttagatcaactttcatatagaaatttttcacacgaaatacaccgtttaacagtttgaaaagcgtgccacagaaatcttaatcttcatccaactcttattggagaaaagaacgggacatatatctggtatgaccagtgcctcagtggtgaatccagctcctgggctggtacgggaccacccaaggtaagtgaaaatgcttgtaaaatattgttaccgactaagaagtacatttcatagtagaaattgtcaactcctgacttttgagttatactagaaaaaatgcccgtgcgttgcaacgggtgaagtctattttaatcttattattgttatatggtttagttaagatgaaattcattgtgagagttcgcttggatatatatatttgtagaaaatcataagttgcagttaggagtccaatcatctcaagttagcatgtgagttattttaaatagatttcttctgtattatcaaaagtaaacgatcttaaaaaccgactcaaatacggatatttatttccaaaagcaatcgaacttaaaaaccgactcatacacggatgacataccaaaataccgataaaaacatcttcaacttttataatagtagagatttggcccattctaaacgtagtattgcctttggattattcgcatatgaattctcaaaaaaaaatccgattttgccat

SEQ ID NO: 18384 - DNA, 1800 bp, Oryza sativa
attttaatatgagatatgacagcatagtagggatgtcttgtatggtttattttggaaagggatagagtaagggtgtgtttagttcacgttaaaattgaaagtttgattgaaattggaacgatacgatggaaaagttaaaagtttgtgtatagaaaaattttgatgtaatagaaaagtttaaagaaaaaattcgaaactaaactcggcccaagtaacgatattacttagtatgaagtagtcggatgtttgatgccatacctttacgcgtcgacagcagctagccagtggcctagtgcttcgcgctgcctcgccgatacacttcgcgctgccctgtgtctatttattggaactcctcgtcgtcgtgggctgaactggattcaccaagcggatgagaattggatatggaatcggacggatagttggtgtatacacgttttcggctatgatgcgctgatagggcaagctaggtgcgtgtctgtgtctgacacggatccagtgtcccgtacgtatctacgaggatacgttaggtaaaactccaactcttaaatttagcttcacagattagggatcagtttagcacagctccatctctagctccaactctggagcttgagtttaaccaaacagatttaactccacctaaaagaggagtggatgtggtttaatttgcatgtgagacgagaggagccccgtgtcacttaggggcaggggcgacacgggcggcgaccaccaccgcctcctcctcacccccgccttactccctcctccgcttcgttgtcgcccaagcagacgccggaaaacgcacggctacaaggacggggcggggccttccaactccctcgaggtcgcggggtcagtgctcatgaccccggccagatcaaggcagcgacggtgtggctgcgtcgagtcgtcggggtgtcgggcagggcgagcggaggcgggctaggtgcgggggtggcgacggtgccagactttgtgtccctcgccagatccgggccccactcggtctggccaccctctcgcggacaacggcgacaaccaaaggtggaggcaaggaaggtagatggcaggcgccgaggaagagagcagcggcgacgacgaggccagatccacggcgggctctgccagatttggagccggcgaaggtggaggaaggggaggatgaggtggcaggcggcgagggcgcagaaaaggtggcggtggggcggcggctactgcaatgggcgcagccagagcctgccagagctagcgcccctcggacgtagtagggggcatgaggtggcgctgaaggcgccgtcgcgacatggcggtcatggcctcaagcgcgcggcgacatccatcacagttggcgacatgcaggggagttttctaggcgctggcgtcggcttgtgctccacggtggcaaggcatcctcttcttcatgcagctcctcctcctatggccagctcagatgtggtcgcggagagatccatggggaggatggaggcggtgccttgcagaggggagtggcttgacggcgttcaaagcgacgttgttactctgccggaactgtgggcgatggcctaggcctaatcgctgaagagactatgtagtagaccggcgacgatccttcttgtgcggattggtgtgtgggtttggacgggtaatcgctggcgaaagcctcgccgggacgttggccagctgacgatggcaatgccttttggcgtcgctcccctcttggaggcgtcgttatggcattgacccctctcatttccttacccaggcgcggatctacagtatagtcattggtgtcaggcgaca

SEQ ID NO: 18385 - DNA, 6034 bp, Oryza sativa
ggagcggcggctgcctcccatgccaggggttgggccgccccaaccccctccacgctctgtctcgcgtgtgcggcttgggcgggtgctcccagcgcccacctaccacatttattaaggcagcgtcagcgcggcacatcgcatttaatgcgacgtgcaggcgcactaaccggccacttgcggccggaatgaccgatgtgacggtagccagggagacctgcgcacgcacctactgctagcaagggacgtggcctgcgcccgccctgtctaatcggctttaatgaggggctttttgccttgcatttgagctcggaccagttcttctcacaccagtccatatgagagatcaccacccaacggtgggaacgaacggccggacgtcgtcgataattaagaaggaatgacacgagcgttcgcccgtgtcgctcggcgtgatgggatgggcccatgccgcggtaaggcgcgcgtggctccacacgtcggaagacaagacaagcattaattgcatgtaaagaatgttttctttacgcttgaagctaggttttggccttaatttgtggtaaccccttaagatataaaaggaggtctatgtcctagtggagagagggacgaatcccagagaagaaaggcacttttattctcccacctaaatcaatcacacacaggagtagggtattatgcttccatagcggcccggacctgtataaacctcttgcatctccatcactctcgaggggcccgaccccctctacctctctctccatcaactctcagacctacaaccgtgcccctggaccgaaccagaaagggggtccccacggtcccccgcttgaggagttcgcccttcgacacgcatggtaggaggacaaaacaggttggcatgggagaggatgggccgggttgggttggttggatggttgggggggggggcaggatttctaacatttttgacattcttgaattttttttataaatagactcgtagaaaaacttatttcaggagtggctccttttcacggcgccagtgtgattggtgccatgatcaagatgacgactccaatgtcattggtgtcaatgacctatttgtaaaaaaaattcaaaaataattttcaaaaggactaaaatgcaaatatatttcttccaaataggtcctcgacttcattggcgccgtcatccaatatgacaacgctaatgatgctggcaccgaaaaaagggtccatcctagagtaagtttttctagtgtctatttgcaagatgaactcattcaggtaatttgataaagaaggggaagaaaaaaggtcatgcagtttggtgctgaagaaaaaaattaagccgttgatttagtctgagggggtgtaaaatttttgtgtgggaactaaacagggcctgaattcgaagaagaaaataatgattacattgaattcagtgaattcggagggaaaaaaaggaagtttgaattcagcagttagtctgaatccgaagaagaaaattagtgagttactttgaattcagtgagttcggaggggaaaaaaatgaaagtttgaattcagtggttgatttgaatccgaagattaaaaaaaaagaaaaatagtgagttactttgaattcagtgagttcggggaaaaaacgaaagtttgaattcagtggttgatttgaatctgaagataaaaaaagaagaaaaatagtgagttactttgaattcagtgagttcggaggaaaaaaaaaacgaaagtttgaattcagtcgttgattttaatctgaagataaaaaaagaagaaaaaataaaaaaaaatcacttggcttcgaacgggagaccttcagtgtgttagactgacgtgataaccaactacaccacgaaaccatcttgtgaagatgatctttaccaacgtaataattgaaaattttgtcaatacttgtcaacaaagtttttttttcccgtgcgtgccgaccttttcctcgtctgaatggttttttctctatagatgagcggagcatgtgatgagcgcagttgcaaagtttgctgtcgtgtgtaggaaggagggcatcaagcagctgggagctgtgtcgcatggtgcagatctggagcaagcacagccaccaacaccaatactactctttttttctttttttcaccttgtcctgttcagagaatccactgttctttttttcacctagccctgtttagatcgcaccttaaaatttttcactcggtcacatcgaacgtttgaacacctgcataaagtattaaatataagctaaaaaataattaattgcacagattacgactaatttgcgagacgaatcttttaagcctaaatactctatgatttgacaatgtggtgctacagtaaatatttgctaatgataaattaattaggcttaataaattcgtctcgcagtttataatttgtttttgttattagactatatttaatacttcaaatgtgtgtcgatatatccaacatgacacgtcaaaactttccacccgtggatctaaacaacccccctattagtgcgtcagcgcttgtggattctgaatttcattggactaaattttccttcttccaacggcagcgaatctctgaatttttgctgctccgattggttctacgtgttgtcctggatttttttgttggctttactgtactagaggcgaacgcgcgcgttgcgcgcagcacctgtcctgcaatattggatggaagggaatggattactgttgttccgcatgtatagtttggaaggtgtgacagagacggtgatgatattagcgttgctgatacaatgcgacaacaatggaatggatagatggtcttcaagctgtactgatgcttttttatacggaataagacccatggcatcagaaatggaaaagtgaatacacagctagaagaatttgcttttctggttgtttttgttgatagtatagggaggaaataagtgctctgttgtcatgtataatggtacaagtggaattgatgactgtttccatggtatgagggctaatgtacgcaatgaaatagaatgatagttctatgaagatcccaagttcctgggcccaatcagccagcctataattaagacactgatttgagcatagtattttgctgcaggaaagacttgttagcttgatgcatccaaataagtgattgcggatctgtcacacagagaaaaataaagaacattcaacaacagagatcaatcctactgtaatttaaaatgttaactgacatgcattatagagcttccaacaaaatctgtacattaaatcattggcagataccttgccctatctatgatgtacaaacaaatcaaattgaacctctagcagaatatcaacaacacattatattgatcattgatcaacgtaagcaaatttcaatagtaaaaatctgaaatcatgagcaaatccaggggaacatagtactgaaacatcaaaaaagatggaacattcacctttatttcattatcctctctggtaattagcactgatgaactgttgagccccattgatgcatcatgacttaagagcaaacacaggtagacatgaaatgatcaaatttatatgcctagataaacgaagatgtacaccaaattttaataagcaagcatgctggtaaaagaaaactaatatagcagagcaaaaatgaaaatcccccttttttcctatcacaagcaaaatttaaggaacaaacaaaaaacgtagttagtcattccatattagtttgtaatagcaaaatatgctaagtgttacttgtattttggtattctaagcattgaaatacaatctgcaagcaaagtttatgttctggcatgactgagaagttgaggtacggaggtggcagcagcactactaccctttcaattggtcccttattgtcaacaataaacatgcctcttcataaatttgttttctccctacaactgctatcagcacacatgtactgcattgccctatgagtggtgcctcttgttctagaaattgttacaccatgcccactttgttagttatgcgcttccaaatgtcaggtgctgacactttcagaaaatgaacatgaagcaaagtcatgtttggaataagcaaaataagggcaatagatgtaaaagatagcggtgatttctagagtattaagggtttaaggtggggatttctaccagatcattttaagagtgcccctggatttgttgagtttgttgcctggttaacaacgataattaggcatgacattcatgagttgttccactttgttaatcatacactcaaaacacctaaacaatctatagaaaattaaagcatgcactacttaacactcgtcagaggattcttaaaatgtaacggaaagagtagtaattagtttagcataatatgtaataaaaaattaagcacaagaaaggcacaaaattaatttggtccattccccagaaacatatctattaaataaaaactgaatgaggcatttaagtgcattttaagtctctaacaatttctaagaggtgggatcctggttatcacctgtcaatgttacttagcataaaaaaacctcagtagtatctgcctgtgaagtgagtattaagccggcataatagcaagaaacctgcaacctttctttaatagcaactaataccaaaaggtaccaacattatcaccggctttttcaatcaacaattcagcaccataacaccaggcctaatcaagcccttctcatgtgtatcttcaactaacccgcagacaagaaaaaacacgcatgtcagaggtacggttgcacacatggtttatatatgcttgctcacataataaagtgtggtgagatgttacttagaagtgggatggagtataatcaaagtaaaacaatttgttctagaaaaatatttgctccaaaataactaaagtgaaatcagtttcagtcacccaagagcagtcctgtagttgactgatcaagggggaacgaaaccatacatgaatggaaaaatgggggaaactgctctaatatctgtatggagggacaatacaatttttatcactcaccatttatgttctgatcaaggagcatgagcaaagaagcattagcagcttaactgtccgccaattttcttagccaagtgcattacaggaaaaggaaaagaatatatttttcccctgcaatgttaacattagacagcaggcatcaatagaaaatcaagaaactatagtggtgggttgcaacactgacctcttccattttggtcagacaatcttgcagagtgcctggactatgcaaatatgcaggttgcagggacatgtagctgcagctggaagcatagacagatttgtgcattgtgccggaaggatgccagtgttgttggtgcatgcctgcatggagaagcagtgccgatggccacccatggccgcaatgagcgcgttgtcctcgagacagacttctacaccgccaggttgaccttgtcgctggccactgtcacctctaacataatttccggcaccacacctctagatcggctagtttgcgatctagcaaaggaatctgctcccaatcccaatacatcaccagcagaaacagagaacatcatatgttgctatttactggaagaaagcatgcaacaaatcaagcttttgtaccttgtcgatggctgatgttggatgcgttgtcgggatgtagagactgagatgcggatccacacattgttccgctcaatcgtgacaatccccttctggccaccaccaaaccgagtgctggagagtggaactttccgtgtggagctcaccgctgtggaagaacaaacgacgtcgtcactatcgatctgtggatctcaccgatgtggaagaactaccgccctcgttactaccgatgagcctgctgtggtaccgcttgccgtcgactccgggtgaccagatcggccggcggggacaccgtggctgtcggatccggcacccacgacctccccgacgagcgggcgccggcgccggcgtagcaaggagagcgggaggcaatgacggcgctgcgaggaaagcaggcatcgacggcatccccttcgagcgggcgat

SEQ ID NO: 18386 - DNA, 1252 bp, Oryza sativa
cggagtgacacggagatacacataatcccctgtttcgaaagcgagctcccttcggcggttgtctgcatagcttttctgccgagactgcgcgattctcaatctttccctaacagctctgactttctcttctgcctcatttaaaacttctgtaccaaacaactggcgttcccctgtctgatcccagaagagcggagtacgacacctccgtccatacagtgcttcgaatggtgccatctgcagactagcttggtaactgttgttgtacgagaactcagcatacggcaagcttttgtcccatgctccaccaaagtcaagcgcacaggctctcaacatatcctctagtatttggttgacccgctcggtctggccgtctgtttgtggatggtaagcagtgctgaaattcaaccgggttcccaattcttcttgtaatttctgccagaactttgaagtgaattggcttcctcgatcagacacgatcttcttaggtacaccatgtaaacacatgattcttgctagatagagttctgctaatttctttcctgagtaggtagtgtgcaccggaatgaagtgagccactttggtgagtcggtcaacgactacccaaatagaatcatgccccgatgacgtcctgggcaaaccggtgacgaaatccattccgatttcttcccacttccattctggaatctgaagtggctgtagcaaacctgctggcctttggtgttctgcctttactcgttgacagacgtcacagagtgctacgaattcagctatttcccttctcatgctgacccaccaaaacttctctttgaggtcttggtacatcttagtactaccgggatgaatggaatactgagtttgatgagcctcggttagtatcaggtcttttaattccttgttttcgggtacacacaatctttctcccatccagattgttccttgttcgtcctcaacaaaacctcgggcttttccaaccctcatgttctttttgagctctgctatttcaggatcacttgcttgagctatgcgaacctgctccaccagtgtgggctgtgcctctagggcagccacgaatccgtgctcaactataccaaggttcaaatgttccaaatcacgttgaacctcaccgcatagttcctctacccatgcgacgttgcagtaactcttcctgctcaaggcatctgctaccacattagccttgccgggatgatagtgtattcccatatcataatctttaattagctccaaccatctt

SEQ ID NO: 18387 - DNA, 11974 bp, Oryza sativa
aattcctgcagccctagtagatatttttatttagagggatttattcactaggtaaagtcctaattatacccctgaactatggagtgagtacgaagtaccccgaaaatcagatatcttttaccctcaactatcaataccggattgaaccccctcctcaaagcagctttgcaagtggtttcggtactacgtggcagtctagtcagcaattcttttattaaaaaccaatgaggctcacctatcggatctctctcctccctatctcttaatctctttcccctctcatacatttctttctcgcgcgcgtcagatgccgaagaggaggcgcgccagcaactacaagtgtctcgcggtggaggccgaggacgagccgcgtgccggcggccgcgagcgtcctcgcggcagaggctgaggatgaggccgaatgtcctcgtggcgagcggcggccgacgtcggacttgcacgagaagatgatggtggtgggagggggagcggcggacggcaccggactcatcttggaatgacacccacacgaacaccctgtcaccggcgcgtcccaccactgcgaggctctgctgcactaccgccatctgcccatcgccaccctcagctccccctccatcgccccgagccgcctccatccccgctccgtcggcctccgtcctcagctcccccctccaccgcctcaagctgcctccaccccatcccaatcagccgttatcctcggctcctcctccgccgccccgagctgcctccgcccccatccccgcccaccgcaatcctcggctccccctccgctaccccgagctgcctgtgctcccacccccgccagccgttgtcctcggctcccctctcggtgatagagagagatggaggtgaggggagggatgagagagagatagagaggggagaggaaaggacagagagggtgggagactgacaagtggggcccagtgattaaaaaagaattgctgactgaactgccatgtaggatcaaaaccactccgattcgagtcaggggataattcgtccggtattgattgttgagggtgaaagatgtttggtttttgagtcaggagccgattggtcacaatttgagagctctctagagacatcatgaaaggcgactggaaaaaaaaaaaaacaccacctctcctagtaatcctagattagcatagcgtgagtcggtcggtcggttcctcctgttttcaagaaagtgtctttaccatcgctagggctatgtcccgtttagcccgaggtcgctagtgcagtcttcatggcggccagccttacaaataattgatcaggtggtggtgggttttagagtcagttgtccagtggatcagactgcctcaacttcgaggcttggtgttggcggatcaacgaggtgagtggttacgtgtagggtgaaaacagtatgtgtattttctgaccgcccacctgactaaggctcactggaagaatgtgggaaagaaaatggtatacccgatactatctaagtttaaatccaaattcacaaaaaaaaatataggttaggatacgaggagagttgtatccgtccgtttgtcccatattatgaaacatatataaaaatctattataaatcaacctacaaacatgataaaagattggttaatcactattttacgaggtcacatgtaattttgtacaatttttttctcaatatatctcctctagcacttaattatattcttatatttaatatctataaattagagatacaaatacatatatgttacccaatcctatttagaggaaataatatgggctaggattcaagatggttgatatgttatccagcgttacctgtaccggtttcgaatttgaagaaaattatgagttagaatatgagaatgccaccgaacccgtccgttttcaccccttgcaggtgctctcttccgatagatctcgcatcagcgatccctccgctcgttggctttgctggtggggagatgcacatctgctcacacattcggccggcggtccaggagatccaacagggcaggagcttgatagcgacgaatctgctatctcattgacgaacttcgtcgatcggttgtgggcacagaggcagcgatttgtgccttcgtcgtggtgaaatccttctgattcaatacgcaggcaaatgttggtgccttcgtcataatgagatccttcttattcaatgcccgtgttgatctccctggattctttttttgaacttcatctccctggattcatgaagcacctgtttgatccagataatattagatacagtgaatcgtcaccatgctagtgctagcgtgattatgggctgctgttttatgggggtttcttctgttactatcgattgcggtggtcaacaacttaattaacatgtcgattttaccagtgaagtgtcagccacaaatgcgactttggtcagcagggatgaagctagcgctcctcagatttaacgtagagccatggcaattctatattgagaccgatgaagcttataaaaaatcaacaattcaacaataataaatatcaaactaataaatctcaaactgtgctttactctgtgaaggcaatcgaagagatcgccagtttctcaagcggcgtgcacgtttgtaaaggcctctcgatagaatcatcgcggcaacgctggtttcgtctattactactgcacgattgtatttggaagattataaccataacccagctatctttacctggatggctttatttatgtctttatgttgtactccctccagtttataacatttgactattcgtcttataaaaaaatattataaaattattatttattttgtttgtgacttgctttattatcaaaagtattttaactatgacttactccttctatttcacaatgtaagattttataatattcccctcatacatatagatattaataaatttaaacacatgcatatgtctagattcattaacatctaaatgaatgtgggcaatgctagaaagtcttacattgtaaaactgaagcggagaaagtatcttttttatattttccctaatttttttaaataaaacgaagggtcaaactttaccagcaaaacatcaaaacgacatataatttgaggtaacataagttaagacaatgtactgtgcatatttatatttccctaaactcttattaataacgtacaaattaagttattttttttagaaaaaagaaccggcaatggggcaatatcacgcggggagaagcaaggtacgtcccaatccggggcagacttcgcgcgtgcgttccgaattttttttatttttagatttttttaaaaaaaatatttacagaaataatctatcggccaaaaaaattgcaaaaatagaccctgccgcccacctctggggcggcaagctgacgtggcaaacgggggagggacgggcggtgacggagggagggtttttttgcagtaaagcccttgccgctctcttttggggcggcaaggggcccgaatgcaaaaaagctagtcgaggccggtcattttgcaggcggccccttgccgccctctggccgggcggaaggcctcgctgcctataaaaggcctgccgcccagcccccagccctcattcctcccctcaaatccagtgaaaaaaaacaagaagaaaggggaggagaagagaagaaggggtgaagccctgccggattcagacgccgatttcaggtaatattcatagatcctatatgtgactattgagttaaatagtgtattttttaaaactttatttgaataaatacattatatttttagggttttagttgtactaatctagaagtgcgtattgtagatattgttaactatgtagatctgctagtttggaatcaatacttttccgttgcattggcatacacaagaagatattacgttgtagatgtttattgcatgaaagagtaatatgatctagttattttgttgacagatatgtcgaacaaacaaatattccaagtttaccatggcccaggaaacgtctgttacgggccaactggggtagatctgtcagattttattgtatcagaaaggggaattgatagaccggctgagaggagtgtaccttctataaaaggatggttaatgaggggcttgagagttgatccacagacaagtgacataacaatcaatgttatagtaagtcgggcaactgagggtttttattgggaactaatgccagttcaaaactctcgagtgtggagatggtatgtggaaaatgcattgcaacacgggtggcctctagctatggttccgtttgttcacccgaaggatccatgtgtgcagatgaacatggatgatggcgagggaccaagtgctgaagtaaatgagacttctgtggaggaggtcaacgcacgagaggacgggggtgtagtagctccagtgggcattcaaccaggtgtagtggccgacgagggggagactgtcggtgccattgtggatgaaatggagagggaggattctgacaacgagcgtgtagaggaaggtgattcgtcagatgatgagacggatattaatccagcagaatgggctagtgaggatttttctgggttggtcgtctctgaagaggatagtgtgagatgggagtacaaagaaaatgagattattcaggaagcgatttatagtagagcagaagatatgaaggaggcggtaaaacattttgcagtgtcacttcatagagagttttgggttgccaagtccaaccggtcgcaatatgaagttcggtgtgttaaggaaaaagatggttatccctggagagtgcacgtgtataaggggaaatagaaggattattggacagtgtcagtcgttaccaagcatacatgttttctacctggtgttcagaaataccacaggaacattacatgtgcatttgttgcatctgagatgtatgcgcatgtcatcgataatctcacatatgaaccaaggtcaataatccgacacatcgaagagacatacaagtatactattagctatgccaaggcctggagagccaaacagaaaataatagagatgagatttggaacttacgaagcctcgtacgacaatttgccacgcctgcttggcgttatcgaggaaagaaaccctgggagctcttacgaagtgaagaaattcccctcaattgaacatcctggcaagagtgtgctgcaaagggcgttcttagctctacatgcatgcaagatggcattcgtgaactgtcgtcctgttctctgcattgatgggacattcttgacaggaaagtatcggggccagatactaacagcaataggggtagatgggaacaatcaggtattgcccttggcatttgcttttgttgagagtgagaataccgacagcaggtactggttcctgaaattggttaaaacaaaaattgttggtatgaggccaaatgtgtgccagatacatgataggcacgctggcattctgcgagcgatagaagagttgcagtttgggaatatggaacaaggataccctggtgagtgggaagatgtacagagcaggtggtgcatgcgtcatatgggagctaatttcttcaagcaattcaagaacaaggagctcatgaacatgtttaagaggctatgcgatcagaaccaggagaaaaaattcaatgagctttggaagagattagatgagttgacagccaaatgcagtgatcagcgtgcagcggctccatcaaccgccgatgctgaccctccttaagctcttggacctctcccaacggatagtccaacattggttagaagaactggattggagattcggaaattttctcagtggattctgcatgaaccaaaagagaaatgggccaaggaatatgacacaggtggtgctagatatagaataatgacaacaaatttggcagaagtttacaactaggtgatgcgcggtgttcgtggactgccactagttggcatagtggagttcattttacatgggacatgcaggtattttagggatcggttccaggcagttcttccctctatgccgaacaacagcattttgtttggaactttcatgcagaaaaagctagaagagttgcgtaaaaaggccatgaaacatcgagctctagtgcaaggtacccaacagcacaggtttgagatactatgtcaagataaggcaggcaggggtatctaccgcaagagagtgaagcagtagtgtgttctcaaagccgacggcacatgtcattgctcttgtgcaaagccgaagctgctccacagtccatgcacccatgtcattgctgccgcagcggagtgtggcataccagatgcagtatatgtttcacagtacttcagtaagcaagcaatatatcatacatggagcggcgagatttatgggttcggcatagctgggtagttcacagagactaacgatgaagtactcaatattcctgacacatcgaagctccgaggcaaggctggaaggaggaagactcgtcgcatccgcaacgatatggacgagtcggaggctggcagggtgaagcgttgcagcaaatgcgatgaacgtgggcacacctacaagcattgtcctaaagacaaggagaaacctagtgcggcagaggcaggactatcaggatcaacagcagatggagctcgccctacggatgaaggcactacctccactcgaccacgtcctaggcgtcgtcgtgccacgtctggctacatggtgtagttcttatgttctatgttggcatgtggctttgcttgtaatttgtttcgaacttatcgatgtgtttatgtttcgtcgtgaaatgtcagacttcggcatgtcatgtctttaggtctcgtgatgtaacgtcagactaaggcacctagtgtctctctttctttctatctgggcagctgagaggattgcgatcggccgccctgaggtggaccagcacgcgtacaaggagtcactgtacgcggagcgaccagaggtcgactaccctacgataggtactctgtggtgccgtcgtcaggtacgttgcatcgatcttctcgtattgttaagttaattgctaagttcattgtacatcacatcgatcgtctcgtattgcagcgccgatgggctcacgtccaggttaggcggtcgtatcctgagtttgttatggagttcgaccgccttctgccgactgacgtcgtgtgggagccctacagtgccgcggctacccaggctcgtgcgccgttgggtctgtccacagtctgcaccagggaccaggcgtactggatgactacggttccgatggtcttcgacatctgcgttgagcctcatgcccctttccgcgtgatgcggcagttcggcttctgtcagccctttccagtaccgtttccgacgaccgtcccagctgctgttcatcggtaagatctttcactacgctttgagttgttgcattaaaatctacatgtccataataatttgcaacatctgtcgattcacactaatatgacacattaattcgcaagtactcgcgcaagggtcagcagtcagctggcgactggcccgccaagttggcgacttttgttgaggactggttgctcacaaccgaggaggtcgtggaccacgagggagagccacacactgaggaggcgtaccaggcctacctacgctggtaccagccacgtacccgtactagggtcaccttcgctcccttggagcagcagccccacgttgcgagcactagagacctctacgccaggcaccgcgaccaggacttcgctcgtgctgtgagtaccatgcatcgcaccattcctttatgttttcatgtctttctcttcatcaaattttacgaatatgtacgaaaaaattaaccaccaatgtttaggcgcggggattccggtacccgtagaggagcacctgacgacatacacgcggatggtggagtcgatacgctcgattctccgagtgctcacatgtcgtgcagatgacgttgctcgggcagacgcagctgtacagcggccacccgtaccgactggtccccgtccagctatgcacgttcctaggccgactccccctccgcacggaggtaagtatttttaaggatttttctgtacatgccttgcacatatatgtgagccgtttcacttgccgattgcttcagggtttcgtgcaccgttcagcaccccgccttcctcggctaggccctctgttgtgccccccacaggtacttaaaaaaacaacattacttcgacaatcaatttacatgcattttatgtcttagcttacaagggtcccgttgtccatgtgtaggtttcacccagttcgctatgacgcaggctgcccacttctcccaggctgcagcgtcagtgtctcaggcagctgcgtcgacctcgcactcagtgcagttctggcagtacaccgggacttcgtcacaggcagccggcacgtcgagtcagggtccaccactggaccatgctgggacctcgtcggaccacttgctgccttccaccttgctcttcgacatcactgacttcgatttcgcttcaggctagacagaggatgtcatcggcccctcacagctgagaggggcaccgccggtgcagacgcaggaccaggcgcaggccactccgccgccagacactcgtgctacccgtgctgtgccaccggatcgtttcacctactcccaggaccacgtgcgagcacaggcccggaggaccaagcgtggtcgcggcgcggggcagggccagtagagcagtcttctctttatttatttgcttcactttccagtactgtatgcttgtgtcatgactacgttgttgttatatgtgcacgatacctttcggcgcatgcacgactactttctgccgcaccgatgcagcctcctttattcgcgtgcgatacgagtatttgcccaccatttgccgcatacgaccaatgtaactttcggcgccgatcaggcatgtaactttcggcgccaatcaggcgtacccaccatgcctcgccacgttcacatgtcagggatatcactcgattttttgcgcctatataagtcgccttaacgagtgaggcctcacaatctttcagaactcagtcacattcagtactctcttcccccacttgcttcattacaaatcctaccggctttcgtcaatggctagacgccggggtgttgaggatccgaactggcgtagcgatccttgtgtatacctactaccaccttggtgccagcgtcctctttgcctatgcggtgatcgatgccaactaatggcttcgaggaatcctgatatttgaggaaggcgcttttttaggtgccctaactatgaccgtgaggtattttattatctgcatatgcttattcattccgtatgggcaatcgctttattcttcgtaacactactctattcggcagacccgcactacggcttgcgcatacatcgagtgggtcgatacagaaaatcctgttctcgacctaaccacttgtttacaagaaggtcgctggtatttcgcatccgaaagtactgagcaatacttacagagaaaagcggcttatgaacgacaatgtcgtgaacaacagagcgactggcgggtgctaactacggcactccctccatgggatgcccatccaagatgcaggtgtggtgatcgtggtcaggttcttcgttccataaagcctacaacattgggtcgaaggttttttgtttgtccaaatattcttgacgacgatttcatggtaagaatattttgattacatgaatccttattttctcacaacatttactaactttgctcgctttacatctattctttcctcctaggaaccaccaaggagatatcaatacagaaaacggatagacaccagaagggttctaactccacctagccgtgttgagcagcttgaaactaccagagcaatatagggttactaaagcgcgttttgagagaggagagggatcctcacgtaggggttagctattatcggacaacttggcatattgaaatttctactgtcatgcttccttgtcccattactacatcgtcgttatgttcaactattgcactacctccctcctagttcgaatctaatattatctatgtaaccgcaatggaaatagttgtatcatgttcaaattgtactactatttcttcatgttacataattctccttgtttaaatccatataatgtttatacgaccgaaactgcgataggcctattaattatccgagtactaatacgtcgaataagttacaaaataataccttacttaacatatgaaattgcgaaacaaccaacttcaatacatttttataacaatattaacaagttttaccaataaatacttctttatttattattaacataacatagaaaaatcgtttggtcgtactttttgcatctgggtcccttgccgccctctactggggcggcgaggggcccaaatgcaaaaagtacgagggcaacctctttatgggcggcaaaaattgcaattagccccttgccgcccagggtaattgcaattttggccgacggcggcggacggcgcggtcgacccgccatctgccacgtcagcttgccgcccaccactggggcggcagggtctatttttccaatttttttggccgatagattatttccgtaaatattaaaaaaatctaaaaatgaaaaaaattccgtgcgttccaactacttgggccagaaccaaacgctaacccacagtcgaattagcccaactttaataggccaatacgctagctcgggaaggggtcgaaaagtccaatttgatcaaaaagtgtaacgacaccggcccacagtcgaagtggcccagttggccaacgcagcccacattaacaacgccaaccccaccagagcacgcgctgcctagccccaagtcccccaaccctcgccgccgccgccgccgcctcctcgcccccgaagcgtccccgccgccgccgccgcctccccgtcgggaaggatgaccctgtccatgaagccgcggaaggtgctggtgcggaaggcgatgaaagaccgcaagaagaagaagggccccaccaagcccaccccatggaagtgccccctctgccacgagctcttcctcggggtgcgcgagggtaaccgccacttcgaggagtgcgaggcggcgaccaaggccgcgcgcgccgccgaccagaggaagatggacgtggaacgcgctcgccaagaggagctcgtgggatccaaaaaggccgccccaccgaaggaaggtagagtctcgttttcgttcgcgttatttgcatcgcaatgcatggatgaatgaattagactttctggagaacaatcccgcaatggatggatgaatgaatgaattagactttctggagaacaatctgataaattaacgaattgaacccgcgtagttttcaggctatgaaaactttgctgcgaaattcaaacgaatgttccccaacatagataggaattccatgcagacatttttgacaaatattagcatgctgggtgtataaaatatatactgcactgagcaaatcttaaaaatcactcttttcaagaccttacatagttggacgcacctggacctgctgcaaagaattactagtgggttatatctgctgatttgttttagaacccatacatttacctttccgtagtacctggcaagcttgtgcaacacaaatttgcaaaccttctcatcgaatttgacttgcaaataagcctttcgtgccacctatctatagaaacacaattttcttcatgagacttatttttattatcaacataatgtggcatacactatactctaatggctcaagaaatcgttaaagaccatgcaagagtatcagagcaactttacatattgccattactgtgcaaatggaaaaaataccgttgcttaaagtgctgaaaatatctgtgcattgtgatataaaaatcaattaaaagtacaaaggcactcactattagagttcaatattttatctccaagattcagtctcaatgcacttcacaatggtattgcactcccaaacactttgcgttgttgaggagggctgcaggaat

SEQ ID NO: 18388 - DNA, 22138 bp, Oryza sativa
tgcgtgggcttcctttccagttttaagttaaagtcacccccacatatttccagtaataaaagttacatacataaataagattcccacgcaaaagcatgggctaccttcctggataactaactatatctataagttttgaacttataatacttctgaaattttgaacttctgtaaattgaagcgaattttgaacttctgtaaattgaagcggtgactaattatatcaattatatcttatctgcaggtatttgagagagtcataaagatgtagaaaactctagaatcaagttagcgaaggaactatcaactaagtcaggttctatgacttttgactttgatgttatggtgtgattgggatttgtaatatcatgcagtaccacacatttatcacagttacgccgtaaccttctgagttttataccagtcaccgcaatatcgtgaaaaccctgggtgtgatgttatatactcctttgatatctcgctacatgttttttccaaacctatttaagcaatactaaattcccaattatgttgctttggttataagcgtggtcttaaaaatacaatgttgaccactaatgtcaatcatagcatgtttatttgatcgatctgaaaaacttataactcctaaccgaacttacacatgggaattttttgtatatacgtaatttaagtagataaaccgaactgaaatacctatgttcaaaggtttagagctttatctaacacatacctaatatgatattaaggataagagcagatggctttgatatagagagaacgccataacaatcagcacacctgcacatcagaagatagtttagtgtgaagtgcagtggaaaatagctcaaacaaaatcaacccgcacagaatcatgtgtaattttaaaatactaggacaaatcaattaagcatccaattgtggcgtacctttactatttcattaacttattaaaatgctgaaggccagaaatgccaatatggaacaatataaacccctcaccagccaccagactaatgagtacccctttagccccagggaaataataggggaatccacaatacgttacaacatcttcaacctttcaagcacatcgattcaggggaattacatcacatatgagcatggcaagaaagccatgctaaatccatcttaacaaaatatttttgttattacaatttccacatgttgctgaagatgaattggctaaagctatgtaacatgacgtgattcaatcacttacaaaatgcacgttaggatgtcatatgggtacttattagcatgctagcctcctaagatcccagtctttcttttatgctcttaagtggaacaaaaagacatattggttcaatataagaccattaggcctataagactactactatacatataatagtgaagtgacccgttttaaaaattaggcttattcaaatacgatacatttgtatcatgactacatcagcaagaaatagacaaactatatttgcacataaaaatatttttaagaaaaaatataaaaacaaaaataactagattaaattttagaagaccacaggttttgaggcacgtgtaacacaaaacctcagatattacgatttgtttcaaggaaacccaggttttgaggtatagcatttcaagaaaccccatgtttatatcacatactgataattctattattatatataatatttttagtatatgtttgcattggtatgctcaaaatacataaccatcccgtgtacttcatatttttccttacttttgcattgtacgattgaataaacacaaccatactaataatgacatattaaccggtttacttatatagataaacattaatcatattaccataataatgcttgtaaaaatgaggcaaacatgcatatatatactcactaatatctcgttatttttttgcaattaatatgcataaatatattagacaaataacaatataagcttaaacatgagatttcgtggaacatttttccccaaaacctacggttcttcatcacaaattgtaatgcatgatgttttgtgttataagtgtcacaaaacctggggtttttgtgaaatttactcaaataactacatttttggctatcatagaagatccaatggacccgtattgcattgcgttggatgcaccgtcaccaagatcttgtttcataggaacaaacaaaaaaatagaacgatatttttcattgagaccaccttccccaagacaaaagagagaactaggaaatgctagactgtacgtgctacaatcgtgttctgccatctctaatcgctaagtagtacgtaagaaatgaaagtatatatgcccagttttataggataccgatgaaaatctgaaggttaactgaatgtaaggatttggtcgtaagggcctaggctaccaaatcatgacctaacacagaacatgaataacaaatagcttgacagaacagatcaaaaaaacaaaatgccaataaaggaacaaaacggcggcagtcaaatgcagagaacaagaaaataatttgtgacaaatgaagcctatcatcaaaacaataaattccacagtagacccaaacagagtgtcacccattaccattagtgtagtcgataaattttcttctgaagaagatgagaaaaatacatatattgtaataataaacacgtagaaaacttgagcacaacgcctcctgccatggctgataacatggatagccagatgaaagggagaacatcatctcgtcgaacccaaatctgcacataaacaaaataataataatttaccggatatgaaaggaaaagaaaagccaaactagttgaaacataaactaaggataaacttgaagggtcaagtgactttttcagagtaaaagaagtatactgtgaaacgtatgaccctgcgacttgttgagtaggagtgcattgccaaatactggaactgaatctcccttctacggttagctcggcagagaggggtagaccgggcgggtagtccagatggcttagatctagtctctccgttaaactcatcaccgcaataccatcgccgggagccgatttgcggcggatgcaaccgccggcaacggtgccagccgaagcccctggcatcgtctcgcctatagggagctgagccagccaccgatttcaacagatctgtcataaactaacaccgattagaacggatctgtcataaaaaatcattcatctggcggaaagagactaaccatcctgataatatccttggccgtgagaccgagtcagcgccgatagaccggcaaacttccgtctacggccaagtcccaagtcgatctggctccggacggatcatctagcccggggtatggatcatccatggatggacggcgacaaacgcgcgcggccaccgacgcacccggcgccggccgccgagcccatgtagacggctgagagttgaccggcgctcaggactgccaccggcacgcacaggcgccaaggaaccctcaaaccagacgctcgccggagcgcttacaagcgcggagtcgacgtgcaggtttcgtcgggcgggcgagcgggcggcggcggcggtgaggcgcggctagggctcgcggagtcgcgagaagagcacggcggcggctaggagttggagacagggttgggggtggggaactggggattccgcgtctatcgtttcttgacctcgcctcgcgtcgcgtcgagtatggacggtaaaaaacgtaaaactgcaggtcattggaacatgggccacgagtggactcctttttcgggaagcgtcacgtaccttttggctgtcagatggcccaggcccaattagattctctttttcaaagcaactgtaatgttccgctttttcaacgtgctttgtcgcatcgtcatccggccagtccacgtacaggaaattaaaatttccgccgtcctcggccccgtcacgctccacgccgcgctcgccggtgccggcgtgacaatctcacaatcctctcgagccaacgtacggcgtgctggtttacggctaggagtggacagaaaaaatccaaatcgaaagaccgagaccgagaaattcaatcatcaattcggctcccctctcctctcaggtccaaccgaaggagggaggggggatggcggcggctcccctcccctaccctcccagatctagccgaaggagggagggaggagggtggcagcggctcccctcccttcccctaacagatccagccgaaggagggaggggggagggtggtggcggcgggcagcagcagtgctgggacggcggcgacggcgagcctacgacgacgatgacggcggttgttgatggtgcccgtcgacctcgccgtacctgcacgccggttgccgtctacaatttgttgatttgttgctttcaatttgtatattgtggatttcttgtagatgaacttgggaatctataatatatgaatttgtattgtggatgaaatggttgattgtgtgcataagcttgggaaatctgtctaagatttggatccaatcccagaattttttgagtttgaagctgggatttggatcccttgtttcttttttttttgtttgggaaaaagggttttcactagcgggcctcttaggctaacggatgtaataattaatcagatcttcgctagtggtgcctctaaagggaccgccaaccaaaatccgttttctctagcgggcgtgttgcgctagtgaaaatcattatcactggcctttggttacaagcggctagcaaaaccgctagcgaaaaaccaattttggtcgccaggaaaaatgcttttcatagtagtgctagctcctggtcggacgtcggccgagtccgggtacactgaacacgatggtggcgatgcgccacgtcaagtggtagtgcgggaacatgccgtacgcgcgttggtcatacggtctggttggctgtgcctgacgcacacgtgatctctgacatgtgggacagtggggtcatgtatctaaggccgtgtttagttccaaaatagttcttcaaacttccaacttttccatcacatcaaaactttcctacacacataaacttccaacttttacgtcacatcgtttcaatttcaccaaacttctatttttgttgtgaactaaacacagcctaacttgaggaataggatttcaatccacaccggaccgaaccggcactttggcagtgggccagtcaagtgaacatggaggaaaatgctgcacggtgaggagccagctgaggagaagtgtagcgccttgcatggtgttgcaactaaggctctcttcgttccccagggttcacaactccccacactcgttttccacacgcacgcttttcaaactactaaacggtacgttttttaaaaaaagtttctatacgaaagttgctgaaaaaaatcatattgatctatttaaaaaaatagctaatacttaattaatcacgtgttaatgtgaatatcgttttacatgccggggaggaggggttccccaacacagcctaacctgccggacagcctgcagctgcatggttagcttgcttgccctgtgcgtgcaagcgagactgcggtgtgtgggactgtggcagtggcggcgtggcggcgtgcgaggatacgatgcgggcatgcagctgccccttcacaaatcacacaccattggagtacactattagagcgttcaggttcgtagtgcatgagtgcatcgagctgtcgttcgacctgaactcttcatgtcggtgtttatgtttgatttgacgccacttttgcgggtgtgcctaccaaattgaagaccgtgtaaccaaagatggtcacccattcttcagccccttcaagggttggtgacgtgggttgtcaggagagaaggcatgaggcacattgtggaggatgtggcttcgctgcgtcgttgcccgcaccacttgggaagggagacggagaaaacagagctcgtctcggtggctgaagtgggagcccgtcgtcccctcctctttcatgtccccgctctacgccgcaccgatcgaggagcttgccatcgtccccctctccacgctgccatgaaaagttgtgcccctgactccgcgcaaccgcggggctcgttgccatcctccgctgcccgccaccgacctcgtcatcgacttctgttcctgcagagagctcaacgactgtcgccttgatctggaggctgtagcaacggaggacgcttgcgacgaggaggacaagatggttgtggcgccctgatctggttgacgtcaaagctccatggcaaacctcgaggtggtcgccggagggggaggggaaggcaatagggggagtgggagggaaagcagacggaggggttggaggagccggcctcggcttgctcgccggtcgtgcctagcctcaatccacacccgccgccgaggccattccatggacaccaccgccgagacctgcctcggggtccttcgccgccgacgacatggggattggtagggagagtagaggcgccggccaggtcgtcagcatgaacagaggagagggagtggccatgaggataaagcagagaggggaagatggattttatcttcttttctggattctaggttgttgcaaattttggacctccacacaaattaaagaaaatatgagaactgaaaaaaatgctaggggctaaaatataaaattaaagtcattcctagagccacttacaatgtgaagaattcaaattttgtacacgtaaccctagcttacgtggcactccgaggctcctcgtatgagggcaacgtattgtgaacacccttataatgcttttgtacttcaggtgtacgataacatatatgaatattcatgcgtgtatttgcataggctcatttttctgaatgtgcaaatgagggcactcccaaccctccacatcaaccagttctcatgacatttaagtatattgccacataagaaagagccgaggtaagagagttaacgaggagaggagaaaaatgaaaaaaaaatcgtttctcatgtaaataattagctctacataaaaactaagaataaaaacaaagggatgcgtggataaaggagatactaaatgataggtgtgattggatgataatttattttcaagaaaccatccattgagttagtttctacaaatagtgtttgtacgacattgcaagaatgaaaactatttaatagtttttgagctaggattgtcctaaatgtgcccactatagaatagcttatttgcgagtagtaagagtgatcctcgttgaacgaacacatctcctaagaaactaataaattatgagtactatgctaccgaccatttttagacgaacgcatcaaagagcatgtataatgagaaaaaataattataccccggatgaaatagcggaactctctataaaacacgcatttaaacaaatttattacatatattttataaaacgaatcaaaattcaattgccagcgaaatcaacccagatactatagtccggtctctctgtcccccagtattccattgttggtgttccgcatcctaattcataagaccaaatgttcgtaatacttgcatcaagggtatttgagtaggacgatgactttggtacaaaggccatttccccttcgcgagtgacaagatcaacatgaattgtctcaggccaattgtagaacctcgggaggaaaactttgttctccatccacttaaatttgggcttctttattatcgttgtcagcgacccagtgaacactacttgaccatgcaggctctccaccttctcccactccattgtttcctcattaagcttcaaaacatggaccgccttcccacggcgttcaatgagtacaaccatcaacccatattggctggaccggagcaagtagctatcttcacatttgaacccaaagccgtcaggcttgtcaagaatctcaaatccattgtcatgcctgcaaggatcatagaccagcaacctcccatcttgagctagaagatatagcaagccgttatggaggaccgggttggtgtccggtgatacccgaatacgtggcaagtcagggtgatattccgtcaacttccaatcctcccactcaccactgctgtttcggatagagctagcaaccttaatggtaagaatcgcctcgacaccaaatagcctctcatcaccgtcagagacaacaaaattgaataatgcatgaggttttggtggcaacacttcaacaagggcgccagtgacgaggtcaatatcaaacaccaaggactggtccacgcacatactcagatgtcgtccggtggagcaacagatcttcgcgccgggcaccttgagcagtccatcgacctcgaaattcttgtcgtagtaagggctatagtaccggatgttggcggtgccaacgccggcggtgctgaggaggagcggggtgatccacgctgggtagaaggacgacagcgacacggcggagcgccattgccggcacaccaatgcggcgtttgggtggctcgaccaccgcagactccccaggatccggacgagcacgtccgtcgggagagacgaccagccccggacccgcgacgtcgacgcgacggcctccatctaggttgctctcgccactactatatgcacgtgaccggtgttttctgccgcttttctcgtggtgggtcgcgtgccggcttatgtatatataggacgcgtgcggggttattgcgagcaaataccaatcagtttaatgctatgtgcacgggagtcctcgccaaatccgtgtcgaatactgaatacacagcacagcgcagcagggcccatatccatcgatatcgagcccgcgagagagaaaaaagggaaccgcacgtaacgtaattatatgtacgggagccacgagcccgcacggtagctctgctgcacgcctgcactgcacgtacgtatggtaacttgcaacggtgaattgttccaaaaaaaaattgcgaaagaggaggatgcacgattactttactttagaaaaactttttttttaaaaaaaaggccaacggattttccttgtaaaagggtatcctttatgtgcaagccaatcacttcatatagatggggtacgatgaaaactgtcggaatcggtagtcctttatggaagtaaattctcggtcgatcgagaattaatggtcatatttatcaattttaaaatttgggtatcaatttataataatttagtgtcgataataggatcctcaaaacgttgcaattttacgactttacatgaaataattacgtagcactaggtcaaccatatatgaaaaacatgtgtagcactcggccaaccacagtatctctatctctactattaaaaaattaaatatgtttttgccagtattttggtacgtcatccgtgtttgagtaggttttaaagttcgttatcttttggaaatacaaatccgtatttgaatcagcctttaagttcattcagttttagaaatacaaaaggagtcgtataagaaaacttttttaaaaaaactcacgtactaatttgagatgaaagtcggactcctaattgcagctcataattaattttctaaaaaaaatatccaagcgaattcacacaatcctcccgcatcgggcgctcgaaaacgagcgttttaattaatacggtgaggtgagttgttggtacttagtgttaggaaacgatagacaaataaacgataaaaaacaatagatcaatcacagaaggcacgagattttaacgtggaaaaccctcccaaaacaggagagaaaaaaccacgggcgccagcgagcaaaatatcttcactatatctggggtgagattacaacgcctcacggtggcttaccagaggtatatatatggtggaaccctggaagggatgacgatccgtttcgtgggggctccgcccccgcaccccgggcgtccccaggtgcacggcccaatgggcctccgctacgcaccggcccaagcctctcggcgacgggcctccgctccactacggcagaagctggcctttattaagtgcaaataaatttgtatcaaaactcaacacttagtgatcttgaataacatgtgttgcacataatccaatttgatcataccaattttcatccatatacgtgcatacgtctctcaattcatctatctacttacatatatacttggtcaatttctatatatcatttacatgttttggtaatataacattctatatcatttaacggttgttaaaattgaacttgcaatcatgatttgcacttccatttacattgcgagcttaattgtttgcaacaataaatttgcacaccttgcaatgcgtggacataatactagttcaaataaaaaatgatatacatatagatatacgtacgatcataagattcgactaatgcagaccctgttttatatcccaccccaaaatttttcaccctgtcacatcgaacgtttgaacacatgcataaagtattaaatataggctaaaaaataactaattgcacaaattgcgactaatttgcgaggtgaatcttttaagtataattgctctatgatttgacaatgttgtgctatagtaaatatttgctaatgatgaattaattaggcttaataaattcgtcttgtggtttattgatggattttgtaattagttttttattagtgctcgagcaccccatacgacactctatataatatccaatgtgatgtgacaaaactttacacccttagatctaaacacccccgtagtatatgactagggctaagccttaggtggtgtttggatccagggacttaactttagtccctgtatttagacactaatttagagaattaaatatagactacttacaaaaataattcaataaatgaaagctaattcgcgagacaaattttttaagcctaattaatctataattagaaaatgtttactgtagcatcacataggctaatcatggattaattaggctcaatagattcatctcgcgaattagtccaagattatggatgggttttattaatagtctacgtttaatatttataattagtgtccaaacctccgatgtgatagggacttaaaagttttagtcccatctaagcagggccttatgttgcacacaacaaatgactgacgtcgtgatgaaacctcacatgtatttgttagcgtgcctcacgctgcaatataggctgtgtttagttcgtgtgccaaattttttttaagtacggatacacatttaaagtattaaacatagactaataacaaaacaaattacagattccgcctgtaaactgcgagacgaatctattaagcccaattaatatgtcattagcaaatatttactgtagcaccacattgtcaaatcatgacgtaattaggctcaaaagatttcgtctcgcgatttacatgcaaactgtgcaattgtttttttcgtccgcatttaatgctccatgcatgtgtccaaacatttgatgtaacgaaaaagttagaagtttaaataagaaagtttgaatctaaacacagccatagtcggacagaagtcgtatgtgtaatagctcttaatttgaatacctgtttgaaaaaggtactaaaaccatttcccctgttaagaatagctctttgcttttatcagcagaattcattcgaaaaagacatcaccaattgataattacatcaaataaaaaaaatcattggacagatcaaatgcctcctcggcaagctctttggcactttctttgcttgtcctcctacgaaagaaaccgcggcgcgccgcgtgcgccggcgaccgtggcgtgacaagtcagaaaatcttcatgttcctcaccgattgcggcagcttccacccgccgccctccttcttctgcgcgtcgcgcccgcactgcccggcgctcctcgcggcggccgcggcgccggcggccttcgacgccgcgccggcgcctgcgccggcgcacgcgtggtcggcggggaaccggtgcttgaggcacaccttctggccgcaccccttgcacccgctcgtgttggagaacgtgagcgtctccttgcaccgcggcacggggcaccgcggcttgcgcttcctcgccgggtcgcaccgccgcgaccgcgcgtgcgccttcagcacggcggcgtcgtccccgcccccgtccccggcccgccgctcgatggcgtcgccgcaggcctcgcagacgacgacggtgcggccctggtccgcggcgcgcgcgcagccgtggtcccggtacgtccggtgctccgcgcagaacgtcttgccgcagccgtcgcagtcgaaggggaggaagtcgagctggttgcagtcctccctgtcgcactgcgcccccaggtccgggaacgcctccgtgccccgccgcgccatggaaaatcgatcgacgatttgatcggttgccttgatgattccttcctcctcctcctcgagagctctgaaacgattcgcgttgacgagcgtggatttatagaggcgggggtttgccgtttccgattccgacgcggtttgcctttcttttccggcaagaaggttgggggcagtttggtccggattggaatagtccggtctgctctggaggcgcctttacttagcgaaggcggttttgggtttcggttagtttagtttagccgcgtcggccgtgacgtgtcgtgctgggctggtggggccgtgtggttggtttctttctaggaggaggagaccgagtcggatttgggggtgtttgggggtcgaaggcagcatatgtgagtgagtccggattattgagacggctcgtttagtgaaggcccaattaggtgatttctatggcccaaaattgcattaattgcagatttcaaggcgtcaatttctattggaataagttcaccggaggtccctcaacttaacaacgagattttttgaggtcctttaaccacaaaacccgaaacagagatgctaaaaaacaatcgacagtttttggggcaaaaaacagtcaaatgtaactataatatagttatagtgtaactaccatgtaattacactatagttacactgtaactatagtagttacactatagttattatagtgtaactgtagtgtaactacgttataatctctatataagttagatatgaagttatatttattattttaatatttatataaaagttatattatagttacagtataactattacaattatgctatagttagatttgaaagttttttttcccaaaaaactgtcgacagttttttttagagagtcccaaccagaaatgtgcacccctaaacttacacaaaccgtgcacacaaggtcatatgacagtatatgtgggtggtttcgctgacgtggcatcctagtcagaaaaataaataaataaagtacatggggcccacatgtaagtgagagaaaacgatgcgagccccacatcccttctttcttcccctttcttctcttctcttgtcttcttcgacgggtcgagacaggcggagcgacggccggcgagagcggcggcgggcagcgggcgaccgcggcgggaggtggggcgggatccgggacgggttcctcgacgggctcctgctccgggaggggatccctgcggccgacggagatgtcgccgctggtggcggaggagggaggacgcgatccagacgacgatggacgcgagcacctggtagtccgggaggaggtagtacgccgcggcgaggagcgccatggccgcagcggcgtaggcggcggcgtgggggagggagcgggatggttggctgcagtcctggacagggcacatcaacgggagccacgtgaacaagaccaccgcgacgagcagccacctcaacgacgcggccagtagcgcgaccacggaggacgacgaggtggacacggaggaccacagtgggcatgcgcggccgccgccgttctcccccgccgcccctgcctgcttcgcccgccgctctcgcccgccacccagtggcgaagccaggatttagagatggggggtgccatctacgagacatggtaattcacctaaggttcagtgaacagtgattttgtagtgttgatgcatgatcggtaactcgatatcatacatgttacagcgattagctacaagagataacaagaacccatatatcatgattcgccaatttaaaattcagtaatatttttaatatatggatgattgaacagtttgttccattaattggagtcttgcaatcacttctaaaatgataaatcagttagctaagtcatttcagaagtcagttgtcctatatcctatatagttagtctcatctgtaactaatgatataattaatagctaaattataagtgctaatcatccttgggagaagagaggggaggggaggtcacataggggttaggggggtgttggccctccctggcccctacgatggcttcgccactgccgccacccctacctgcttcgccagccgccaacgcgttcgcctgccaccgccatccctgcttgcttcgcccgccgccacagcgctcgcctacccccgccgctcatgcctgcttcgcctgccgccgccgtgcgccgtgctcgcccgctgccgccgccgctctcgccggccgtcgccccgcttgtctcggcctatcgaagaagacgagagaagagaagaaaataaaggagaaaagagaagaaaggggaagaaagaagggatgtggggcccacatcgttttctctcacttacatgtgggctccacgtactttatttatttatttttgctgactaggatgccacgtcagcgaaacctcccacacatactgtcataggactttgtgtgcacggtttgtgtaagttaggggtgcgcatttctggttttgtggttaagggatctcaaaaaatctcaagagtaaaatacaccgctggtccttaaacttgaagcgtggtgtcacttagatccatgatcttgtaaaatcgacattaaggtccatgaacttgtttaaatgaatcattgcggtccaaagcacatttgacaggattgaccgtcctacgtggctgtacagcgtggccccatatttgcacttaagcccctacacacctgatccaaccctccactactgctgttgaccgccgctggcttcacctgctcgccatcggctctactctctccctcctcctcctcaccaccttccctctcccctttccctttccctccggagacgcggttctcgccagtgagcgacaagacggcctcccacgccttggtcagcactcgcggacgcctcccggaccttcgccatcatgtcgcccggcgccgccgccaccgtcggcacgccctgcgccacgtcctccttccgccgcttcaccacaccagagatcgtcacccccttgtcctgctactgcccaatcgtcggctcgccgaaggcaagggtggtggaggcgtccgtgtcctgcgcggcgccctatgattgcaagctgccgccgacgcctgggatcacggtgccgatggactgcatcaccagctgcaccttgccagccacgacggtcccgacaccgacattgggtcgttcggcacatccacatccggcttcccgacgccgacgtgcttcgggtcatcggagacgctcatcgaatcgaaggcacggacgatgggcatcgcatcaatgtcctcaccttcctgtggcatgcgcactggttcatgtcactcatcctatgcgctgccacatcgcgttcatcctcctcgctgctgctgttgctgctgctcccgccagtgctgtcgccgcccttctccctgccaccacgccgccagcgaggtgtcgcgtcgcggatccggcagtaaggttggatgcggcgccgacaactggcgagaaggccagatccaacgttggcaactaggcggagctcgacatccatcactccggtggcgaggcgtcgcggcgcggatccggtgccgacgaccagcgagaagcgagaccggcggatctggccgtcagtgaggcgtggttctccccggtggtgcccctctcttcggcggcgatggaggaatggctccggcaagggcgtggggcggcgggaagggagactgagccaggccgtgactacggctgccttcttctccgtcgagctcccgacggctaccttgtcgagctcgagcccgacagtggcggcaagagctcgagggctcgcaggcatgatccacctcggtgacgacgaccggggcgagctcgccggccggctcacctgcagggccgtgaaaaaagagagaaagagaagaaatagaaaaggattttggggaagaagagggtggattgggcacggaggggtctaacagcaaatatgcagccacgctgtacagccatgtaggacggtcaatccgatcaaatgtgctttggaccgcaatgattcacttaaacaagttcatggaccttaatatcgattttacaagaccatggatctaagcgacaccacgcttcaagttcaaggaccgacggtgtattttactcaaatctcaatgttaagttgacggacctccagtgaacttattctattgctattagcagtttgaaaattgtttaggcccaactttgtgtccaaaaaatgttactccctccgggctgataatacttgtcgttttgaacaagggtgaggtcaaactttagaatctttgattatgaatcattttcaaaatatttgtctttcaaatatggtgaccacatgtatagattagtcttaaaaaatactttaataagatcatatatttgttaatacttttttacatattatgatagaaaatgatggtcaaagttgtttttcgaagaccgtgctcttgtccaaaacgacaagtattatcaacccggagggattagttgttagtgcttactctgtactagaggtggccaaacgggccgggccaaaacgggcggcccgaggcacggcggaacctgtagccggcacggcccggcacggcctgctacagtaacgggccgtgccggcacggcacgagtagccgtgccgtgcttgggccgccggccgagcccgcgggccggcacggcacggcacggctactgtagtaagtccgcatctcatccttccgcaagtccgtatctcatccctcccaactgacggcccagcccgctagccgcctccgcaagtccgttgagcacccctcctagctgatggcccagcccgccagccacctccgcaagtccgcatcgcatccctccgcgccatttcggttcctgggccaaccgtgccccgtccacggcccatttttcattcacgggcccgtactgacacggcgggccacacgcatgccgtgccggcacgggcacggcccggccatccacgggccgtgcttgggccggcggctcggcacgtgggttgggacggcacggcccgtttcatgagccgtgcctaacgggccgtgccgaaacgggccgtgccggacccgtgcccgtgccgtgccgggccgggccgcccgtttggccacctctactctgtactcgtactatggtgatggtgcaaatgcaacgcacggcaatcatgttacgtctgcgtgaatgcatgcttctgttctatctgcgcagtacaagtcacactatctttgtggatagaaaaaaaatagaagagatataaaatgcaagcacgtcaaagtataaaaatcacaaaccccatttctctgttatgaccagccatcttcgtggcatgaatgcatcctccttgccgctgaaaagtttgggaagaaaaaaaatgacattaccaacctcgaattaaggaggaaatccctaaaaatttcaaattatagatgcaaaaagggaccgctttgtctctccctccccccgtcacggccatgacaacgctcccatagtcccacatttcactggcactattcattggtgacagatgagaatcgttttcagccccttcattgctcgttgatgaaacgcccggggtccaatccaacaacgcttatcgccattcgcctcctcatccctccgtttcagcctcgaccatggcagccggtgcatgcaagacgcgaatcatatgctgctgctgctgctgctaagacagtcacacatgtttacaattccagtgaaatccggtccaaaatttgtaaaattcagacaactcggaccagttggaaaacacaaaaccccttgatttttcgatcaagttctaaaaaaaattaaaactaaattttaatttttttttcatgagatttatttaagagttcatcatttttttgttagtttataaacggttttcatgaaatctctggctagcatatacggaagcttgggggcaggtaaggtaggtaggtactccggaggagccgggcgaagggtcactactcacacttcactctcactctctcgtaccgaagcagtcacgaaagttgtcagcgtcatcacgaacacgcgacgacgcggacgccgcaacgacgagctagccggtgacctcagcggcgggcgcccctcgcgtcacccagccgctgaccaatctcgctctctgcagcctgcacgcgctccatgacagacggacggtgctcgctttccctacctttaccggccttgcgctcagcggcgggacacatctctgcacatggctccgcccgcataaatccaagcagaaaccaccacctcgttttgcctggccgctctgctcaacttccaagctccaaagttaagcaggcagctcatctgtttccaaaccaatccttagctatgctatggatgtgtttagctctaggatataaagtttcgatgtttcaaatcggatatacatacacatatttgaagtattaaatatagtctaataacaaaacaaattaatccgcgagacgaatttattaagcctaattaatctgtcattagcaaatatttactgtagcaacacattgtcaaatcatgacacaattaggcttaaaagattcgtctcgcaagttacacgcaatctgtgatattagttatttttttcgtttatatttaatactccatgcatgtgtctaaacattcgatgtgatatggtgtaaaattttatcacgggatctaagcaggccctatatgtgtgggccagccgaaagcccgaaattgaccattgccaggcgtcaatgcgactgtgaatccaggtactctacaaaaatgtcaactgttatacagtttattcgttagcaacttggcatggtcaccgttttgcctgtaataaactagtaactagaagtaacactaaaagtacagtaacagcaaggtaaacgacaacacttggcattacgcgcatcagccctgatataccaacaactcgtgaagactactactactacagctcgtgtactggattgcacggccgggcatatagcaaagggctaacttcctggcgcatccaaagcatgcttacccaatcgaaatgtaccctatccgttgcttacattacactacaaacaaagcagaacgaactgttcatcgtcggaggagggaagctaattagttgctcgtgtgatggcttacttaatccatgtttgttcagaatcttctttctttaagtacgtcccattcactgcctgtagtgcctactccgattgaccccttcacatgcagtgcatagcttacctaagcgttgaacttgcatgactgtcagacaaagttccaaatactcctgtcggtccaccttttgcattcttttctcgacgaaaaggtttttgtttgttgccgcccttcatggtcaggcgattggcaccactcttgagttagttttaggtgctagattccaactaataatcacccttttcttgttgccagatgcacacttttctggtatggaatctagcattttgccaccaccattatgtttgttgtgcatctgttatgaacttcctatctggttttgtccttgcagaaattcagattgggagcagattagcagctcctcaggttactggtatagaatatcattatacaaccaccatttgttaaaataggttgtgtttagatccaacttcagttcttttccatcacatcaacctgtcatacacacacaacttttcagtcacataatctccaattttaaccaagactgtgtttagttcagcgcaaagtttggattttggttgatccaaactttagatctaaacacaacgcaaaatctaaacttcgcgctgaactaaacacaactatgattaaaatccctatcaagttctgttcctgcagaaattcaagattcttcggccttcggagcaatgcgtcacagcgtcagtgagaaaagggtctgtgtcttatgacatgggcaacatccaggaatcaagtggtacacgggagaccgtggagaaaagggtcaggcttgcatatgaccctacaggaaatgtagaccatactgtactacctttggtaggggacaagcatggcctcgccgtccttgtcaaaaattttaaaaaaggataaattccatatgtagatccgtctatggacagctaggattgaattctttcatccaattatcaagcgctgccgaggtatcggcagccactgatttctttgattttccatgaccaatcaccaatgaacacatcggtttcatctacaattcaggtagctttctcactttgtacagaaaaaaaaagaacctgggtttgccaaactttcatgaaaaaacctgtgaaattatgtgttagcagcagcagaacagagaaaattcagtcatctgatgcaacaacgtacagtggtaactgctaagatccaacagaaaatttcacacaaagcaaatatcacaaaatagagtatcaagcattagaaaggtgctaagcactagtgtaattggattggatcggagcaaaaggattttgatcttatttacagatgcagaaattcagaagaatttcagacacatgcgtctttcttcctgaacaatgcctaagtttggaaagtacacacagaacaatgccattactctggcttgcaagcaacacccgccacacgcgcgtcgcgagccctgtcaactttacacatccgagcacaaagtgcactacacatgggagctcgccggcgccgccgccgccatggcgacctcgccggcgtcgaccagcgatggcagctgtcgcaatccgcgtacctaattgcctcaactgtctaatggtgtactaggtattcggtggaatcaatcaatcacacggtggtggtggtggtggtggtttagaattcggccgtgttgccgcacgacgaggacccgagctcgcgctgccggcggcggaaggacatgaggccgtcggacacgatgctcccggcgcagtcgtcgccgtcgccgcactcgaggctgctgccggtcaggtcggccgcgtcgtcggcctcgttccgcatggcccggagcgtcttcctcgccatgtcgcgccgcacgatgcccggggcgcactcctcggcgacgcggcggagggccgcgtccgcgccggcggcgcgcgcgaggccgcggaaccggaggctgccacggctcatggcgtacatcgccgcgacgcaccactcgtcgagctcggcgctgcgggtgtcgtgggagaggatggcggtgactgccgccacagcgcccgcgtccatcaacgccgcgcggtcctccgtgcacgctgccacgttgcatacgaccatgagcgccagcctacggatgggcatccgctctgcggtgctggacgcgacggcgaggagagcctttggcgcgcccgggaagcgggcgatctttgactggttgacggcggcgagggagaggtggtagagcgccatcccggcgtcgcggcgcgcgggcgcggcgtgggcgggggaggtgagcaggtcgaggaggggaggcaccgcgccgagcacgccgatggcggcgcggttgtcctcgttcagggcgaggccgaagagcgcgccggccgcgtgctcacgggcctccggcggcgacgtgctcgagcggagcacctcgacgagcggcggcacggcgcccgcgcggacgatgcgcaccttgttcgccggctcgagcgtgaggttcaccagcgcggccgtcgcgtcgacacgagcgctggcgtggcgcgggatgagcagcacgcggcggagcgcgccgagcatccgcggcgtgcagagcgcgcgccgccgctccgcgctctcccgcgtggcctcccggaggccggcaacggccaagaccacctcctcctcctcctccgcatccatcaccttggcaaccaccacgtcctcgagcggatcaaccgccatctccacctgctcccggaccgcatccttgtttgtcccctccttcacgggcttcacaccaacctcgt

SEQ ID NO: 18389 - DNA, 6522 bp, Oryza sativa
gcgcgcaccaggtcccaatcgccgccttgagcgccgcgttgggtatcaccgcgtcggaggcggaccccatcccgggcggcaggaacgcgagctccgcgcaggcctggaggcaggcgcgctcgtacgtctgccccgacgggaggatcaccgggtcggccatgagcgcgcccaggatcgagcacacgaactcggccggaggcgcttcttcctccgcaacaacaacaaccgccgaacgcgcaggcgagtggggctcggggtccggcggggaggagggagacgacggcgcgctgcggtggaacggcagcttccagcggcgagggcggcccgcacccatgaaacgcgcgcgcggctgcgggggtggtgttcagcggcggcggtggcggcgaggggaggaggagctagaggagctaggaggtggaggtagtgatgcttttgctgtggcggccattgggtctcggggggtttgggtttgtttttttatttttctcttttggggttcgggtggtttgtgggtgccttggctggaactgaggtcagtgtgtgcgcgcttctcctcggttttatgcggagacaaaccttagccaggaagggatcgcgcgcgggcgggtgggtctccgtgtcgcggttttttgcggtggatttgctgtgattttggctgcgtttcacggtgggagtacggggcgggggtggtgcgccgcgcgtttgttcagcggctggggtgggcgtttttttttttggccggaaacaccggttgcttggttggttcagcgagtgagctcaggcgagtgcgccgcttgactgacacggtgtctcgtgcaacgcacgaatgtggtgtaatagaagaatatgaaatcgctggttgacctgacctagcaagatcgttttgcggcgagtcgtagcacacgatgcgtctccgactcgtgcacatctctatcagaaaaccgaaagaagagtcagaaaaagaatgaggctcccatcgttggatggtctaatcagtcgaaaaagccaaattttaaatttttaagtttaattttgagattgattttgaaatattttcaacgtactttcttttccaacattgatttttaaatcaccaaaaacccatttataaaagttttacctataaatttatttttatttcctactatggggatctgatcttatatcaactgccatttcttaccgatgagggtctcaccgtctcagggaagacacgtcaaacattttccctttttctctcggaattccggacggtgcagaatgcccaccgaacctcgtgagatgcggcttgctgctgctgccccctcgtttcactgttcgtgccagccaaacttccccaaggcgcacaccacaaacgtgagatcgttttcaggtctcgtctgcgagctcggaaagacgctgcgctgagccaatttgctcggcgtcgtggacgccgcggacaaacgcctcaacgtccggccgccagagagcgctgccctgctgcccctgcaacaacggcgaactcccctgcgcacaagaagacgatcccatcgtcctcaattccacaggagaggaattggtgccgcgtgtgaaccggataggccgagtcaaagcaaagctccatcgatgtctgcatctcggggaatctgacacatgtgagcaatgactcgttatcccctcgcaaaatttttagtattaaatatataaaataataactaattacatagattacgtgtaaattatgagataaatcttttaaggctaattgctatatgatttaacaatatggtgctacagtaaaacatttgctaataatggattactcgcagtttacaggcgaaatatgtagattttttattagtctatatttaatatttataatgtgtgtctgtatatacgatttgacacgccaaaagatctaatcaccccctcggtggagtaccggagtagctccctttgtttatgtgtgtccgtcaatccgtgtgtgtagccgtgtgggggatgtggctggccgctggtgaattgggctagtgtttttttttaacttttttagtgaaggatatttttacccggtatatacatccaactggatatatgtagtctttttaaattagtaacctagcttatcaaataaggaacttaaccctcaaataactcaatctgaaattcgcttatacgaagatttgaaatcaagactttagaatgctaatcagttcactgcaccaattgatatacatcccctttcacctggtaaatgaattgggcgagtgtcggggtgtccgtgtttatcttcggtgtcttgcttcgcctggtaaatgcactgtcacttttgtcgctgcttgaattctcttctgctgcctagctcgctgatcaagatcacttgctcaggctctctgtttatttagttcccatatactttttcctaaaaacatcacatcgaatctttgaatacatacatacataaagtattagatatagataaattaaaaaactaattatacagttagggaggaaatcacgagacgaatcttttgagcctaattagcccatgattagccataagtgctacagtaactcacatgtgctaatgacggattaattaggctcaaaagattcgtctcgcggtttccaggcgagttatgaaattaattttttcattcgtgtctgaaaatcccttccgacatccgatcaacgtccgatgtgacaccaaaaaattttaatttcaaaaaaaacatgccctcagtgtcaaagactggctgagccgtggcagattggccgatcagtgtcaaagtgttgctatgtgttgagattgggaataattaattatttatcactctcacaaatagttataaagaatttatcactggacccatatattatagacacataagggctcatatatcatagacagcgagtgacaaataataaattgtcacatcttaaagtggcaaaaagtttgtgtttagttcagcgcaaagtttagattttgattgaaattgaagatgatgtgactgaaaagttgtgtgtgtatgacaggttgatgtgatggaaaaggactgaaatttagatccaaactttagatctaaacacagccttaaatgtcccgcaaagggcattaagcagaatgaaaacccaccgcatttctacccaaatcgagacatggttgagcggattgttgctatcattatttatttaattgtagagataaattaaatatcataataaataaacttaataaataatataaaatagatgttcttagcaatataattacagaagaaagtttttatagaaaatgtatttttagagcttgagtaaataatccgtttcaacaatccgacaaataattaaaaaaggtagggcattagattaggatgaaatccaagcttaggacagctatatatatcactcaactttggtgcttagtggcccaaaatataatatttgcttggagacaaacgaaaatttaaccccatccgaggtacagtttggtggcattcatgcaagtataagcttagtccattcctaatcaccaacccgctattaaactgttagtagcttcggttattaggtcactaacctgtcatggcggtggctacattgtagactagtttaatttacacaatctacttaccaagtaccaactgggtagctcttgtctcttgttatgaagtacatttcttttgccacattttataaaaaaaataatgatggcggttcatggcataatgatgaggccagactgttgttagtatgttaagcattgggcattaagcaaaatgaaatgcttaagagttaagacagtggcttgaaagatgaatcaaaatttaatctcatctgaggttgtgaggtggcattcatgcaaatatcaaaaattcagtccatcctattcaccaaccaggtattaaagtactgttacaatcactattattggttactacgacatcagtagtacttaggttagtaactcggcatgcatagcacatggctatgtggtaagattagtttaattaatctggattgcaaaagtaggctcccgtcctgattctttcccccgggtagctcttgtctcttgttgtaaacaacactaatcacttgccatcttccattaaacaaacaaatgacggtttcataacataatcccttgtggagatgtgggcactaagattatatatacacacacatatgcaacaaagtattgttggcactgaagagtgcagcagcaaagacatcggtctcttgcgactttaagcagcctagatagagggtgccttgcagagaaggtttattccttgggctcagtagaagtgtagtagaacactagaacatgttctctttttttcctttcaccaacaaaaggtacaccctctggctccacatgttttctttctcctttgttgagtactccaataccccccctcatgttcttctgttcaatgctctggtcattgaaatacgcatatacttacattactagtccctaaattgaacgtacgtgtgtgggccaagagaaacatccggtatggtgatctattgatctgggtgtattgtgacacttcaagcgcctgcaaaaaggatggctgatgcatatatttatgttgcaacttgcaagttgcatctccctctcttcaaaattttagacaactaggccttgtttgaagtagtttatagagcggattatatctatttaattgtaaggataaattaaatagtttaaaaataaacttaataaagaaataagtagtccaagtaatacgacagaaaagttggttttttagaaaatgtaactttatgggcgtggatctatagtaataatctggtgaagtagctaaaaacgtatttttagaagcgtgtttgtgtatttgcattgtaaatgttctaagacgatatgttctacaatttactaactacttcctccatttcacaatataagtcattctagtatttcccacattcatattaatgttattgaatctagatagatatatatgtttgaattcattaatatcaatatgaatgtgggaaatgctagaatgacttatattgtgaaacggagggagtatttgtgattgtagcactgatcaaattttacatttactcattaatacttgcattatttcagttctcaaaaatgaaacagcatgcttatgtagcatgctacataccccaattgcaaagagtggcctcatcttgatgcatgcccatgatccgacgttcttggaacaaacgcaaaggacacaagaatgcatgctcccaatctcccatatgccgagttgctgatcgatcaatcaacgatgtattacacacatcaacccagcagcacgccatggcgaacgctggagattcccatcatggcttctctctgcaacttggaacacatgtagccattgcaacaatatgtttgtgggtgaaggggatcattcagattccatcaggctgaaagcctgaaagctaagctatatacctgcatagtatgatgcaggctcgtttgcttgcttgctagatctatagctagttcacatcactgactgatcgttatcagtaacagaaatcatttcacgcattgccgttctgcagccgcaagtgacgattaattattgcatgtgttgaactccgactctctcctggatgaagcactgagctgaagaaaggcagatgcatgcaaaagcaggcagggaagaaaaggcaggcaagagagagctttacaagagccaggtgcacgctgaatgatatatgcctgaaaagtttcagttgttcacaccaacatgtggtaattacgaatgttagtaattagtatcagttgttcacaccaacatgtgttaattactacttaattactagtagtttcctttcctctcacaaatccatccatagcatcattcattccatcactgcaacatgtgttatttttgactgaatgaaatgggatgtttaacagttgaatagtaatagaggaatgattcgagggtacaaccaaataaattaactactatagagtttaaaaatagatttgaaataatattttaaaaatatatgtagaaagttttttaaaaaatcgtactacctccatttcaaaatttagttatttttagtacagtagcttatcttaaaatgaaactatttttccacctatctcctcctctcaactaatcacaaccatctccttcatctactttctctttttaactaagcataacattttttctatcattctcacatacttttttaatacatgtgtcaatctaaaaatgcttacatttcgagtcggaggaagtagcgtttagaaactcgtatagtgtgtgttttacttgtcatattccatcccattataaatggggaaaagaacaaaccaagcaagaatctgacaggatatactgtgtatacctagtgatttcttcaggcttcagaatcttgacagatattgcagtagacagtagtgcattaatctacgactttgtttgcaaagtgtcattttttgctagataatgtaatgcaaagcgacttgtacacacctgctttggataggaagagggctgcaggaat

SEQ ID NO: 18390 - DNA, 655 bp, Oryza sativa
accacggcggccggcgagaacgaggaggtggcggagatatgcaagaagacgtcgtacccggaggtgtgcattgccacagcggggaagcaggcgtccaagtacggcgccgccgtggacccgctggcggtgctcaacatgcaggtggacgcgttcgcgctgcgcacggaggcggcgcggaagcacctgacggaggcggtgaagacggcgacgccgaaggcggcgaaggcgctggacctgtgcgacagcctgtacctggacgtcgaggacaacctcggcgcggcgcggcgcgccatcgggttcaaggacgccgtcaccatccgcgccatgatgggcatggcggcgcaggacatgcagggctgcgacgagcagttcaggaaggtcggcgagaagaaccccatggaccacttcaaccggtccctcctcgagatgtccgagatctgccgctccctctccaacatgatctgatcgatcgctctcgccgcccgccaccgtgccggcgcgcgcaccgcgcacgcgtgccgccggccggcgaccctttgcgtgagagcgagcaagcgcgctccagcagcgctggtgattgaagcttctctttttaatttgttttctttcgcttctttttttttaacgatcttgttttcttagtgagggctgcagg

SEQ ID NO: 18391 - DNA, 844 bp, Oryza sativa
caactgccgtgaagcataagaaaccactttgccatcctgcatcaacacacatcctagcccctggcgagatgcatcacaatagacctggaaatctttcgtctgatcaggcaggattaagaccggtgcagacaccaaccgtcgttgagttcttcaaaactcctattgcattcagcagaccagataaacttttcttccttcttcaatagctgtgtcattggcttagcaattttagagaagttctcaatgaaccggcggtaataacccgcaagtcctaagaaactccgaacctgagtgactgtccttggtggggtccatttggtaactgactccacatttgctggatccacagctactccttgagcattcacgatgtgaccgagaaactgaacttccttaagccagaagtcgcacttgctgatcttggcatatagctggtgctcttttaacttttcaagtaccagccgaagatgctgctcatgttcttcctcggacttggagtagattagtatgtcatcgatgaaaaccacgacaaacttgtctagaaattccataaacaccttgttcatcaaattcatgaagaaggcaggtgcattagtgagtccgaaagacataactgtgcattcgaacaacccgtaccgagtgatgaatgctgtctttggaatatcctcttcgcggatcctcaactggtgataacctgatcgcaggtctatcttagagaacaccgtagctcctttcaactgatcaaacagatcatcaatccttggcaaaggatacttgttcttgatggtgacctcattgagtgcgcggtagtcaacgcacatcctcttggttttgtctttcttct

SEQ ID NO: 18392 - DNA, 1510 bp, Oryza sativa
aatggcatgaagccagtcgtgggcctcgattgggttggtggtgcttgagaaggtgggcggcttgacacgaagaaattctaacaatttggactgaggaggcggaggaccaaattgcaggttctgctgctgcggctgtgcttgctgctgcacctgctgcaacacctgatggtactgttgctgcatctgttgcatcatcattgtcatcatctgagtctgattgttcaacacctgagcaattgttgggttctcgggcggtggggacggactgttgtcagatgcaccgttggcacgtgctccattgatcggctcttcgctgccactggcgttgttggagtcgcgtgaaccattccttatctccatctgaggggataggtggaaatatgagaaaaggaagaaaaacagggggctcagaaactaatcttgcttatgaatttaagtgcaattatcttaatcttgattaaaacactgaaaaagaggcacgcaactcctaattgaggcagtcataccactgacacatgatatcgaccgccgactaacccacaagcaacaaacctaaacacgaaaactagcaagcaaacagactaagaaggcgataaagctaagggcggcgactctgaagctcgaggcggcgcttgcaaacgagggataggactgacatctaaagtagacaagggataggaaccaactcatgctcaaatccaaattaaacaaagcaaaagaagactcaaataaataaccgagcatgatgatttttatgcatagaatatttttcatgaactcaaataaagacactaatgcaactaaacaataaattaatgcatagactagttgcatggaaaatgatgcgcataacattgcccccaccgaatatagacacgacctaatgcataacccccaataaattcccgactgactgtcgaataaactccaactaaaatttttctaaagccctaggctgagctcatttttttttttaaaaaaaaaaaaaaaatccgatccgaatgaacgaccaagatttttcccgcaaaccaaagaggcaaaactccaaattttcccaaaacaaattccaagtgcaaaaaggcatatgcagatgaaaaaggggttcagagggctcttaggtttccagttggcttgtcctacggtcaaggtcggctctgataccaacttgtcacgcccagaaattctcgaaccagaatttctaagctgaatgtgcattaaatccctgtccaggaccagccagggtacacaaacgacaattgttgacatacagatccacgtcttataaaaaaaatagaaaagattacaaatgcagcggaaaagataaaagcgagctaaaccgggaagcttgacttcagcagcgggtgtctccactccacaggcaaaccttgacggcagcgacgaaaccaacttcgataaaacagctccaactaggaagatcttcagctctggtgtgggggaaaagagagcaagactgagtactacccactgtactcagcaagtcataccggaa

SEQ ID NO: 18393 - DNA, 7421 bp, Oryza sativa
attcctgcagcccaatcttcgtttcttccctaataaaacctggccactgtttctttgttggtcctgtgagaaaagaaaaacaacagtaacacaatactcttaataccttttggaatataaattcaaccttctcactctaacctttcaatttttatgctattgtcacagaaaacatgctagctcacagtacggagaccaataagaaaggccaagaatattcaactcttcttgatcctaagtttgccccggtgctactatttgttgattacaacttagatgatacacacgatgaggtcaactccgaggatgaagactactccatagaagatgaagatgaagagttagatcacgaggatgataattcatttgacgaggatattagtgacaacgataaggatgatgataaacttggagaggcggcaaatgacatttgtaaaggagattataatgaaaacaatgaggatgctgggacagaggaaagtgacgacaccgatgaccaagaggaagatgtcaccatattcttctacagtatagccagaaaagaactattatgcaaaagaggtgatatattcaattgccactcatactggagaacaccacagggctggttgcttatggtacaccttgaatcacatgaaacattcttatggagtcctttcacagatcaaaggatcaatctacccttggatgaagatagtttccttacaaataatgaggtcgtttgtttgctatcacataaacccacttatccaaattgtgttgtgctagtggtaaattgtaggaacacatcattttggtattgctatcctcaagggcacacatggttcaagcatgagtaccagtcaagtatgatcactactcatgaaaaccgtagaaacgtcattctaacaatgaaagatctcactgcagttggagggaggttttgcacatatttaagtaaggagaaggcaattgtgacacttgagttcttgccaaatccaacatttacaactacgccagttaaggatgcatcagatccaatttattggtacaccacttttactaattgcttgttagaatcttgtggagagttgttcatgttatcatttaaacatccagtggtatgtgctcagaaggttgtgcagattgaagttcataaactcgatttatctagaagaatttgggtgaaagttaacacaattggtaacaaggcatttttggttgagtgtattggctttggatcatcgctcactgcagaagatgttggattgaagagaaactgcatttattttgtgagacctaatgataagggtttgtatgtttatgacatggaacgaggaactactgtaatgcataatccaggggcagacctaccggataacatgacacttcagatcgtggtgcctccattttgaatcgttcacgctggacatatgtttccccttgttttgtttaataatgttctaatgatacatcttgaatgttggttgtttaaattattgaatatacatttccctttgttattttttcttttattataaattataagagaatatatttttttcttttattataaattataagagaataataagtgatagaaaagtactccctttttaacagatgacattgttaactgtttaattgtgtttgacaattcgtcttattaaaaaaaagtaagtgtcatctttttttaaacttttttcattattattgaagaaactaaacgtgatctacatttttacatatttacactaaatttttaaataagatggctgattaaatgttatgctaaacattaacgggttcatctgataataacggaggtagtattagattggacaacgtgtataacttttttacaattaattttgagctttggaactattaataacaaaacttttcttttaaaacaaagtgaggtgcaaagtattatgtatatgaaataaggtgataacgactggttaagaataatcctcgtttcatttccgtgttacataatgaaatcgtgggaaatcgtgcaaatgtctagcttgagccgagtgtccatgttttcaaataatctggcacagccatagtgctctttgatctccatatactacatgactgtcacgagtacaacagcgattttcccgtgcggctggaatcggtttttgcgggcggatctttcacccatctggaatgaggtgtctgcgaagatcccgattttcgcatgcgagtgacgcatacgcacgggaaaaaaaataaaaaaaaaaaaagcaaaaacgccatcaccaccgtcgtcgtcgccgccgccttgcccgaagcccgccgccgtcaccaccgttgtcgtcgtcgttgccgccttgcctgaaacctgccgccgtcgtccccgcggcggcaggcgacggatccggcctccccgcggtggtcggcgacggatcagctcccctgcatcgatcgacgtcttcggcagcatggaggcgcggtacctggcgccagatagggggagctggagatcgatcgaggaagcatagaagcaacacggaagcagatcctctgacttaactgcacatgcagttgagtcactgacatgtgggtctcacttttctatgggccacatgtcaggcagttgagtcataagagccatttctaagcaacacgtagtatcaccatcgctgacgctcgctgctgcatgcttggtccgtgggggtaaggtacgacaggatgccggagttgtggtgcattctttcacctcctttgcttgtcgcgctcaaggttatcagtgtaccggtttgtactctagtatcttattataatattacgatcctatcaaatcaaaacgataccgatctcatctaatatcttaatttttatagtatcatgatcttactattcatttttatatgatcctacgaaatattagtatcctgattctacgatcgctacgatcccgaaatattcacaagtcgatgtaaaggtttgtgtgggtttagtgtttgaccttggcccttacaatgtgtgtaaacaatatactcctattaccatttaaggttgaacatggaatatatctttttctttttcagaattacatggaatgtatctgaatttactgtgtggacatacccttgccatgtttctcaagtcaatgtatgaatatgcccttgcaagtactgtatttttttttcatatttttactttttaaatataaattgtaaaaaacatgccttccacgtgcattattacgagtctttatatatgtatatatatagtctgaatctgttgggtgtgcctaaacttcatgcaacacattttttagccaaaaaccatcggatttcagcctatgagattaaaaccctatatgattaagacaagaaccacatggagtagtaaaatattaattattaataagttgtggcataacttaatttagtcaaaatacaaaaaaaaatccattttagagaactaacaaacacaaaatttacattcaaatatagaaaaattacatatgtaagtgcagtgtaattatactacatgtataatgtaactacactgtaaacaccaggtacatactgtaaaatctgtaattccatccgtgcgaaactgtatacagcccgcggaccgcggcagacgccagacgcaaacatgcaagtgtgaaacatgaagtgtaaaagtgtaaacacagcaagcagcaagcagcgagcagcggtggtatgagcacaggcaacggatttaactggacacgaatcttatagcgaatccaatggccataaaactgactgctatatatggagccataaatctggcgacaaaaatatagtaaaactgtttgtcttatttaatagcaaattagtgctgtgcgttacaacgggaatactcaaattttatgagatgattaacttcactttaagaaaagagtaaatttcataaaactacagatatcatgatcaaactatcgtaaaactacatatttaactcgatgtattacaaaactagacatttaaaatagggtgtcacaaaactacatagttagtaacaaaattatcataaaacgatttagaacaaatttagtcacaaaactaacaatagtgctagagatttaaactttaaaatatgtaattttgtgataactttagtattaaacatatagttttatgatacttaaccttaaatctgtaattttgtgataaatttagtgctaaatctgtagttttgtaatataatgtcttaaatatatagttttatgatattatgatcaaaatacccttagttttgtaaaatttactcttagggaaaaaaaaatctgcagttacaactcataacttacaaagaaatcaatccaaacgtaggtgtcggatctacctttcatgacataacagtaaagcaaggaaagaaaattactataaccgcttcaattcaaagtaggatgctctgcaaaaaatatttcgtggtggatgggactgcatcatcaaaagtcatgaaaaaaaatcatgaagctaactcaacaactagattagctcaaatcccatgataaaatgcttaaaatgaattaaaaatatgcaactcaatgagctcaaatataaggtacataggtcaaaaatcaaatgaaaaagggataggttcttaatcttataacatgaacaattagatagttgaataggtttatttcgataattcttttagaaaaaaaaaggtaatatgattgattagctactcctcctatgtttttttttattttcttcatactttaccggaccgggatgccacattagtgaaaccaacttcatactaccaggagatctaatttaaactagttttctaagttttttttttctggggggggtttcaagatttttggtgttgtagttcagggatacaatttaaacccgacagaaagataagggatgtaaagtggacatattcgtaacaaaaaaacaaaacaaagcaaattttacccaataggcccaatcagctcaactaaaaccaacactaagggttccacccacaccatctacgccgctgcctcagctccgcatcacgcaccactgcctatccccgctccacattgcgcgacatttcattttctcctttgttctgtgtagtgccgtcgtgccccaccgcctcctcttgcgcgattccgccccgccccccctcctcctccatcatgatatcgtctcctcactggccatccctgtccttgtccttgccctaccagggctccgacgctcattgtcgctgcctccacaagtacctctacatctagtggtgatggcaacggaggaagggagccagggtttcagcggctggtagctgatgatgtgatgacgatgatgcatctcatgtggcttgaggtataacaaagattttttttaaggaatttttggatttgcattttagcttcggttcttgtcttttccttgtggtgttatgcattcgatttggttgtatggaagctatgaaacatttattttggaaagtgcttatgtaagattgggttcttatgaggattctgttgttatgattttttccctttatccgattctgatgatacgaaggaactaccaggattaggggcgacgggtgcaacacgtgcgacgggtgaaggcgcattgtgatggacgaaagcgtattagtacgattggaaaattatgaattttaagggatgtaaagtggacctatttgtaacaaaaaaaaaacaaaacaaagcagctctggcagcccaactaaaactaaccctaagggttccacccactacatctatgccgacgcatctcccccactccacacggcgcaacactttctcctctgttccgtgtagcgccgccgacccaccttgatccactgcctcctcttgcacggttccgtcccgcccctacgccctccaccacctcctccccctcctcctcctccatcctgatatcgtctcctcgccagtcatctctatgcttgcctatgccctaccaggggtccgatgatcgttgtcgctgcctccacaagtacctctacatctagtggtgatgggagcagaggaagggtgatgagaacaggggttcagtggctggtagatgatgtgacgtcgatgatgcctctcatgtggatggaggtataacaaagattgggttttcttagggaacttttggttagctttttagctttggttcttgtttttcccttgtggtgttatgtatccgatttggttggataaaagctgtaaaacacctattttggaaagtgcttttttaagattggattcttatgagcattctgttgttatgatttttccctttctctgattctgatgacgcaaaggaacgaccggtattagggggcgacgggcgcaacatgcatgacgggtgaagccgcaccatgacggatcgaagcgtattagtacgatcagaaaattatggattctttagtagatatagatgtgataatcatgaaaataagggtatgtttagcacagctcgagctcttgaaattctaccaaacagtttcagttccatctaaaatgagagtggaactgggggagcgctatcacaaaacgaactagagaggtggttttgggtttaggctgctccataactatactccagacctagggactgtttggtaaagctctaactcctaaatttatctccaggagttgagtctggagtggagttgttgagctatctaaacccaactctacctctctagtttattttgtgagagcgctttactcagctccactccttttttttaaactaaaccagcaggagaactgtcaattatattttcaataagcaggagtaaaaccctagatgggttacaagaaaagaaaaaaaaaacaaccaccggctggctgaataactacacagcacatgccataactcactaacaactgaaaccactaacggagcccaacttagggtatagttaccaagcttgaccgaaaagacataggggttctgactttgcaaccgtgtcattgttgccgagcttgctgccaagcgacagagtagcaccgacttcaaaccagatgcatcatccaaaccaagctcgctgccaaaatgatcaagtggcttcgactttccacgatgaacttcagccaaagccgcgtaagcgccacatcctattcacagccaacaacaacacccctagaaagagaatgtagcatgtcatcgttgcccagctttgtcaccccgacgaaccagctctgactccacctagcaaaatcaaacaaagagcgaaggtcgcccaccgcaaaacaaaaggtgggaccagaaagcgaaggcctcgtcaaaacctaggatttaaaagcttcgaagccaatgcatagaccatcaacgatatccttgcacgaagaagtctctacaaagcgatgcccccaagctggacatgacatagattgccgccacggctcgtcggaagctggagtaaggttttcacccagagagcggtaaggacagtggggctgcaggaat

SEQ ID NO: 18394 - DNA, 9349 bp, Oryza sativa
cattttttttctaatcaaatagataatccacggtagtaatcaggcgaataatctttttctaaggggcccgtagtttggtttggtcttttatgtgtttaattggatgttatttttactcagtaaattcattctatgtttattgcgtttgtacctacgtgttgtttttaataaaatctggccagtgtgtctttgctgtcctgacggaaaaagaaaaaataaaaacaataagaatccttaaattgtttattttccttttaaaatacaattcaaccttttttttgttagtaagagcatgttgtctaaccctcttatttattcaatgatattagcacacttggctcatggtagctcgttctttttttttttaaaaaaagaaaaacaaagcagtctaacctttcaataaatttctgcagcactgtcacagggaaaaaaaatgctatcccacagtatagacagttgtaaggaagaccaagaacatctagctcttctagatcctaagcttgccccggtgctactgttggttgcttaccgcattattgatacagacgacaagggcaacaccgatgatgaatattgtcccatagatgatgaagaggaagaattagatcacggggatgaaaattcacatgatgaggatatcgttgataacgataaggatgattgtgaccttggggatgaagatgacaatcacacgtgcgaaagagattatgatggaagcgatgatgctggaacggaggaaagtgatgacagcgatgatcaggaggaagatgacactcttttcttctacagtatagctaaaagagaattgctatccaaaagagtggatgaattcggcatccacttatattggataacagcacaaggctggttgcttatggtgcaccttgaattgtatgaaattttcctatggagtcccatcacaaatcaaaagatcaacctacccttcgatgaagacaattttcttgcgaataataatgtggtcaagtgctttctatcacataaaccttctgatccaaactgtatcgtgctagtagtaaattgcagggacacaatgttctggtattgccatcctaaaggagacgtatggttcaggcatgagtaccaatcaagtatgattagtacaggagaggacagagaaaatgttattgcaactgtgaaacaccttacggctgttggggggagattccatgcatatttaaatcaggataaggcaattttgacacttgaattcctgccaaagccaacatttacaactacgccagttaaggatgcaccagatccaagttattggtgcacgttttctacttgtttcttgttagaatcaggtggagagttgttcacgttgtcatttaaacatccaattgaatgtgttgataaggttatgcaaattgaagttcataaactcaatttatctcaaagaatttggatgaaagttagcacaattgataacaaggcatttttggttgactgtactggctttggagcatcactcaatgcagaagatgttggattgaagaggaactgcatttactttgtaagacctaaagataagggattatatgtttataacatggaacgaggaactaccaccatacacaatccaggggaagatctaccagataacattgcacttgagattgtgatgcctccatcttgaatccttcatgttgtacatatgttatccttttcttaagataatgttttaacggtatatcttggactgataagttctttaaatcactttattttttttcattttcatattttttattaaattaagaaaataataataagtaatggaaaaaatagattggagaatatatgtatgaaatttcttataattaattttaagtattggaactattagtaaaaaaaaattttctttcataatcttttgcagccgtacatgaactatttaaatttaaagaaaattaatatattgtaggggcctcccatactgttttccaataaaaaaataattgttttttatgaggaatacctctattactgtaaagttatgattaatatttgtgatgaacaattcgctatgcaaattatttaaccaaagaattggttttatagtatgtgtgaatgttggtgtgaatgcgtgtgattcatgtgggttaggttgtgatatctgtacccagaaacgattgttctgtctgattatgtgcagttggcttgaggtccgccttggtcaattgtgaggatcgggacaatgctcagggagaagcagaggtctaatgtggttaggataccatgtgagaaggtgactagagttaggattcttcgaggtcaacttcggtcaacggtggggatcgggactagtcgactcagggaggagttgaggtctagacgatcaaggataccagatgacgaaattaggtacgagatggcacatggcacatgacacatgatggatggacatcgtgtgggagagatcttcgcaacgggtttcacgaggtgtgtgtgcaagtttcggtgtctgcgaaggagattggaagaaattcgagaagagtatatggtgctacagatgggtgaggtactgtagcatgcagatacgtgtgtttacatgtgagcagtatatatgcatgtatgtatgcgtgcccatgcatgtgcatgtgtggctcagtggttctgcatgttgatgcggggacgtctgatgggcgatcgcgatccagcgatcggtcccgcccctcatttctccccttcctcctccccttttttttttcctattacagtacaccacacaaaaattttaaaaaaacaaaacgttagaaaaaatttatgtacaaaaaatttgaattcaaattcaaatttgaatcgggtacgtaaacttttgacttataaactttggatctataaacttgtctataaactttaggcctatagaaatactatatatgaaaaatatttaaatttaaattcaaatttaaatcggaaatttgaattcaaattcaaatttgaatcagatataattcaaattcaaattttaaatcgggtataattcaaattcaaatttgaaatcgggtatataaactttaggtctataaactttaggtgcataaactttagatgtatagaaatactatatatgaaaaatatttgaattcaaattcaaatttgaatcggacataatccaaattcaaatttgaatcggatatataaactttaggtctataaactttaggtgtataaactttagatgtatagaaatactatatataaaaagtatttgaattcaaattcaaatttgaatcagatatataaacttttgacttataaacttttggtctctaaactttagatgtgtaaacttggtgtataaactttaggtatataaatttactaaaataggaaagtaatgcggtgccaaaaaaggaaaccaggtggagagagggagggggagggggagggggagggaaccgatcgctctgggcgggcgagtgatcgctcgcccagtagcatttccggcgggggagcgcccgatccagctccgcccgcgccgggcgactggccaacagcattatcgaatactccgtccatccaaaaaagacaaaccctggtttccgtgcccaacgtttgaccgtccgtcttatttgaaaaaattatgaaaaaaattaaaaagacaagtcacgcataaaatattaatcatgttttatcatctaacaacaatgaaaatacaaattttaaaaaaaattcatataagacggacagtcaaagttggacacgcaaacccagggtttgccttttttttttggacggagggagtacataattgtttagaccaaaagaattcctcacttccggtccaagctctgacttcaggagtgccaacctggttgtgcagaaattgaatccaccaacctggtcgtcttgctggtcagcttctcgccagcctggccacctgcatacaacccttcgcgcaccgtcccgatctcagccatggacgctcgctccgccgtctgtcgccgcttccatgtcctacgcaaatgctccggcgcttccccattgtcctctggcctctgcatagaattcctcctttcctagctcaggccaccgccctcacttccatttgtttcctacgttgtcacgcccagaaattctcgaaccagaatttctaagctgaatgtgcattaaatccctgtccaggaccagccagggtacacaaacgacaattgttgacatacagatccacgtcttataaaaaaaatagaaaagattacaaatgcagcggaaaagataaaagcgagctaaaccgggaagcttgacttcagcagcgggtgtctccactccacaggcaaaccttgacggcagcgacgaaaccaacttcgataaaacagctccaactaggaagatcttcagctctggtgtgggggaaaagagagcaagactgagtactacccactgtactcagcaagtcataccggaagaggaggtatgatgcaggatataaccaaaggaagctaggggttcttttgcataaagcaggcatttcaaagcagtagttgaaagcagtaaaacaactgtagtaattaatcaatattaaccaaacactgtccaacgctacaccacgttgcaacaggcccaaccaacctcctgaactacaccagttcattaagctaaactaggggtgagactaatcacggtgaatctggttgatcgcccataaccgcgggcacggctattcgaatagttttactctggccagaggtgtacaactgtacccacaagacacgattccacacatgtcgccatgccccgaagtatcaccatgatactgcaaagggggaaatcgtgacaagaccctccacataaccctcccctaaccatccacaccacgctaaggtttcacccccacccctcaaaaggcagtgggcggtcccctcttgcgccgcggtgaatccggcagctggacaaccggacaccccggccgacccaactccatcacgcccaccctcgccaccggtgcctaggaaagggtcgagctatacttcagatcaagcagttacccactcccgcttgtggtaagcacggtaagtctcccagggtttcccgtgaaccggtccttaactgccatgggtgcgaccagcaaaaccatgcacccacagcccaccattcagtgtattttaattaactaacaccattgcggtggcaccaacctaaagctatgccaatagacaaagtctaagtaataatgtgatccctttttgtgtactagttgaactaagcatggctaagcatttcctaaaccaacatctaatcattttgatacccaggttatcaatggcatagggtaaccaatatgtggctgaggaataggacccatcccacattacattgtaaaagaatgcaacatttaatagaaatgcgggatatttgtaaattgggtacaatatgatcaaatgtaaagcatgacttgccttgctctcgcactgacgagacctcagcaacgtcttcgagaaaccgtggatcgacgaaacggccgaaacctacgcgacaaacaaagcacacaagcaaaacaggctataagactactgaaacaggaaacaaaaccatttttaatggattctttgcatttttcttgatttactgagacttgaatggacttaaacggagctcggatgaattacttatgaattttagaagataaactgtgtttattactataaaagaaaagccttaatgtatttattgcgcaataagtcccagggctgacgtcagcaaggggtggggcggctgcgccgacaggcgggccccactggcagcggcacaaggggagagggagggggcggctggcatgtgggccccactgggcagcggcacagggcgggagagggaggcgccagccgggctcggctcggcctcaaagccgaccggcggccaaggcgaggcggcggcgaggcacggccaccgacggcggtgaccggcggtgcgggaagcggcggcgacggccgaaaggcggcggcagcggctgaaggcgacggcacacgcgcgaaggccggcggcgcacacgggagagggggaaaaaggaagggggagaggggattcctcaccgatgagcacgacggccggcgcgaaggaagaaagcggcggcgacgaccggcgatgccgaggtgcggatgggcggcggcggcacgctaggagaaaacaaagaggggttaggggtagggagagcgaccacggcggctagagcagccggccggagttgggtggaaatggagagctcaccggcgtgcgagggaaacggcgcttcggcgacgattggcggcaaccgaatggtggccgaggtgcgggcgggctcggtgagcgcgacggcggcgactgcgcggcacggcggtggctatagaggcggcggcgcgtggccggagacggcggtaggcggcggcgcaaggggcgagcggcgcggcgacgataggaagcacgggagggcgcggcgagtgcgaaaaacgagagaggaagacgcggggagcgatttataggtgcgggagggggcggacgtggccggggaggtggccgatttggccggcgacgtggggaggagagagagtgagagaggtggattcgaaatcgaatcccgccctctcgagcgcgcgcgcgggccgggagatgcgggggaatcggcggcgacgtgggcgcgaggtgcgggcgcggagtggaggcgcgacgtggagcggagaaggcggcggcgcggcggattcggcggcggcatgggcggttggagcttcggctccagcggccggaggtgggagacgaccgacaggtggggcccacctgtcggcgtcccgagagagaggagggaggggcggcttgggccggcccacaaggaggagggaccgcgggagagggatggactgggccgacggcccaagaagaggaaaaaaaaaggaggaaaaaggaaaaagaaaaagaagaaaggatttttcctgggattaaaattgcactttggtgatttttaattggttaaaattatttccaaggctctgaaaattccactaaaaatcctgttaatatattgtgacatgtagaatccaagaaaaattccacatgccgattccgattattatttgcatttattaattagggaattagctctaggttaattaagataatttcttcggacgatttatttagccaaatttttaaagcaagcaaaaaggggaaaacttcagggcgtgacatacgtcaacatgcatgcccaattcctcagctgcgcgctctttgccagtacctgtcgacccgcggcggcgcttgcagcacggctgtcccaggggcgtgcgctccgcccgcacaggccccctagacccaaaactctaacattatatatacaacccaataagtaaattggtagctgaacttgttccaaaaatcttttttttttcacatcgttaatgtaggatcgaatagcaagaactaagccaaccagagaggggtgaatggttgtagtacccaaaaccgaaacttttagcggaattaaaagttaccctcgaatttgatgaagatcggtctgaccggagttgatccgcaagtttgaccgtacctatgccgccggtttgaccagtatagatcgtttggtccaaacgctcgcgtagcctcctccttctctgaccagtataaacttgcggccgaaatgaccgatgtgacggcagtcagggagccctgcgcacgcacctactgctagcaggggaggtggtctgcgaccgccccgtctaatcgccattaatgaggggctttttgcctcgcatttgagctcggaccagttcttctcgcaccggtccgtatgagagatccccacccaacggtgggaatgaatggccggaagtcgtcgataattaagaaggaatgtccgcccgtgtctctcggcgtgatgggatgggcccatgccgcggtaaggcgcgcgtggctccacatgtcggaagacaagacaagcattaattgcctgtaaagaatattttccttacccttgaagctagttttgggcctttgtggtaaccttttaagatataaaaagaggtccatgccccagtggagagaggggcgaatcctagagaagaaaggcacttttattctcccacctaaatcaatcacacacaagagtagggtattatgcttccatagcggccagaacttgtataaacctcttgcatttccatcactctcgaggggcccaaccccctctgcctctctctccatcaactctcagacctacaaccgtgcccctggactgaactagaaagggggtccccacggtcccccgcttgaggagttcacccttcgacatgtatggtaggaggacaaaacaggttggcgtgggagaggatgggccggattggtttggttggatggtttgggggcattcttgaaaactttttttacaaatagacccgtagaaaaacttatttcaggagtggttccttttcacggcgccagtgtgattggtgccatgatcaagatggcgactccaatgtcattggtgtcaatgacctatttgtataaaaaattaaaaataattttcaaaaggactaaaatgcaaatatatttcttccaaataggtccttgacttcattggcaccgtcgtccaatatgacaacgctaatgatggtggcaccgagaaaagggtccatcctagagtaagtttttctagtgtatttgcaagatgaacttattcatttaatttgataaagaaggggaagaaaaatgtcatgcagtttggtgctgaagaaaaaaaattaagtcgttcatttagtctgagggggtgtaaaaattttgtgtgaactaaacggggcctgaatccgaagaagaaaataatgagttacattgaattcagtgaattcggagggaaaaaaacagaagattgaattcagtagttagctagtctgaatccgaagaagaaaattagtgagttactttgaataaagtgagttcggagggaaaaaaagaaaatttgaattcactggttgatttgaatccgaagattaaaaaaaagaagagaaaaaagaagaaaaatagtgagttactctgaattcagtgagttcgggggaaaaaacgaaagtttgaattcagtggttgatttgaatctgaagataaaaaaataataaaaatagtgagttactttgaattcagatttgaattcagtgagttcggaggaaaaacaacaaaagtttgaattcagtggttgatttgaatctgaagataaaacgaacgaagaagaaaataatgagttacattgaattcagtgaattcggagggaaaaaaaacagaagattgaattcagcagttagctagtctgaatccgaagaagaaaattagtgagttactttgaattcagtgagttcggagggaaaaaaag

SEQ ID NO: 18395 - DNA, 1847 bp, Oryza sativa
tcaactgccaatcataaattcataacatagaagaccccatgactaattaattatgaggaaggtcataattaatggggataaggttggaacagtgagatgagaagacagatgggaggtggtattctgaatttctgatgcgagtctagtggagcttacagggatcgcaaactatcattctttaaacttcagtgcctattcttttaaccagtgtcattcttttaagtaaatgtgtgcatcatgtcaatactcactgctgtcatcccaaagttacatctttcgatgaaatgtgattatattggtagaacataagagaatatccagtgcatgactatattgttctttgcatctactgatacggaaaatatacaattgccaataaatgcccctaaatcttgcttcttgcaaaagaaaaacaacaagacagatgacaatggcatcagaacctagtctattggctaagtcattgacattgtaatgtcacaagggaaatctaatgaaatatcttggttatggaagtaacttgcagaaaatcaatacatctgttttgtaatagaaaatgagacagctaagcgcaatttgcaatttccctccaaattaagcaagtgtacaaggatatatacctcaagcagattgtacctctccagtagtgttattcttggcaaaacacctattgaaagctttactgggataagaaacttcaaaattctcctataaaattgagcattgatcagagttcgaacaggttgcatcataaattatatgctagaaaacttcaaaccccatgtaatacaagtacctcaaatttgactcatactgaggattacagtgcaccaaagcataagttagcttctgatctgcctgatttcaatagaacaaaaccagggaaaaaaaaaactttggtatcagtggtctcatcattttgtgtgcaagtaccacaaccatgtcgagagggagagagagcttacaacaagaaagttctcattaaacacctctaatctgccggtataatacatataagtgacctgaaacattatgcataatcaatagtttattagaaatggcaaggtaattgtaagtctttaagacagaaacagttaccagatttttgctaatcttaccttatctttcactggaaaatcttcaaaatcaaaattcctggcagtttcaatacttcttatgacactgcgacaaaggtgaactgttccaagctgcataatttaagaatattgttatatcgaagtatcgaactatagagtagatacatgtgtttgtgcatagtacacttcactatataaaaaatatatatgtattgagagtaccactttacaagaaaataatccttactctgaagtaaattttaaatagctggcaggtaacatagagtgctccaatgcgtttaggccctttaacctgtaaatttggaaataaaatagcttcagaacacaatccagacaagcataaacataatccatgaaagaacaagcacaaagaaaattttctgtgcaaaacatcatggtttaggttgcaactgctaaatggtagtaaggaactatgagccagaacatctctaacatcaatgttacacccataataacaaaaggcaacagaactcccttcaattcaattatcgtgcttacgcagctacttattaccactcaagaaagaagaatcattttagagtttcataccgcgagtgcaccgaaaaccttcatcaggaaggacccagcagactgcagcttgtcagggttcttcccactcgttgcaagctccctatctgcctacacaaccaagcaaacaaacaaagcttccattaggcatgagccgaaaattttcacattcacagaacc

SEQ ID NO: 18396 - DNA, 4062 bp, Oryza sativa
attcctgcagccccgcggaggagcggggggaggaggtcggagaggtgcgggtagcggtcggcggcgaggcgcgggaagtccgggaaggcggagagcgcgtcggagagcggggcgggggcctgcgcggaggagacggcgaggagggaggcgagcgcggcgccgtccgacgaggagacggagtccgccacgcgggagaggtagtcggcgatgcggcggtgcgcctctcccatgctcaggtacgccgccatctccggcgcggcggctgcggcgccgccggggggtagggttcgtggtttcggcggcggcggcggcggcgatggcgtcggagtcggacccgaagaagggcggtttctgatttctgaagggtggtgacgatcgccgatcctggccgtcggatgggaaatcgatgcttgggggtagttttggtttttggaagcgatatcagatggatttgggatttgatttgcagtagataaaaacattttggccgacattttgataattgaaagctttattgttgcaaatggtagtatacaagaggccaagagcagagaaaaagggatttaacggcctgttcactttgacgcaaaaaaaaaaccttaccaaaatttagttgccaaaattttggcaactatgccaaaattttagtaggatttcttatatagttactaaaatttggtagcaaactaaatgtagacatttttttgacaatattatcaaaatttggtaaggttgaaaatgacattaaagtgaacaggccctaaaaagatagacatttctcagaaatttcagtaactatgacacaaaataagaaaagttatatgctaaccgacaggaaaccattgaaattaggatatgaagatgtaccactccatatgtgatactcatgtatattttagagaggacaaaaataataacgtagtagttataaaaagccactgttgggattggaaatacatcaacaaaagaacactttagctaggtcattctgtaagtcataaaattctgtttttctcactgcatcatgacacaagagtgcgaggggatggtttgtgccttctttttcatggtttaggtactcgcttttagtaggttttttttctcgtgcaatactaatttgatgcactacaccatattcacatcaggagtaatatttgtgtgatttgccctcgctcgcatggttgcctcatattggttagactatatatttgacggtcccattatatttcttcagttttcattggaaagaagaaattttgtttgttgaatacacgctccattcattcttccattcctcttcttgtggccgatacattttcgattgttatcttttagtttccactgtcaacttatcagtcgtattttgttatatgtatgacgaccttgttgttctcttctagcctccaccaactatgtgtatttacacctatgctataattttgcatatcaccattggttattgctaacattagccggttcttattggcgacaaaagtttggcacatctaatacaatttcggttaattgtccggtctatgccacagtgttcagtgttcgatagtgttgcaacttgcaagtgatcatcaagacgcaaggggagcaaggattaatttggaaattggaggaaccggccagacgaccactgtatcgggaagaactcaccgttagcttgacgaatggctgtgtagacgtttggtcggcattgtatcataatgattagaatgagaactgaaaaatcaggatttatctccatcgtcccttgtcgctttggcttggtcagagtgtcaagaaagtacatgtatttttgcttgatcttgctagatctcccttgtcgcttggattatcctttaatgtacaaagtcatatgtcaatagaaaagacaagagaaactagatatgaatgcctttttaacactaactaaaccaaacatgatgcacgtacggtttataaggatttgcaattttatcctaaatcaccgagatagattaaataagttcatagcgcaatatcatgctaacacatactgtataaatataaaagactttgtatgcgctcttcaaatcatgtctatatgactatatggagatagatgaaatatgaagaagagaagtcttttagattcactagcacataaaagttacctgctatcatactttttcatctccctttaaccaaattataagaagctaactaaaaatcttcaacgtttttaattaaaatcaatgttcaaagttaaaactaataaaatctatgaaagttactatgatgttgtggcctctcaggtccagttgctgatgcaaccgaataggtaggttttgtagtgcagcctagaacactacaagttctatcgaacaatcccatatgttaaaaaagatacattatttaagataacccaaacaaatgtgaacaaaatatcagatacaaaaaatgcagctaaggcctggtttagttacccaaatttttttcccaaaaacatcacatcgaatctttggatacatgcatgaagcattaaatatatattataaaaaaacctaattgcacagttagaggggaaatcgcgagacgaatcttttaagtctaattagtccatgattagccataagtgctacagtaacccacatgtgctaatgacggattaattagtctcaaaagattcgtctcgtggtttccagacgagttatgaaattagttttatcattcttatctgaaaaccccttccgacatccggtcaaacatccgatgtgacactaaaaaattttcttttcgcgaactaaacatgcaccaaggccgagtttagtttcgaactttttcttcaaacttccaatttttccatcatatcaaaactttcctacacacacaaatttccaacttttccatcacatcgttccaatttcaatcaaactttcaattttgacgtgaactaaacacaccctaaagagcgaaaaaagtttctacgtgtctcatcgagcttataaaaagtctttgcattcacacatatttctctccaccaaagtcaatcaaataaatactcatcatccattccgtgtggaaaagaaaacaaaacaaggaacggccaccaatcattccaacgatatcacatcatgcaaccaaacaaaatcaacaaaagcagaaaggacatttctcatgcattcactgtcacaacccataaggccataataacctgcttaaccacaaaagaacagtatagtctttcagcctctcctataagtactccccaactcctcctcctcggttttcatgccacgcttttcaaattgctaaacaatacgtttttttttaaaagtttatatacgaaagttgctttaaaaaatcatattgattcaattttttttaaaaaaattaactaaaacttaattaatgacgtgttaaacgctgcttcgttttgcgtgccggagacactcccgaacagaggctaatagctcatccctgcatcatcatcatcatcatgatcatcatgaatcaatcacccgccgtccgttgcatcggacggcggaggatcgccggacgccaacccggattcaaaacctttccgctacattgactgaccgctccacccccctgcaaaatccccaaactacccctctcctcctcctcctccttcccttgtctgaacggggggagctgtggccacacctctccccccacctcctcctcctctagggtttcctcccaatcccctccatggccaagaccaagcagggcaagaaggacgtcgaatcctacaccatcaagggcaccaccaagatcgtccgaggtacgggccgcttctcgctttcttcatttccggccaagatttgggtctctttagtttcttcatgagggtttgtggtggtggtgtggaagtgggggattgcgtgctgatgcgggcgtcggacacggagaaggcgccgtacgtggggagggtggagaggctggagacggacgggagggggagcgtgcgggtgcgggtgcggtggtactaccggccggaggagtccagggcgggaggaggcagttccatggcgccaaggagctgttcctctccgaccacttcgacaccca

SEQ ID NO: 18397 - DNA, 2466 bp, Oryza sativa
cagggtgcatgaccatctgaggtttctttagaacttgatgctctgtgcctaattattctctgcctttctcaaacatatagtataaagtgtcagttacatggtcttctgcggatgagatatatgactcaaagaacactttagagctcatattgctgatggaacgtgctagtttctttagtgattgtagccgcttttacattattgtcttgagctctgttttggcaattggcaatttggcatgtatattgttcttttgcttggatttttgaagtattggcttgggctctgtttccgtatgggatacattgggggtgaaggtgccgttcgtgttctacaatatttgtatattttgtctaagaagagtttagaaactgacatgagtacatgactaagaacttttcacaattcgtgcccttccctaatccccaataaatgagtgacgcctgttggtaatgaaactgtcatctcgtccatacatcagtggcaagtatctaacctacctaggatgatgtcaacgaatgcatacatggtgtatgaagttgtaggcatttaatactacatgaatgcacaaagtaaacatcattacaatcattgatcaatttacatacttattgatgtttcacttatatctgtcctgatattatgatagttatctttctgttttcctacttctgaaagcaaacctatttgaaacggatgaatgggtgattcctgtgttgcccttcagagtgtttgctgcaactaacatgctgcgttctgtcgtatttcactgctcaccaggttgtctgctgagcattttttttgcgtgtacttcattgttagatcagtcaactgttacttttctttaaatacaaaatgtttggcaacataaatgctctattccgcatgcctatgtgttgtcatgcactcatgctacacagtttccaatttgctgcaccatttctccaattttttttcttgtttattattgaatattcaacttttaacttgtgcaggttccatccatcttgtatgggaatgaccattgagcaggccaaaaaattagatcatttcctgtgcgcagattgtgtcaaagaaaatggcacgaagagaccttcaaattcatatccagcatcatcaaattctgattctaaggttggttacttaacctctatctcttgactgactgtctaccgatgttctgtttgaagataacttatctttaattctttaaaactttaagcgcagtagaaatttgatttcattgtaattacacttaaaaaaaaactagtgtcttgtttttgcttctcaattacacaggtcattatttgatgttgacagagaaatactcgaacttttttttcaaactttgctgttatgaactccctgaaccgatgcatgcatatgtggggtcttatgttcttgcatgtcttatccttgtcaaaactaatccacagtattgacatcaatttatcgttttcttcattatgatttttcttgcaccttatttcccacacaagtaagttgttgagcattatgttttcaatttcctatggacatttgtattaggaagaaaggctatacacattgcctttgcacaacatcaatgatgttctttattagcatcgtactacgctgttattgataataaattaatttatggtttggaaaagcaagtgtacactctaccattcgtgtttccaagcttctctttgaaaatatcagtaaaaaccttgcaaatgaatcatatggaaacagcagctagttttgtaacctgcaagatacattttttccacccatcagcattttcgatgggcatttcactcagagtaatttcaatatataaaatttctctcacctaccaactgcaggttgagccaaaaaagcggaagaggtaattgctgtgacacgagccatccgtggtgaggagatgcactgtttatggcgtcagctcttcattgctggtgcaaagtcaaaacgtggagggtgtacagtgcagatgaagagctaggctaggtccaagatcgcgttaacttatcatttgcccgaatttgggaacgtttccatcagtctaggcaaaagaacgaacttcattgatgctgttggctcgttcagttgtagccagtgtggactggatgagtgtcagcgtgttttagctttttgcctggtacaggaaaacgttcccagcgtggatgatgttgatgatagcttaactgtagtttcataatttgggtgtccctgagttctgtgacctgtttattgataagtgaatgccgcatgatgatgctgttgctgcaaaattgcaatctttttagtcgatggctcaatgccgagtctacatgctgaaattcacattgtttactgggaagaagtggactacgcacaactaagggtgtgtttgaggagatggggaagatacgcaaaacgaggtgagccattaactcataattaattgagtattaactattttaaatttcaaaaatggat

SEQ ID NO: 18398 - DNA, 1008 bp, Oryza sativa
cagtagagatgcggcatatggatggcacagcagatggatctctggctccagctcgtgcagttaacaaagcagcatgtttctctgcagctgcaactgcttctgatcctgtagcaccattggagcccaaagcctccaaaagagcctgtgaaaaagaaaccacagcagtgacataagagattgaaggagtcagcagatcagaaacacatgatggctcttatagccttcattctgctagcctgctcgctaagacagttaacactgtaatgttaccaacctgaggagttgctggcaacctgcataagctgttatccaagctctgaccaaacgcagacaattctcgctcgatgagatcccttgagttagttgacatgtctaccacagcattacaagcagggatgattgttcttgacgcatatcctcttgcagataatggctgttgctcccaaaatgttgatgcctcctatatatagcaagtttggcaacatctttcaagaagtgatcatgcccattgtattcaattattgagacatatatcaagagtaagaagagtgtaagacccaaatccatgaatccccacctaagatatttctaatagctcctagtttcctatggtgctaccttcataaagctgccaagccactataatgaacataattatgacttgagctcactacgctgctgtattagatggaaagttactaaaatggcaaccagtaaccatgctggaaagaatgttgataagtaactgcttctatttctatattcatgtctatatctaaaactttctttaaaaaattgaatagcgaactaagtaaagagctagtaaggaaaagtacaaaggctccagactaaccatattggcccgcagaagagcattgtaaatgcactcaagttctgatctacgagcatcaaattcttctattttcttccactttttcttcaaggaatcttccgcttctttccactcagcacataacttgtacagacgctgtacctcagaatcagtgt

SEQ ID NO: 18399 - DNA, 656 bp, Oryza sativa
atcaggctgcttaatttgggcgttgtcatcgcacagttcacaactatagtatgtttactttatcgccaggtggcatatgctgatatgcacaattgcacacaggaatcttttctttcagactaactggcgagtagaaatgtgcacatggactttgactatttaatcttcaattagtataaggctctaaatatcactcagtgtagatgtactgattcagcataaacaagtactctcggtagagtttaaatgaaatgcttttggtaaaaaaaaatatatatcgtaaacataatgcagaactgagtataaaacaaacactctcaaaccactagattccaggaaataagccaaagttttgatagagaggtagagcactgcaggacaaaaggacccacgcaaagtctttgagccctgcacagccacctatcttgaccaccattccaccacacccttatgacgataaaattcgaccacaaaataaaacaataatagcagtaaccattgtgcaaaagaaaattaaaccctaacctctgattcttcccaccttcacaccacacattctaagacacgtacgcatgcctgtacacaagagaagcccagcaaaagtgaaagacactcgtccatcctacagtgtttttacagtctgcgggctgcaggaa

SEQ ID NO: 18400 - DNA, 2272 bp, Oryza sativa
gagcccccacccatggcgcttaggcatcgccgacctccctacgtcctccctcctcacccacctcgctagtcgccgcgcgccgctccctcctttaccgccgggcgctgcacgccgccatcttcccatggcatctggaaagaggagagggagagagatgaagagagggagatggggagagaggaggaagaagaagggagggtgacaataacatgtggggcccacgtgggctccaccatttttaaattaatttattttgtgtaactgacatgtggacccgatagtttttattactttccaaattaaattgccacgtaagcgccacgtcaatgtcacgtgtgatgaagaccgagtcaaattagccatgtatgggccacatcagcaaaaaccgctgtctaaactgacttgggacttattttgcaccggttttgatggttgaacgatgaaaatcggattcgtcaacaagttaagggacctcagatgaacttattccttttccttttcttatgcgtggtccggcccaattcttcttactcccgcgcacaggccggcctgctcaaccattcctcttcttttcccgtgaaatactggcccagctagttagcaaaatgttcactcagctcagctagttgtccttgtatcaatttttgtaataatgttgcttcgactcctacacaaatatatgcacaattacatatcattaattaaatgtacatatatatatatatatatatatatatatatatatatatataccactatctctttttttatcgatcatgtccacatatatccgtgcggttaaattttattaacttaattcagggcacaattgtaaaaagatataatatcaaaatatcacactagtaaatttatataacgaaaaatactttcaaactattacagtcatggaagtacgaaatcaggaaaaagctcgcaattattccagagagtgtaccggccttttcttttcgtgagacgtgaatggatggagaacaataattagcctataatatacaccacgtggcagctttttatgaaaaaaagcactatgtgtggaggtacgtacatgaacaaaaaggttcattccgttgctacgtgccaaccgtttagaccaatcataaactacgtcattttcttaattaatgaacctggaaagcatcagtgtttgaatacatactacatgctaacttcgtcccaaaataagtgcagcaatagatatccgtgtccagcgttttgaccgtccgtcttatttgtaaattttatgaaaaaaataaaaaatactagtcacacacaaagtactattcatgtattatcatctaataacaataaaaatactaattataattatttctcaaataagaagaacggtcaaacattgtacatgaacagtgttaaaactacacttattttggaacggaggtagtagaaatcctgcacatataactatataaggattcaaaagtgacggttttaataattcgtaggttctgaggcctgtttaattattattttagttatatatatttttacatagtattacaaaataaaatatttatttttacttcgttgcaccaacacataattaattaatctgaagacaaagcaacacgcacatgacccacctgattaacacagctcattaataagagatcatgtgtgcatgagtatttcacaattgatagaagagatatttatcgattacatttttattaattttgacatacattacaagtacaaggaactaattaggaataatagatacccattgaccgatacaaatgaatacaacagaagcggaaaccaacaccagagaaacacatgcacatacattacacatagcttcccccgtctctagttgcatggcatgcaagaaagatatataataccatcaccatcccaaaatataataagttttagataggatatacggatatattacgaaagttacaggaataaaatgaaaaaaaaaggcagttgggattgattgataagaggagaaatatatatgtaagaaatttaattaatggaaggttacgattgttttataagagaatataggtgaagaagttgctatattttgagataaattttagaggctaaaagtaattatattttgggaaagatgagtaataataattaagttaattaattggtggtagcttgtctcctccaagtttgccctggagttcatattaaagtgtacgtggcacgtggtactgcacacgtgcatggcccatgcaagcacgcgttgaccggccggggaccctacacg

SEQ ID NO: 18401 - DNA, 4614 bp, Oryza sativa
attcctgcagccccaggatgttgggaagctgcaaaaattcacacaattttagcttaattacaattcatgtggtcacacacataaatttgaattgagcagtttgtgatttgaagaaataattaggtaattgattgaataattaccgcgacgtatttgtccttgatgagaaggccgtagaggaaccagacgacggcgctgagggtgagcgtgagggagagggagaagggcatgtactccacgctcctcgactggatcactcgcttctgcaatatcgcatccatcgtccatggaagcagttcagttagcaacgagatcgatcgatcaaaccaagacacgaagtaaagatgagctagctagagattgacgacgactgatcgtatatatgcacatacgatgatgctgagcggcgcgacaaagacgctgacggagaaggcgacgcagacccagccgagggagacgacgcgctgctcgccatgggagagcagcagcgtcagcagcaggatcaccccgaacacccccacgttcagcagcagcaggatcttcgtcgtgaacacctgcaaaaacgacgtcgaaccatatatacttgtcaattattatattttactactacaaaacggtaaatatggaacaatcttatataggtgccggttcttgttcacaaccgatgacacctgtaaggggcctctcatcggtgccggttgcgactcgagaatcaaagggtggttcccaagtccccaccggcatcgaaatagggtttctgtggtagtgctagggtttggatgacatggatcgaaccttggccttcttgggggcgtaggcgaggtacatgacgatgtagatggtctcgatgacgcaaccggcggcgttgatggtgatgaggagggcctcgttggacttgatcagcgcgtagaagatccacagcatggcgctgaagagcgccaccacgtacggcaccgactggaacccctccgtcgacttgctcttgtagatccggtagaacgtcgggctgcataaaatattatgcacatatattatcggatacggaacgcggtgcggattgggaattaaaattacacaaaagctatatatgtatatatcatgtagaaattcagttacttacattggtgccagataggtcgtgaaggatatgaggttgcctgcaaagccaaaggaacagaaacaagatcaggattttgtaaaggaaaaaaggcaaagtaatgcgagtaaagagccccatggaggcagctaaggtagcgaccagacgtgataagttgtgatagatagacacgtttacaaactttatgtctagcccttgccttcctttgcaacaaagattgtgccttggcttttaacttgttctttaaattattgtgttacatggtgcactatgatgtcattaattagagtactatatagcttgacctattaattccactctctctccatggcaacataaatatatagaggttgcaccaaaggatcgaatgtttgctccacaagtaggatatacatacaaatgatgaggacttgctgtatatatatagtttaacaagaagcagaaaaattatatggctatgtgcatctcattaagtatgcttaggcccttgtagtttatatgcttgtggattttaagcctgcaattttaagggtggcgccgcgcgtataattctaatagacaaaagccaaaagaaataaaaaaaatcaaatctagcttttggcttattactacaagagtaccatccatattgccttcggaaggctagtagggtttttagcttatgcgctagtagctaattaatatgcccaaatagacataataaactgctgtaaataaaagtgctagaagaaattctttttgttgaaaataactgaaagaagctagctagaaaataaaaaacaaataaagaaacacaacaattttattattttatatatgatgaccactaaagtgtaatcctcactaaatgtcgtcgctagctatgcgtatctgccagcaagtaataactctgagcttatatgtacaaactcaatggtttctaataaaaagaagtaaaatgttggcaatgaagggaatgtcttagttgtggtaggtgatgatgatataccaaggaggccgaaggcaaaagcccagggatgctgcagggacaggccagccatttttgtgtgctaaaaggggggtaattgaagggaagagatgtagtgtaatatggaagcaaacaagcaaggaattgagcttgttgttgctagcttggaacttgtcacagacacacacactctaaccctagaccccctttgtggagggaagggagagctctgaagaagagttcaatgtgttggctgaaaactcttggagaggaatgaagggagttgtggtgctttatataggagcaaagctagctaggtgggaatcacttggttgcctcctacccatggccattcacgtacgcatcaaagtaatcatagaataattatgcaaagattttttttctttatttgcttttgaggaaagtcttttggacacgcacaataattaggcttttacaaaaatgagctactgttggagataatcctggctaattttcaaaaaaagttgcattggctttgtgcgcagcgcacctctcactagccatagccaatttagtgagtaattgctttgtgcattgtcagtagagatcgatctctccaacgtctgcagcttcctgctgggaacggtaaaagatagccgccgagtgcaacagcaaatcacatgagatctctcccagtgaaggattattcctgaatcctgatacggcttttgacttaaattttactactcgaaaaatattaatcgcggagaaaaagataattgtacttagacaaaagaaaggtagaattctctgccttgtttctatatattaattagaaccgttttgtaacatgatcttgcaattattgggtgatagatacatgtaggtatactatagtttctctgttctttgtttgcacgggtagattaattctcaatgtcgccgacagtgttctgaaaaaaaaataatgattgtaattgaatatgcaattctcccatgcgcgtgatatagctgcttattatttaactgtctttaccaaaagtaacttattttttgtcgaaggattgttttcacctgcagtagacatccctgtcgactaagctttcatacacagtttgttgggaagagaggtcgatttctgcttctgcgaagcgcgttgatcttgttctactcccacgtatatgaagctaagctagtggatctgctttttttttctctctacttttttctgtgcgcgcggctgcttgcctttccaatcaacctataagcatagcacaatatatatacgcaatcaatctgcatatatataagcatacttaatttcgaaatatatatgatacatacatatatttaaatcctaaatttgatacaggtactcgtatttaattgttcttttaatgataggcacaacatactcgtgtgtagttgtaaacagcgagacgtccgtggtaatttcgtcaatctcaaaatatgtcggctagagtagtgtatgcgtttgtaggggtgggtgtgagcacgctttcatgctgtgttatattttattggcatgcatgatgcatataggttggttagtttggaattaccggtgtctaagtagtggcactgctggaaggaatgacatgcatatgtactgtctgaaataaagtacatctctctgacataaatgattgcgtgatagctagcctctgatcatcatcgtttggagagaccgtgtttgactcctaaacatgattggaggaaaactaaagtgattttgttaaaaataggaagcaaagaacggctagaacgcctatcttttggaaaggttggctcaaccaggtctgaacttggctacctgaacctctgccatacgtttactccctgataatgcatgtctcttgtgcttcattcagctagctagtgtgtttcatatgcgacataaattgggggaataatgggcttgatcgatcggacacaagtgaaaactctctcaatagctttaactatatttagtcgtctcattttctacgaaaagtcataaaattaacttcagaattttttttttgcaaccaatattataacataaaaataatctccagacatagtattgggacagcttattatgttgtcaaaaggattgttttttctacattgtcaaacaatttcagtatttttagagaaaaatatatttcctctacactacataaaaaaaaaatttgtgacgtcacccttttatttttactggcggattaacaaaacaaacgcttctaaaaatgtattggagggttcttggccatgagccactagcgaaaaccgatttttattggcggactaacaaaacaaacgcttctcggctcctcctatctctcctctactttacaactccatctacctccactcccttcagcttctccacctccatcacaccacacgacggagacgatgaccgcggtggcaacggcgacggtgatggcaggctgtgacgatggtgccagcgacaggaggggacaagggcggtgacgatggcaaaccgcggatccaacagcgatggtgcctagatgccatggat

SEQ ID NO: 18402 - DNA, 5145 bp, Oryza sativa
ggggggggctcatccatgacagcgacagacggagtggcggcagcgaccactcctccctctcggcggcggtggaggaaggagaggggggctcggctcagcttgttcgacactgttccggatcttgcggagttaagtcctccctttctcactctacctataacaaatcagcacaacaaccaccgacggcgctactaagatgacaaccagcatgatcacagtcgacacgatgctatttcattttcatatgttgttgttggcatattggaaatggagtgaaaaatcaatgtagtgctatctggatgtggatctgaatatggatttggtttgatttgaatttggatctcaagatgtggtgggtttgaaaatgcagcagcttttgtggatattgattaattttttttgctaaaaagttgttttgctagtggtactcttaccagtatcgcctgcaaaaatcgattttcacagctggtcctcttaagggtctacttgcgaaaattgattttcgcaagcagaccacaacagctaccaaaaaaatcagtcatttttactaaccttttgtcgctggcggttgtgtcagccgctagcgaaaacatattttggccgcctgcaaaaattattatttttaagtagggctagtttatattctcatttatatttgacgatgagagagatatatagttctcaagaacgtcaaatatatatttgaccacatgtagtagcatatataattcggagtaataaatgcattcttgtatactccgtaattggcatggtcctgactcaaaattttttatttgtaacagccataacttcaggaataagttcatttctcagtaatttttcaaggcttagatatacatatgtgcgcccttaatatcaaacggttgtgtggtgtttttttaagtactttggctcatagctagtactggcaaactgatcgtggccaaacacttgcctcgtggagagtaccacatcaactaaaacaaaaaggcgatgtaagaaatttattttgacgagtttctacggtatattccaattgttgatctttggttgatatctatatttgagaaaaaagttgacaatagtaaatttaatagaaatacaagttctgccactgatgagtagtgttaaatatgttatcctaatttcagtatgcaatatggtcgaattagtttcctaatagaatttgactattatgatcagtttcctaatatgaacctatgttttttttcccacgaggattcctagatttctcctttatatattccatgtgagctgcgtaggaaaggcgcgatagcccaatgtatcccctacgtttgtactcaactcctcaatatcattgcctgtcagggtccatggtttttcctgtaagagtttttcacataaaaatttgtatctttgttatgcatctattttttctaacaattagtgagttgcacgaaatattatcatacaaatgatttaggagtttttataggatatttaccggacttttagtatataaagattcatactattacagcacgttttactgcaaatatttttgtcccatggtacattatctgtctttgtggtaccaggatgtacagcaaataaacaaccaaaaagtgcacaacattctagcgtaaccatctatgtactgtaaaccaagacaaaataggtcgtgtatatatctttgaatggtggccaatatttccaggggaaaaaaattgccatccgcaggcaataacagaatcatcgttctgaacatgcaagtggtcaaaagagcatgtatatagaccaattaaaatgcaagaaaactctgtacacgaatggttgagagatcgtcctgcttaatgataaaaaggtcatacataccagtaccaccatcactgagattcactagctagcccggccggcccgttgattataggtgtaatgatgaccaaaaagaattgatctttagaagcaaaagaaatatcgccatttgcctagcagattccaattcgatcaagaggacgtaagctaatttaatttaattatatgttgcttcctgagaagattcttgtggtagtaatgacatgcagctgtgtgcgaatattccagtcacacaagactgaagagtagttgcaaatagttaagggtggtagttcatgcaaaagatctcatctctttatttccagagttcctcaccgttctttcctggtttgcatgcagctgatcaaccgcagaattggtcttcaagtgatcatcaccacccaagcctgcttccatgcccatcgtccatttgataaattatttctttaatgacagaggtaattttcggtgtctatactgaaatttggagtgagtcaataatgaaatgggaagaactttgttgaaaggcatgtaatagtatagatcgtgggacccagattatagtgttagggacggtgtggaaatgaacactaccactactaacattaacattaagtagtacagaaattgtctgaaaaaaacacgtacatattacagtaaggtgtgctaaagcatcatgcgtgcaaacagttcagctaaaatatttcgatcttccatccccagacgcagataattacatttgatgagatgttggattaaatcaagattacatcgttcgagacgcagtcgatttctgctccaccctctcccctccacttccacttcctccaccgagcgggctggtgccgaccctaaccctacccctccatttcctccagcatgcatggtgtgagctactgtaatagatggcctaagcggaacgctagtggtgtataaggggatggtattcatgactaggcacactactaccaaaacaattttctgtacaagtatccctgtaggttccagacggactggtcacgcctacaaaaatcgacctccatccctatcccgcaggagcgagtggcaggcggcgccaccagcactgacgatggcgaggaagcagccgggaatggctgcatccctatcctcgcccgtcaccgccgcctccaacaacgacgagaaggtggctggcctggagtagcgccgacgatgatggtgatgaggtggcagggagtggctccatccctgtctcaccggggtcgccgccaacaaccaggtgacccaatccgccggcggtggctccgtgaccgctggatctacgcctccgtcaccatcggggagctagggtgcggacaacataagcacctgcatgcgaaaatcgaatttgaaaacattcaggtcaaatttaaaaacttttaactcatatttgaaaattttcaagtcaatatttggaaacttccaactcagatttaaagttttaaaattttgagttaaaagttttcaaattaagtttcgaaattgaggtgaaaagtttcaaattttaacttgaaagttttcaaaatccgagttaaaacatttcaaaacttgaaaagaaagtttcaaaatttgagatgaaaattttaaactttgacctaaaagttttcaagatttgagtttaaatgttttaaattttgacttaaggttttatctttcaattgcaggttttaaatgttaaaattcaaaaccgtcaaaaaaaacacaatatgataatcatacaaattcagtgttaataaaaaatcagttataattatatttttgttgtagcaaaatcccgcgtacagatgtgtcagctttgattccggcgcgtatgcgcggattagttttctcaacatcaacaagtgcagaggcagcagccggatctcgcgatggcatccacgaagcgaggcagcagtaagcagattcaagacagagtcctctacaaggtatcgacgtgcagattccagtgatggtgtccgcaaataagcatgcatattgcaatatatataaactgaattgtcactactacagaccctatttttccgtatgcttgaatcgattatcccgtgcggtggctcggcccacctacagcgtctcgtctgggaaaatcagtattttcgcgtgtggtgcagtaaggaggaccgcacgggataatcccgtgtggtgcagtaaggaggactgcacgggataatagattataccccacggctaggatgtgctagggcgaccgcacgggataattcgtgccatcgccctagcacatgctagctgtccgggacaacctattatcccgtgcggtaggtataatttgaccgcacgggataatagatgcaaaattagacgaaattagtcgagctcaattataaacatcaaattacatagaatgtatagcatttgtaatattacaagtttcccccgcgacagatccttttagtccatagcatgtttcctctcccactcccttaggttcttgaatttggggtccgtaacaagttcgctatgaggatcgtggaactctcctagatggttatagatgtcgcaatgaatgaataggcacaagtctgagcatgcaagagtatgaactggttcaccacatctcctagaagttcaatcccctctggtgttgggatgtcaagcaccaatgacatctgattgccattaacccttgccacctggacccttgcgtagtccgccagaactgggctatcatagaactgtctccctcttatgaaatgccgaaattcatggcaacggtcgggctggcggcttatatagcccccgaccaacgcaagcggtcggcttacgtgggccgcacgggataatgcattatcctgtgcagcccatagcccggcgccggtcttcgccttgttccaggcggagccacttacggcccgcctagaagctaccggggctggtgtccaggaaaatctcgcgtgtagtagtgtgtctaccactttcttttatattcggttaaactggttgatacatacaactcaatatagtattagagtgagtggcctcgattttgaatcttcgctagcaccaattaaatgaaagtttccaatccacttctattgcacaattgaggtcagggagactcgcgtgaggagtaagactaacggggtatttggcagagatggttgctgttgtacagccatagcagctgcagcatgtgcaacaaaatttgtgctgcttgcaccgaagctatagctaggcacagccggctataacttcggtaaagagctaaccctaaaagagtgagttcttcatctttactgatcaatttaagcttaagcttatatgttaaactaa

SEQ ID NO: 18403 - DNA, 1198 bp, Oryza sativa
accagtgacgagtttttcttccaacccgtcactggtatcccctcacctgtgacgggccgatacattagaagccgtcagaggtgatgggccgccacctgtgacggctttcatttctggcccgtcacaggtgagaggataccagtgacgggccgttgaatagaagcccgtcaaaggtatgagcaatacctttgacgggctttttttatctaacccgtttgaggtgtgttgggtctataaatacccccaaactgccaactgctttccatcccgaccattgtactgtccacaaatcggttgggagggcaaggggggcgattttttactaaaattcaaggtaaaaaacacattattctccattcattctcaacatatcgatcatcatttatttttcttcgtatgttgttgatttcagatggatcgtagatggatgtactatgcgcatcgttcgtctaccgagtatagagagggggtcactgaatttgtcacatttgcggataatgacagaaaaagtaggatgagcatgcacatgttgtgcccatgtagggactgtaagaatgaacagatgatcgaagacaaggatgaagtgcatgctcatttgataatgaatggattcatgaagaaatatacctgctggaccaagcatggagagcaagaggcgcctgatgtcgcagctgaagaagtgttggatcaggatgtagagaacaccgccgcagctcgagaaggcatgttcgtaccttctcctttaggtggagagaccatagatttggacactcaatgtctatctacaatgttgcatgacattgaagacgcagaggacaacgacagagattatgagaagtttagtaagttggtggaagattgccagatgccgttgtatgatggatgcaagtcgaagcacagcaagttgtcatgcgtgttggaactcatgaagcttaaggctagtaatggctggtcggacaagagttttacagaactctttgagctgttaaaggatctgttgccagaggggaacaatttacctcagacgacatatgaagcgaagcaagtattatgtccgttgggcctggaggtcagaagaattcatgcatgtccgaacgactgcattttgtattacaaggaatacgctgacttggatgtctgccctatctgtggggcatcaagatacaaacgagcaaagagtgaaggtggggctgcagga

SEQ ID NO: 18404 - DNA, 3585 bp, Oryza sativa
caacacggcggcatcttccccctcgtcttcttctacctctccacccaacccaatcccatcccatccattggggccaccaccacctcgcacacgttccgtgcaacatgtgattgctttgcttccctgattgatcgacctccctcctctcctcgcggtcaacacaaaatccgtgcaaaatattcccgaccgggacgagctcctcgatcaggggccctccctcccatcacacgcttgaccaccatccctcacacgattgatgtttgtttctaataaaattaaacataaagttaaatcacgtaaaacaaaatcaaaatgttttagcgcaacgcttgaaaaataaatttatttgatatttttagattaacttatgtatagcaagttttcgtatgaaacatattgttttaaaacggaccgaaatttgtgttaacagaaatcaacattttaaaatgtgtatcttaattagaaatgcgcactactcactccttttacatagtaaaatacatgctaacgaaaatcaatctatatcttattagaaatggacgcttcttactcgtcagagtctcctagtcctccaagctaagctgacccatactctaccaccaagttgccctagctactagtagctagtagttagttctcgtttcatttccatttcatttcaccaccaacaattctgctgcatatgcaccatcaacttcaaagtaaattaagctgatcgtttgatctccgtacggctgaaaagcactggaaaaatagattaaataatcggaaataatttattgagagcaaaacttttataaccgtatctagaaaatgctggaaaataaatcacgatgaaaaaatacccctcaaaatcaattttaaaatttaaacttttgtttacggaaaatcaattttaaaatttaaattttttgttatggctgatagggtaacaagtaggcgatgggaggatgttgcctcctgctttccttcatttgtttctccatctccatccatcgtcttcaattcttcggttcttccttgcccaacattccaaccttttttacctttttgttttgtgtgagatggaagtggacccaccagttaattaattgatttattattaatctccattgtcataagtggtggcattgtgaattaatcatgcatgctgatgcccctattgcatccggtttggtggcatatccctagtgattaatctagtcagacgaccgtgttggatgggagattgagagagaaagggagaagactgacccaattggttgtaatcaatccaaagcaattgagaaaaatgggagaagatcagaagattccctttagcttcccatcgcaaatttgccattttcggccggctctcgcaacatgttcaatgatcttatagaaatttatatgaaatcaagatagttatcttttaaaaaattcgaacaaagaatacgagattatcaactcttttgataatgcgcggggtttatgaatatgataaaaatttaggacatgtgaaattgattcttagaattaaaaaacctaggacgtgtcaaactgaatctcccacaaatcacaatttacacatttgcttgggaccaacttaagtcaaactgaattttgtaaaaaaaaaatctaatccaatttaatgcgaatttgcgattgagctcaccgaatttgggacgagcaccgcgggtgcgtgtggcactgtgaaataaaacacaaaacaaaaaacagcagattaaaaatcagatacattagttttaacagatcttgagctacactgaacactcttgagctactctctgtcttgtcctcctgcattttttttttgggggcgatttcgttaagcaaacttacaaacaaagcttaaccctgcctctttcttgctacaatcttgcaaggcttgccttgcctagcttagtcggaggcgtcgccggcggcggcgccgccgttccggctcgtcgtctcctgctccctgcaatgctccgccgacgcatccgtcacgcagctcgacgacaccggcgacgccgcgcggcgccgccgcgcgtcggcgcgggcgaagaagtcgatgaaccggacgcccgccgcggcgtcgtcggcgcgctccgtggtggcgtcgtcgtcgtcggcgtcggcggtggggctggctgtcgacgcggccgcggagcctttcttccggaacacgcggcagagcacccagccctcggcggggcgcgccgggtggtcggcggtggcggcgcggcggcacggggcgaggccggcgccggcgaggcggtactcgtgcatgacccagtccgtcttcttgccggtcggcggcttcccgcggtagaacacgagggagcgcttcatgccgacgacgacggcggcggcctggctcctcggcgccgccgccacggacaccgccaccggcttctccttccccgtcgccttccagtacccggcgcccgtggcgcggttggcgcggcgccccttgacatacttggcctccttgcacgtgaagaagtacctctcctgctcactccaccctgcacgcacgggacctcgtcagcgccggccggccacactccgacgacgccgcgcgacggcggcgagctggctcatgactcacctggaggaagcaggtcggaggggtcatgcgcgaggaggcggacatcggggatgtcgacggcgggcgggagaggggagccgagcgcgcggcggcggaggtagtgcaccacaagctcctcgtcggtgggcctgaacctgaaccccggcggcagcttcttcgccgccgtcgtctccatcgatacacctcggcaaaatcaagaactcaacccaagcagagcaccagatcgccgccgctcgccaccgtcttggcctagccgagctgagcttgtcgcgggtgtgcggggagtaaaggcggggggagaggtggaggagggagacgagagggatttatagcgggaggaggaaggtgttcgacgcggggcggggaggggggagcagtggcgtgaggaagactcaagctcgggagccgagctgagctgagacgacgctgtgtcactgtcacttgcgctgtcgcgttgctctgcggcgcaaggcagcgaccaccacggcaccatggatggttggatggttttaattgtggcgctgccttctacggcgatttggagtgatttttttcatctttggcacggtgaggaagaaacgaaaaagaaaaggaaagaaagaaaaacaaaaagggtgggttgaacttgggggagtgtgtacaagcaagttgttgtgtatctctttggcataagttaagtataagagcaaggctaatagtatagcccgctactggctaatagcccataactaaagccaactactagtacaatagattgtccattagctagctgtatctcataatcaaataattaattataatatacacatatctatgtatgtgatcagtagtaaattgtatccttgtagctatttgtgttgttagatgaactttgttcaccaaacaccaacatcatttcacagatcataccaatcaagttatctgttgtataaaaattactacatacaaagcactagtgtttcgtgggcaagaagagctcacgaggaaggagt

SEQ ID NO: 18405 - DNA, 3719 bp, Oryza sativa
ttcgccgatcagtgcaatgggtccttcctccggcatcgacgacctcgtcttcccacccgggcagacgtttcggttcggcagcctcgacttcgtcaccgacaatttcggcaagatttctctccttgacttggaatcggaccagtcgggagagaaccggatctcagtcccgtttggattcccaaacgcggctgaaacctacttcaagaccatctcaatcgagtcggcttcaaaccactcggctgagatcgcatcttctccaacgacaccagatcaagatgatggggcttacccaccagtcctgatgaagctccccgacgatttagcggccgtctccaccacgacagcgtcttcatcccgtaggcctatgcggaagtcggtctcaacaccgatttcgcctagcttcagggaagtcggcgtcatcctccaaccactcggcacggtttcgacggatcagctagatgaccactacagctctcccaccgtcgactcgcgccccaccgacatcgtggagtacgatgagtttagctctcgctaccacgacttcgacgacttcgacgacttcgacggaagcctagatgacaactacacccctctctactttggcgttttcatggccaataatgagacggaggagcaacgccaagcccgggagaccgaagaacgtcgccgactggaagaggagcagcaagcacaagaacaggaacggctacggcgtgagcagcaggaccgtgagcggatcgccaaggaggctgaagatcgacgtcagcgagctttggaagcagggcgccgagcgcgtgatctcatcggccaacaagacgtcgaagggacaccggttttccgcacccctcaacagaatgcggttgccgcgatcacccttctcgacaccctcctcaaccaaaacgagctcaatcgttccgaccacgtcgtcaacatcttgaaccagacgaagaccatgatcgcggcttcggtcccagttaactccgaaagcgtccacacgccgactggcagccgagtcccccacttccgatctcaggactaccgtcatccaagcctcagcatcaccggtgcaggatccaatcgcaggagcaggggtcacgacgagcggtccgtgcactcgcctcccgactaccgtggggagcgccgagtagaacggccacgttcaccgcctcgtcgccgccccatcgatcttcgcgacacaatcatacagcgccgagcagctcgaggccgtcaccactcgccagaccgctacgacgacgaccttgatggggtagcagccttcaccgacgacctgcgtcgagtggattggccagccggcttcaaaccgactggaatagagaagtacgacggtaccactaacccagaatcgtggctcaccgtctacggtctcgcaatccgcgcagcaggaggagacaacaaggccatggcgaattatttaccagtggctttggcagattccgcccgatcttggctccatggactgccccgtggtacgatcggatcttgggccgaattacgcgaccacttcatcgccaacttccaaggcaccttcgagcgtcctggcacacaatatgatctttacaacgttatccagaaatccggagaatcccttcgagagtatatccgacgattttctgaacaacgtaacaagatctccgacatcaccgacgacgtcatcatcgccgcattcaccaaagggattcgccacgaagaattggtcggcaaatttgggcgcaaacctcccagaacagtcaagctcatgtttgaaaaagccaacgagtacgccaaagccgaagacgccgtcaccgcatcgaagcagtcgggtcccagttggaagccgaagaatacgccggctacgggaggaggtggaagtaacaatcataaggaccgcaagcgtaagcctgaggaacttgttgcaaccgccgctcactcttctcgacagcgttcgcgcgtcaacaccttcgacaagatcatgaactcccaatgcccgcatcatccaaactccaaccacgtggccaaagagtgcttcatctacaagcagttcgcggagcagtacaccaagtctactcggaagaactccgacgaggaacaaagcacgtcaaggaagaaggacgacggcgacaccccggctggatttcaagaccaccgcaaggagctcaaccatattttcggcggccccatggcttacgagtctaaaaggaagcaaaagctgaccgaacgggagatcaatgctgttcagcccgacacgccccaatatcttcgatggtcagagatcgcaatcaggtttgaccgctcggatcatcctgaccgagtggtccacccggggcggtaccccctggtactagacccagtggtccgtaacgtcaagcttcgcagaaccctcattgatggcggcagtgcactcaatatcctcttcgccaagactttggatgatatgcagatccctcgctccgagctgaaaccgagcaatgcgccttttcatggagtaattccaggattatccgccactccactcggccagatcacccttccggtcacttttggcactcgggaaaacttccgcacagagaatatcagctttgaagttgccgatttcgagacagcataccatgccatactcggacgcccggcgttagccaagttcatggccgtcccgcactacacgtacatgatgatgaagatgcctggtccccgaggagtcctaaccctacggagcgacatcaagcaagctgtcacatgcgacaaggagagttgcgacatggcccaaacccgcgagatggcgtctgcccgagaggaaatccgactggctgcaaccacggtgagcgaaggagaagtgcccgctgccaagatttcaaaaagtggggaaactgaagccgagactaaaaagattcccttagatccttctgatcctaccaaaactgctgtaataggcgccgagttagattgtaaataggaaagcgcgctcatcacctttcttcaaaataataaagatatctttgcgtggaaaccttcggatatgcccggtattcccagagaggtgattgagcactccttacatgtcaaagaagacgccaaacctattaaacaacgactccgccgatttgcacaagacaggaaggacgcgatcaaggaggaattgaccaagctgttagcagcaggcttcatcaaagaagtccttcatcccgactggctggcaaacccggttctagttcggaagaaaacagggcaatggcgcatgtgtgtcgattacactgaccttaacaaatcttgcccaaaagatcctttcgggttgcctcgcattgaccaggtagttgactcaaccgccggctgcgagcttctcagttttctggattgctactcggggtatcatcagatccgactgaaggaatccgactgcttgaagacttcattcatcacgccttttggggcatactgctacgtcaccatgccgttcggactaaaaaacgcaggagcaacttatcaacgcatgattcagagatgcttctcaacacagatcggccgcaacgttgaagcctatgtggatgatgtagtcgtcaagaccaagcaaaaggatgatttgatctcggatctagaagaaaccttcgcgagcatccgcgctttcaggatgaaattaaaccctgaaaagtgcaccttcggagtaccgtcagggaagctgcttggctttatggtgtctcataggggcatccaagccaacccggaga

SEQ ID NO: 18406 - DNA, 4206 bp, Oryza sativa
ccgtggagaaaatagagcactggaccatgcattttgacgggtcaaaaagactttcgggcactggagctggagtggttttaatttccccgaccggagaaagactaagttatgtactttggatacatttttcggcgtctcacaacgtcgccgagtatgaggcgctccttcatgggctacggattgcaatttccctagggataaagcgtctaattgttcgaggtgattcacagctggttgtcaaccaagttatgaaagagtggtcctgcattgacgacaacatgatggcatatcgacaagaggtacgcaaactggaggataagttcgatggacttgagctcagccatgttcttcgacacaacaatgaagctgccgatagacttgcgaactttggatccaagcgcgaggcagcgccatctgatgttttcgtcgaacacctttattccccgacagtacctcgcaaagatgctactcaagttgcggacactcatgacatagctatggttgaggccgactggcgagagcccctcatacgatttttgacttctcaagaactccctcaagacaaagatgaggccgagcggatttcaaggcggagcaaactttatgttatgcatgaagccgagttatacaagaaaagcccttcaggaattctgcaacgctgcgtatctttagaggaagggagacaattgctgaaggacatacattctgggatatgcggaaaccacgctgcagcgcgcaccattgttggcaaagcttaccggcagggttttttctggcccactgcagtgtccgacgccgacaaaattgtgcgcacatgtgaaggttgccaattttttgccagacaaattcatctaccagctcaagagttgcagactatcccgctatcttggccgtttgcggtttgggggctcgacatggttggcccgtttaaaaaggcagtcggcggttacacgcacctcttcgtggccattgacaaattttccaagtggatcgaagctaagcctgttgtcacgattacagcagataatgctcgcgatttcttcatcaacattgtgcacagattcggagtacccaatcggatcatcaccgataatggcacacaattcaccggcggagttttcaaagacttttgtgaagactttggaatcaagatttgctatgcctcagtagcacacccaatgagcaatggacaggtggagagggccaacggcatgatacttcaagggattaaagctcgagtttttgaccggcttaaaccctatgccggcaaatgggtgtcacagttaccatcagtactttggtctttgcgtactacgcccagtcgggccacgggccagtcaccttttttccttgtctatggggcagaagcaatgttgccaagtgaagttgaattcgagtctttgcgctttcgaaatttccgtgaagatcgctacgaagaggaccgagtggatgacttgcaccgattggaagaagtccgcgaagcagctttgattcggtcggctcgatacttacaagggttgcggcgctatcataattgcaatgttcgatctcgtgcctttttagtcggcgacctggttttgaggaaaattcaaactacacgagatcggcacaagttatctcctttatgggaggggccatttattatctctgaagtcacccggccaggttcttatcgactcaagcgcgaagacggtactctcgtcgacaactcttggaacattgaacatcttcgtcgtttctacgcttaactttatcattgtatttccctattttgactgtcaaacatcaagttttctccttgaagttgtcagtcgggggctattatcataataatggagtgtgattttttatcaattcagtttgcttacttggtttatcattgccttgtttggtttttctacttagtttgcgaggactgaaagtttttaatagcttctttgggttttaggctcaacaaagcttagcaaaaacttttaagaaatcaaaaacttcgcaagaatcatcaagcacagcataaatacaccagtattgtacaaattgagcctccatgtattacattcaaactcagtcagaatcagtcctttcatcatcagagtcttcattactcggctggaggtcgttgttgcgaaattgctctacaacatcactcgcaattttgtcagccgcattttgcgcactgctgataagatcaagggcagcttcttcacttgtcccgtctgcaaatccatcaatggtgtcgacttcaattctcgggtacaaggattttgtcatcgccaaggccatgctagctcccatacttccagctttcttgatattcttgaaatatacttccggagcaacactcagcttgtcaaatatttcggttgcgtcgagtgcactcggaccaccattattgaggaacatggcttggataattggtgcagcggcattggcgacgttatcccttgctccttcaagcctcttgatcttaccaaccaggacgtcaaactgagcttgagatttgatcttgcgatctgcaaaacacatttatgatgagcatctgttgcattataaggagagaagctcagattgttagctggcgttaccttcgacttccttcaaggctgagtccctttgcgcagccagttctgtcttgtctctctccagggcttcaatttgcttcgccatctgttccatcctggcggcttgcgctgtttgaaatccagatggttgaggatgcaattatgacagcataaatcaatggaacagatctggatgattaccttttgatgaaccacttagttcgaagtttgcatcctggagctgggcgattcggtcccttaactctttctctgtctttttggcgcattccttggcctcatgcagctggtccctaactgcttctagagttcccaaatgaggaaccagcttttccaaagttgtagtcttggcctcattgcgaagatggattctctgcacgatggatcatggttcagttctgctaaaaagaaaacaaagttaccgaaggccgtcactcggaagacttacatttacaatacgagtggcttctccgagcgctttcttcagctggcacacttcttcatcttctttttgacggtttatgactatgccggcggcttgtgagttctcgtcccaccatttgatcaagataggaggacgagagtcgtcggtcgcctttatgcgagggatttcttctccgtcatcacctgatggtcctgatgtgtttccaagacattagatggatacattgaggttatttaaatcgccattgtttgagaagacaactaacctgaagatgtacctagctgagcgtgaggtgatctttgttctttacctgaagacccagctatcgagtcgttaccagcctctggtccttgcgaagtcgtcgtctgcgcttctacttcggggatctcttgatcagggcctgcgtccgactggtttccagtcgggggctcttgagttgttgccgtttcagttgttgccgactggtttccagtcggcggcaggtcactcggattggccctatcgcccgaagcatgggcgccagtcggctggctttcagcagtcggctggttttcagcagtcggctcggggtcctgggatatattttgctctgtcatggcaggatcggggtcttttccagatggatctatatcagatggtttcctgcagagtgttctttcagtatttagcattattttcatcggaaaacatgccgaagcggaaatcataccgagagatctaatacctggaagatgttctgatctttggcattgcacggccagccagttttttcctgggcatggtacgctttgggggattattaggcgagcccttatccccagatttatcatcgtcgccttcatcatcatcaagtaccagcttcctcttgcgaggacctgtttgaccagtcaatttggaggtctgaggttgcggatctggtctgatcgttggccctccacctccctgagcggtgtgttggcgaggagaccggcgctgagtgactggtggatctgacttcatcaatgcatattcctgaacaagatgcttccatagttagtcaactcagcgtgaagataaaattatgttctgatcacggtttgagggtttcctatgcatacctgtggaggcggattgaatgcattatatggcacaactggcagttggtgagagtagctgactacaattgcattgggctgcaggaat

SEQ ID NO: 18407 - DNA, 2605 bp, Oryza sativa
atacgatccaacaactccaaggcttgtactgcttcatctccgattggaagagagttccaagtatcttggtacactggaggaagacaagagtacccgggaagagcaggctcgggattctgaacgtagaaccagtttgcatgccatcctttgttcgaagtcttgaagggcatcgagaaatatttttggctcagagttccccttagttggaatcctgcccccccgactacacacggtttgttcttgtttggttggggcttgaggaagaagatccggcggaatagggcaaagtgaggtttgatccccaaaaaggcttcacaagcatggacgaaattggcgatatgcactatggaattcgggtttaggtgatgcaagctgattccatagaaattcaagatcccgcggaaaaattttgaggtcggaagagcaaagccgccgtagaagaaatgcgagaagaccacaatctcatgagtatccggagacgggaaagtctcaccgtgcgctggtcgccacccgatgatctccttggcagggagaacgccgtgcgccaccatctccttaagattctcctccgttacgtcggatgacgcccattggccttcgaagctttctctctcttccgccatcggtttcattcaaatgtgctgatttgattcgagggatggcttgggagaggtgagggattgaggcggtggatcacgggaaggattttgatgcacttttcggaggtggatttggtcggagttgtgaaccctagttcgccggcgcagctttgcactgtagcagggagtggggaaaatggcgagagttccggcggggaagacgaagcgtcgcttggatatcggatttttcagttaagggtatcggaggtgctaatgggcctaggcctgaacagtacttcagcccaatacttttaacagcgtggcccattgtgttccttagggacttaggcatattttgctttggcaatattatgcgcacaacagtgttgcccaatgctgatgaaatcctttttatgcggtcatataattctttggaattattgcaatgcaaattaaaaaggtgcccgacagaaaggcgttatgctgtttttgcaagcttttttaggctacaaaagctgtttgggttaactagggatgacttgtttttattatagtcatttccttggcgtgttatatgcctgttttcatggtaaatagtcatggcctaggctattcgacttatttattaccataatctttataatacttgatgggtaatctttagagtttttatattcggatgcctgtcgagtgtgttcattcgtgaaccttttagagtgtaaaccactcggatttcttttattgtggctaaaaagcagtcggctagcatgcctatttaggcgccgcgtatgcttttgtcatataatgcacaattgtgttattattttgtctttcaactatatgtttagtttgttaactaatcacatagttggaggctacacctaattaggtgcatctattcgatgcaccatattctttatcttttcgccctttacagtcttcgtcttcgctactcagcaggccttggcatgaaaagcttgaagcactcggattactatctttgagaaggctatgatggtcgactgcaaaggactcgggggctactgtggagattatgggtatcccatatctacacggcgacggtatttggattgggtaccggatacttaatgtagatagaatatcttatctgtatctcgggtttgtttcttaacttgtgtatcaaggaaacaccctgagatttagtcggttacgactgtattttacctgtatcttcatattccgttaggaatatagattatcttttgtaatccggactccttcccatatataaggggggtccgggcgcctctaggggcatatgctgattttttcccgaatcacacaatcaataatacactcggcggattcatccccggacaggagtagggtattacttcttttataagaaggcctgaacctgtataaatcttttgtctccaaacccatacacttttccagcttgatagccacccccttttattattgccgaaatctagtttcgacacagctaaagaacacctaaaaaacaaaaaaaaatagtaatttggtttaggacactttcagctaaattgaaagaaaaacttcttaataaaacgagaatgcccctaaagcttctaacgtgccgttggagtgaaaatttagaaagtaagtaactctcaatctcccatcaacctagtcccttgtattttatcttcactctagcatcaggtttgtggcttgtggctctataattcatgttttttttctcaacagtggctgtgatactttttacgaagtccactaacaaattacacaaaatttggtgctccctataggaaaatttgcaatgatgttaactgttgatttctatgttataccacgagtagaaaaagttatagctattacccgtaagtggtggtattaaatagttactcctccgtctcattttaagtgcaaccatgagttttctagtctaattctaatcgtccgtcttatttgaaatattttttatttgtatttttattgttattagagggctgcaggaa

SEQ ID NO: 18408 - DNA, 2245 bp, Oryza sativa
  unsure (1)..(2245): unsure at all n locations
tgaactgctggtgacagttccagcaaacattattagcgcctgcatttcagacaaactgcagactctgcatttcaaatttcatccttctgttcctcctgaacagtgtgaccagattctctaaggtacaagaaaactctgctgttgcattacattgatttataatgtagatcgatgtttaaccactactacatgtgttttctcatttcttgacatattagtagatctggtactattcatgtgatatatctaaggccccatcgtttggcttattgatggaagaagccaaacgacatatttacaaacgaaaaataatttgtgaataaaccttttatatatgcgctcttagtgatctaaaagcaaaggttgaaaaataaacttcgataaaaaaaactcaaaatcaactccaaatttaaagttgaaaattcaaattttagctaataagcataagcataagtgaaaagacgaggctgtaaaagtgaaccatccctttgtttcatcaaaattaattttgacatgtcctaatcattctgacgtagcaaagtagagagaagcaaaaaaatctctgatcttacatatctggtagactgatactactgatgttcacaacaacatgaagtgaaatagtgactggtgagcatgccctcagctatttcgaataaatataagctaaatttataattgaagtcacatactcacatggctggatttccttttcctagatcaaaaactgaaatttctaatcttcataaaacagaactgaaacttccaacaggggagcagagcaggccgcctgaaatactgaaatagaactttattcagactgcagagcttttcatatttggtatgattgtcattgtacacattaaaaatctcattgaacagcgcatttaataaacattacaagaatataaattaagtctggaaatacaaaagactcgaccaaattatcatctatgtccattaagttggcaactaaagcacacttctgctttcctctgtaatggatatctgttataactgatactcaatgaatctggccaaacgaagaattgttctttccctcttcaattatcaacagcaccctttaaaatacatcaatggtccttccttactgttcatttttccaaagagaaaattgcactgcgatcagcacaaatgctcttctgtatcaatatctcctgttaaattgtcataagttataacagcaccatggaccctaaatatttcactgcttctgtatgcagtagttttttctcaagaaatggcagcactgtctgtctttgcttcatcaatactctcaaaggtcactacatttgctgttgaatatgctctcgccgacatcaaacttgcttgcacagttaggagtgagatagaaaagctgaganactcattgaaggctatntggctgttcttaaagatgctgaaaggaagcaatctacatctagttcacttaaacattggctggaaaacctcaaagacattgtctacgacatagatgatgttctcgatgacgttgggacacgagcattgcagcagaaagttggaaaaggtgaaatccgtacttattttgctcaactattcatttttccttttgaactgggaagaaagataagaagggttcgtgaaaggctaaatgaaatatctgcacttaaaagaaattttgatttgaaagaagaaccaatagacacaccttcagatcgaattgtacagagagaaacatactcaattgtagatgagcgaaagattgttgggagagataaagctaaaaatgatattgtgaaggtgatttcagaagctgctgaatctaattctgatacactgtcagtgcttccactaattggaatgggaggtgtaggcaagactgccctagcaaaactggtatttaatgacaaacgaaccaaagaaaagtttgataagatgctatgggcatgtgtagctaatgtgtctgatcttaaacatatagtagatattatcatacaatcagatagcggtgaaagcaacaagcaattaaccctagaagcactacaaaagaaacttcatgagctttcaggagataagagatacttgctagtgttagacgacatatcacatgataacattaatgattgggaagaattgatgaacctgctaccgagtggtagaagtggaagcatgattttaatcaccacgcgtctctcaaaaattgcatcagtattgaagaccatagagccatatgaagtgccaaaacttccacatgaagaatgca

SEQ ID NO: 18409 - DNA, 5184 bp, Oryza sativa
cgaaagtaaaagcccgtcacaggtgggtcacctgtgacggtccgacgtttgcgagtccgtcacaggtgaggttacctgtgacggatgtttcttccgaaccgtcactgatgagttaattccagaaaaaaaataaatgctaaatattggctagcctcaggaattgctagccatgccctctgaaaaacagaaacatcacaggtgccagtcaccccccctccatatcacatattccccaactgcccaacatcacagatgcatcacatatcacagatccatcacaaagcaacaatttacaacatcacatatgcaacaatttaatttattatagcacacaattcataccccatgaaagtcctcaaatgattaccaaaatttcttgtattctgttcgttgtgaacctccacaacctgtcaataagggaaaaaaaaaggagaaaacagatgaatagtacaacataaatcgtagttgatcaaatgtgatgacaatttagtaaagtaccataaatattgcacatatgaaagtaaattacattgcactctataaaaacataattttttacatcgccagaaattataaaaacatcttttttacatcacaataaattatctagccaagttcatgagtctatttggcatgaaaacgtcctttcttgttcattatttctgcaagaataaaggcgcacaattcgcctctgatagcgggggggttgatgggtgagatcttgaagccagctctacctttctgtttaataaataagaggttaattagcacgttttgaatagcaatgtagatattgaaatgagcttattcgccattagcaacaacctcagggtcgaaatctttcacctctcttagaagtgttgacatgttgtggcacacgtggaaaccacattggtctccgatctgttgtgcgcatgcaaacttggtgtcatgataaagttcattcttgccctccttgtgcctaccacccttttccacatatgggccccaagccatatttaaggccttggtgatttcactgaaatcataatctttggacttattggagttaaggtaggtaaccctactccacttaggtacgatgactaggagaatccaatgtcgcctgcgcagtggttatgtagcgttagtactaagaaccttaacttcaaaaacaatatacacgaagggtattgtcctcttactcttggttgtgtgcgcacatgatgtactccttgtcttgatgggcccataaacaccggttgacatagtcaaccacctcagtgaagctctgtcgtaaattaacctcatttaccatggatggatcaaggaacccaacctgattaccatggcgacgactctcgatccaacacaaccttaaaatatttacgtattagaactaatttaattaggagatatagtccagtcatatcacaagtatagaaggtatgcacttacaaggagtagcattttagaagaccagtgtccaacttccggatcctgaaaaggtcgaagaggtcatcaaagcctatagttatataggcaggcgacgataggaacggctggtggtcgtgatgtccaactatggatgactccctcattttccgcttggcattgcttagctccatgtattgcttatgtagctctcggcaagcaatacccatcacagctaacacattgtcctccaccaatggcatgcctagctcaaattgggctggcgccctcacgaccttccccgatttgctcaccggcatcgacgtcgcagccttgcccctttttggctccggcgccaactccccgaccttccccttgcctcgttcacgcttctggcccttgacaagtggtggggagctatcggcctttcttgtggtctttattggagccaagctttgagctatatctgccaagtccatatcagctccaccgggagaatgaggtactgacaatgccggtccacggggagcctcaattgatagcttagacttgggaggtgtaagctccgtcggtcgacttggacgaggagtcatcttcacaactatgtcttctttaggccattgtatgaacgtcttgcgcgcatcgcccaaagtcatgatttcatcatttgggggcacgggcagcggatagcctgaccaggtgtcctttactgtatcgatggacaccttggcatacccagctagcaggtctgcgccgtggaccttgtctgtaaccgagggcttgaaagccatgccctcagcgacttcaggagcgaaagttgggtggactctcgctagtaggacacactgtgctgcgccctgcataaggtgaaagtttgaatttaatattggaatgtgtaaatgtcttttattagatatggatcggataacaacaattacctcgatgtggtccactgcagctagtggtgcgatcgggagaccaggggccggcacctctgtggatgcacaactactcctatgctgtgacggactcgcgtcgtgttgtacacgaggagttggttgcacagcaggtgttgtgactcggggtatattcatgtcggcgagcaccttgttaaccctttcttccacccttgcattcatgctagcttctagttcttgaatgacctcaaccttaagttcggccttcaaacgagcgtccctctcttccttggagactttccgtttcctgtattgggagctgtactgagggagtccatgcttccagggcacatcgctaccaattccccgagttcggccaggatgttctttggttccgagcgcctttgtgaggatgtcatcttcgcgcctcttcggcgcggactcaacctcgctttgtgaagcttgttcagcaaccaagcccaactagaaaagaagatagtcgtttatacgaacttgtactttatacgaacggaaattagttaggttaagtagtgaactcaccagttcctgatagacgacggcatcacttttgttctcaaatgtgacagagccgtccgggttgaccttaccccttgcccgcgcccagttgcgagctctttgttcagggatgtctgaaaacgggtcagggacattcgctgctgcagcggctgcatcttcttgggcccatattgcctccttgccgatgtaccctgcggtgcccagccgatgcgggtgctcattccgctgttgcagtacgcgatgtgcctcgctggattccctaaactcttgggtggtcttgagagagcagaattcctcccacaccgcttcggttatttgagggtattcatcgaacggcgtatgattgccgggcgggttgacatactcggtgaagagcttcgacttccaattcttccaagctttgcccatcttttggaatgccttccgcttgagcctatcctttgcttcggctggaaatgtgaaccatttctccattgccgtccaagctcgctctttctcggcttctgtgaccttcccgatatctttatggaggatcccgaagttctcacgtgccgctatcccgcagcagttagaccatcttccaatgacagtcctgggcgccgtgggcctaccactagcgtcaacctctcttataacttgcactgtggtcggccatatattttgtgaccgcggatttctactagacctacttgcacttgtctcacccgacatcgacgtatgttgttcctgcggcaattctgcagcacaaacagaaggcaatatttgctaaggggtgctagctaaaatttatgtggtcatgtggtgaaaatttatcctataaattaccatgaatttcgggttgttggaccgccgttgtcgcgggatgaccttcggcaactgcctctgtggttgggtttgcttcttcctggatcctcgcaggtgttggggagggcgggtttgcgccgggcattgacatggtttaactttcgcgaaaaagattataaatttcctaccattagactaaatagcattagatccaatgtagtgacggggtatactatgaaagatatggcctcagttttgctgagaaatatgcatcaattacaatcatttgcatgaagggataaaaagaggaaatcagctactaggagaaaaaagcaacccaaataaaataggacaagtgtagttcatctgttcttatcaataaaatagaacaagtgtagttcatctgttcttatccataaggaaaagagcaagtgcaggaaattagagtagtagcaacagcatggccatataatagcagcaataagagcagtagcagggccatataacagcagtaggggtatatatgccacaggggcagcaacagcaaggggagattcacataaacagcaacagcagggtggaaattcacataaacagcaacagcagggtggaaattcacataaacagcaacagcagagggaaattcacatagacagcaagggtatataaatcaacaagtgtagataatctgttcttatccataaagaaaagaacaggtatagatagaatgttattaagcaattcatccttggccatttaacaagaagtacaggggcaacaacagcagtggtatataaatcatgcatatattattgtagataaaaaaatgaacaagtgcagaaaatctgttcttatgcataaaaaaagagcaagtgcacaaaatctgttcttatgcataaaaaaagaacaagtgtagaggtatataaccactgaatcaatcattcaaatttaaaaaacagcagcagcaagggtacagaatttgcatgattgacataaaacagcagcaggagtataaatgcaagtccacaaaattcaataggtctagcaacatatatagcagtacacactccatgaatggttatatgtccaaatggcacttaaatccacattcaagttgcacttaactaacagttgcaaccataggcagcagcatgggcaaacatagacagcaagggcaaacatagacagcagcagttgcacttaaatccacattcaagattcactgcaccaaaatcatgtaatacggggtatactatgaaagatatggcctcagttttgctcagaaatatgcatcaattatattcatttgcatgaagggataaaaagaggaaatcataacatcaaaagagcaagtgcagaaaatctgttcttatgcataaaaaaagaacaagtgtagatactctgttcttatccataaagaacaagtgtagaggtatataaccactgagtcaatcatgcaaatttaaaaaacagcccacaataagggtacaga

SEQ ID NO: 18410 - DNA, 1155 bp, Oryza sativa
catccaaaacatccacagacaacaaatcacatttaattcatctatacagcagcaccaataatcgaaacaacaaatcacatttcattcatctaaacaatgcaattcatccatcggaaaaaaggaggaatgggggagggtggcggcatacttggagaagcggcgtacttggagacggcggcgcaggccgtagtcgtcctggatcctagtggcggcggcggagaggcagtggcgaagaggtcgaggcggtcggcggtggtcggggatcccggcgtcggggaggtcagggtcggggaggtcggggaagtcgatggacggacggcggagaggacgaccggcggcgagggcggcggtggaggcggcggcggagatggcggtggagaggacggcagagatggcggcagagagggcagcggagatggcggcggagagggcggaggagaggttgaggcggcgacggtggagatggcggtggagaggacggcggcggtcgagagagtgagtgaggaggcggcggtggagaaggaggcggcgagggcggcggagagggcggagatggcggcagagagggcggcggcgaggagggtctggatggcggcggagatggcggcggagaggtcgagacggcgacggtggagatggcggtggagatggatggcggcggtcgagagagtgagtgcggcggcggtggtgcaggccggcgtcggtggagaggtcgaggcggcggtggagaggagggcgtagagggcggcagagaggtcgagagaggcgaggcggcggtcgagagagtgagtgagtgagagtgggcgccggatctggatcgatctagaagatgtccaaccctaggtcaaccctagtcaaactcacctgtgacgggctccaactatgtggctgtcacaggtggcctcacctgtgatgggcgccaaccgtggagccgtcacaggtaagaccacctgtgacgggcccagcactctgggccgtcacaggtgaggtcacctgtgacggccctacagatagagcccgtcacaggtgagtttgcctagagcaattttattttattttatttcacttagttcttttattttccttaacatattttcacatacactacatatttttttatacttaattattttatttcactaacagtagtaattg

SEQ ID NO: 18411 - DNA, 1984 bp, Oryza sativa
ccccaccttagtagtatgtctacattggtatctatagctctctcatgcattgcctcgtttttctctatagactatctctaagttagtagatagttttgctctctctcttcatttaatacattccaagtaggaaaatatgctgacatggatctcttgtagagagcctatagataaccattgtgggtgccctaagggcagtagcagtgtaagctatggggtctatacccataaggccctagctcaaagtcacagtttaaagacattcaccccacaatacaaacacccatatatatatgtggtttaattggatggagacacaggtggaggaaatcgagcccacagtgcagcgttacccaagcatgtggacacgaggtacgggacgaaatttcttccccacctaccccttccagctagcgactttctcctcctctactccatcgccgtcgcctgcctctcatcccgcgccgcttcgcttatcctcccgcgccgccgctccacttctcccccgcacctccttcccctcccttcggcggccgaggcggatgtggtggctgtagcggcggatgtggtggtcgacgcagacggatgtggtggcagccgcgcctccttctcctctcctcccaagcagcagtcggcggcgcggtcttccatagtgaacgcgaggaggacgaagaggtaggggagtagatccggcaggcggcagcgagttcttggcggcagcgaggaggaggaggaggagatgggggcgtagatccggcgggcggcggtggcgatgaggaggaggaggaggtggggacgtagatccggcgggtttttggcggcgggttctttgtggtggaggcgtccccggcagcgggttcttggcggcggcggtgggttctcatccggccccatggaggacgtcatcaccgacgcaccgccaccgtcccgcttctccccggacgcctcgacaactttgccgcgccgcctcctcatccacctcatctcccctacctacggtgacggtgggcggcgggcgacgggaagccgcggcgaggaggccacgggcgcgcgtcggtgcatcctgcgagcggtgcggttggcggcggctcaccggtgcgcgggattttttttgcggcggaggaatcgttggcggcggatttttttttctttttcatcatgtggtttacatacgtctcgatttgttttgttgaatccatcttctttgagttcttctcttccaatcccgaaaatttttgttttgttgaatccgtcttctttgagttctcttccgatcccgaaaattttcgtgccttttcttgacttggtggccggagaaagagtggctgtggtgggagtggattttttttttggggggagggattctgggttttcaccccgctagggcacgcatgtgcgaggtgacgctgcccacagcacgcgtgcccggggattttggtgtcgcacgctccctcgcttggaccagggtccgcgcggctttgcttggggccaaggggctctgctagggcgcgcgaccatgctccacgcaagcacaaatcctcgctggcgcggtgtagcaccggtccacgtcactgcactgtgagaggcctaagggcactcacggtgcaagcacccactgtgagttaccataagatgacagctaggacaaagagctttgaagaccctctctttacagtgcaagcaccacgtgttggacccacaaatatcttctagtgggacccacaaacccccaactcctcaccggccaaatccccaaatcctccacccccaaatgccactcttccccgctggctctcccttcctgccttcaccggtgccggctcccctcctccctccgccggcgccggctctcctctcctctgggccgagcaacggcatcgtcctccgggccgagcggcggtggcggcatcctccgggccgtgcggcgtcgtccttgaagaagtggcagagctcggcatcgacgggcttgacgcgcgtgccgggg

SEQ ID NO: 18412 - DNA, 4340 bp, Oryza sativa
  unsure (1)..(4340): unsure at all n locations
cccctccctctctgtccgntgcccctcccttctccctcccccactccatcccgccgccgntgcatccatccctccaccgccaccatttttgtttcttgggagctcctcggcgagggcgatctagggttttctctagcggcgtcggcgcgagggcacggggcggcgaaggcacgctgcccacagtgcgcgtgcctcgcgatttcggcgtcgcgcgtggattcgcctcgacaaagtttcgcattgctatgcttggtcacgagtttccgtgtttggtcccgggtgcacgcaccacgtcgacgaaaatcctacatggcgcaacaaggttccgctccacgtaggagcactgtgaaaggcctaaggccttgtttagttcccaaaaactttttctcaaaaacatcaaactgaatctttggacacatgcatgaagtattaaatatagataaattaaaaaactaattgcacagtttgcatagaaatcgtgagacgaattttttgagcctaatcagtccatgattagccataagtgctacagtaacctacatgtactaatgacggattaattaagattaataaattcgtctcgcggtttccatgcgagttataaaattagttttttcattcgtgtccgaaaaccccttccgacatccggtcaaacgtctgatgtgacacccagaaattttcttttcgcaaactaaacaaggccaaaagtgtgtgatttctcactgtggccttttcttcacatgcgcgtgcatcgaaactttaataatactactattaaattttggtattatcaaattttattaaaataagattagaatatataagtgatgtttagtttagttaaggccatactaattttggtacacccttcaacccaatataaatgcatcctagtacggatatcaacatatcctagtaccataaatctggaccgatattctttccagatttgtattattaaaacatatcacatccatattaggttgcacttatattgacagagagagtagagcttttgaggtacgtacaaaggtgatgtttagcttatttggcaatgcagatccaatgcaccggtgatcgggcccgggtgaggaggctgaagctggaaaacaacgtcgagacgatgtagttgaggcggtacggaagatgggtgatcctgggtgtatgtcacgtagagtggatcggatcggcacagtcacatcaggggtgtggggaaggagatcggtaggctagatttgggccggtgccacgactagttggtgtgccttgaggattttgacaggtgtggaagtggcggcagttgggagatgatgcatgggtgctagcgattgaggtaggcatggcagttgtccgagttgacttgtcctatgtagcattcctcttcatctctagggagctcctcctcctcccatgttatggtcgatccctctggtcgtggggagctagattgacgagacgatggcggtagtggtaggggtaagggatgctccggtggcgtggctttgcgggatctggcagaaggcggcaatggtcgcactgcagggcaacaaatcttggtttggtttggccggtggtggggcaacagtacggctaagatgcgtgctagcggagtttgttagggtgatggaacctaggggtggcagtggcaggtgcaagagagggtttggtaggcaaaagcctagctcgtgatttcctgagctggaaacgacaacgtcttcggacatcgtgacccccttggggcgtggttgaggtaccatactctctctagataaaaacccaatctagttggacaagatatggtggcacctaagcatagtcattgagactgaaccagtaattgaaccggtgaggctcttggttcgatggttcactggttctaccggttgaaccattggtctaacccagttcaatagttattaaatatattattcgttcctttaaagcacaagaaggatgatagcctagtggttgatgagcttcctccctcacacgttatactgtgttcgaatccgtcccaagcctattttcccctcattttcccccgactgctcccttgcttgcacatactcccacacatagcatatccagtcttttaaccggaccgacagaggctctggttccggtttttcccggtccaatccggtcttaataattgcgtcatgacctgccaagaggcttaggagatcttcgtctcttgccttgcctggaggctcaagagatagagatcttcgtttcttacctcgccttaggtcggtcctcgctagtttctcggttgtcgtcttgtgtggtttcggtgttcggcaagacgtttgcgaccctccttaaggtctagcagtgattggtcacgcttagtgatgtccggctcagtgctaacgcttttctcctaggttgtgtgaagagctgctagcaggtggtggtggtgtgtttgtttgctttttcctggttatagccttccagggctataattttgtaatattttttctattatatcaatatgaaactacacaatgcctggtgcggttttttttttgtaaaaaatatttggtaggccaatatctttggcaagttttggcactaccaaaattagtagcatagagtttgtagttgtatgagcaaaaattgatagcaaaacaatcatgcataagatactattggagttgctaaaaatttggtagggcaaaagtaggtctcaatccaaacaagctcaaagttctagagattattttggtaggattgtgttgataatgttatgtttagtttgttgtcttgctaaattttgttaataccaaaaatttaaaaaggttaaaaatgtcaacaaagttaacaagccctaaagtattaatagcatgtttttaccaaggggatactaaattactaatggcttggcctagttttttctcttcaactacaaacttcaactttctcgttttctgttagcacttttttcaaagatgatgcgtttttttaaaaaaatttctatatagaagttgtttaaaaattaaaaaaaatccattttttaagtttataattattaatacttaattaattatgtgctaatgagctttctcgtttatgtgcactaaatatgtttcttttggagaaggtcgaatgcataggattatttgttttctcatgttaggacgcacgcacactgcaagcaatgcacatgcaggtgacaaatctctaactttgctaaatttctactggtgatggtgatctatgttacctcgatacggggatacggatacggatacgcaatacggtgatacgaggatacgtcatttttcaaaatattaggatacggggatacgtgtatatatttatatatattaaggaaatagcaataaaataggagtgttcagccaattccgtatcaatcttctccaaattatcttttctagataattcaagttggcgaattcagacaaaaatcaacacatgtaaattgatgcatcgtgcttacaacatcaagtgaagtgccgactaggcaagtaggaggacccaacacctaccgatcgaccaccaccaatatcaagatgttacttgcccttgctttctcttgataaatcagcagctgcatgagcagccgcgctagcactaggattgctagatgcacatgcactagcctgagcttccaaatccaaaatccatgataatgcttgactacttgtagcaagaagataagaaaaaaaattacagatcaagcatgggaatttggaaagccaagccagaagaggagatttggctcacaggggaacgaagagaagtatactcgtgcttccacggagccaccggcggttgcagcggcagcggcgaaggcggcggcggcagcggccaaacggcctccgcctagcgttggcgcgggcaatcttccgctgcacctagctgcgatgctgttccgcgtgtggcgatgacgacagcaccgggaccacgtgtggccacgagcatgaggagcatccggaagaatagcagatggaaccatatcaggaacgttcggaacgtatcggcgaagtatcagtgtttttctatttaattgaaaatcacgaaaatctgggatacgtacgggatacgatacgtatccgtatccgtgcgagtatccgatacggatacgtgacttttgtgccgtatccaggtaacacagatggcgatgataaagcaaagaatgagataggccttagcagatgaaaccaatcggtgcctccaagagggattgggatcaggtgcaatcccaactacaattgcacgtgatggaggctgcagtgttcatgttgttacaatggaatcttagtctgacaatactctgaccttataaatgcgacaccagatattgctgggaactc

SEQ ID NO: 18413 - DNA, 1617 bp, Oryza sativa
aagactaacccgactgctctcttgaccctattctgcccaccgacgattgacgggagttggaaacataacacaaaggggatctggggaggaatatgttgggagttgacctcccagctaaggaaaccgagggtggatcactcaacgcttattcccacctgatcgacgctagttgttttcttaattacaaattacccacattgattggtagagcctaatcttttggatttcttttgatctccctcaatgcaatattaacatgggagtatgctcttgttagaataattgggctaggcccaatttatcctattaaatctcaaaggcccataataagtgttaaggaaaataataccacctcaggatttaagcgaggaatatcttaacctaaatagggggttattggaggcttcctgttgactggttgaggtgggggtcggaaagccacgcgcgcgcgcgccgggcgtgggcgtgggcgtgggctaggcgtggctggcgggcgtcacgtcgttattcttttgcaaccacgaacccacgttcccacgactgccttcgcaacggcgcgtccacgatcccacattgcaaccacgaacccacgttcccacgactgcctccgcaacggcgcgtccacgatcccacgttcccactactacctctctcctgatagataaggaggtcgcgagtccgatcagaacgatttctcgggtgttagttcctccttcgtttctgatcgcttgcacgcacaagagattggaaggagcagggcctctggaatcacaccttcgcctgagatctgcaccggtaggtgggtgatcaggtttttggggagtgcttcccgcacgactgctcgtcctcgtccaccatgtctgcgcctggagctgcagacggagatggcgcgcctggagctggagccggagccgcaattctgcctcacaatccagcggagggccattctcggggtatatccttctcctgttgttagcgttgttaatcctgttagtcgcaatgttaatcctgttagtcgcaacttgctatgttcctgttcctgatgttcatgcctttagcatactggttatgttatatgttcctgctcctgatgttcatgcctttagcatgctactggttatgttacatgttgtcactagatcaccctacactattcatgccatgattattgtcttaatattttggattaaaatatgccgatatatgaccatatttccaacaatccaaaaacctgataggtcattttcagtagttggctttgctgctgcactgaaaccacatgcttttgatggtcctaattataagagatggaaagcacgtgcactattgtggttgacagcgatgcagtgcttctatgtttcacggggcaaacgaagtgaaccacctctttctcctgaggaagaggctaagttcgaggcttcggattgcctgttctgtggagcattgatcaatgtactcgctgacaacatagtggacgtgtacatgcacatgccttccggaaaggacatgtgggatgcacttaaggccaagttcggagtttctgacgccggcagtgagctgtatgtcatggagcagttctatgactacaagatggtcgatgaccgttctgtagtagaa

SEQ ID NO: 18414 - DNA, 1951 bp, Oryza sativa
tttagacttgtgtttgagttcaataaatgtgtcgtatctaaatatgtgacttttgttggaaaaggctatgacagcggaggcttcttccgcttttctttgaatgacatgtgtaataatcataatgttgtgaaccatattagcgagaatgatgagtctaatgtgtggcattcgcgactctgtcatgtgaatttcggttgtatgacacgcttagctaacatgagtttaattccaaaattcactttggtcaaaggttccaagtgccatacttgtgtttaatcgaaacaacctcgcaagcctcacaaggcatctgaggcgaggaatttggcaactctagaacttgttcattttgatctgtgcgaaatgaacagcgtgttgactaaagggggaaagaaatatttcatgacactgatagatgattgcactagattttgttatatgtatctattgaaaacaaaggatgaatcattgcattactttaagatctataaagctgaggtagaaaaccaacttgaaaggaaaatcaaacggttgaggtctgatagaggtggggagtatttttccaatgagtttgcatccttttgcgaagagtttggaattattcatgagaggatgcctccctattcaccccaatcaaatggggtggccgaaagaaagaactgtactctaactgagatggtgaatgccatgttagacactgcgggactttccaaggaatggtggggtgaggcagttttgactgcgtgtcatgtcctgaataaaattccaatgaagcataaggaagtaacaccattcgaggaatgggaaaggaagaaattaaatctctcatacctacgaacatggggctgtttggccaaggtaaatgtacctatagccaaaaagcggaaacttggaccaaatactgttgattgtgtgttccttggttatgctattcacagtgtgggttatagattcttaatagtaaactctggagtacccgacatgcatgttggtacaatttttgagtctagagatgctacattctttgagaatgaatttcccatgaaacatacacctagcacctctagtcaagaaactgtcatgccccatgagcactttgtaccgatagaacacaatgatcaaacgcctgagggaaatcctgaggaggacaacattgtagatactcgcaagagtaagagacaaagggttgcaaaatcctttggagatgactacattgtatacctcgtggatgacaccccaagaaccatagaagaggcatattcatctcctgacgctgactactggaaggaagcagtatgcagtgaaatagactcgattatgtctaatggtacttgggaagttgttgagcgtccatatgggtgcaagcccgtaggatgcaaatgggttttcaagaaaaagcttaggcctgatggtacaattgaaaagtacaaggcaagacttgtggccaagggttatacccaaaaggaaggcgaggacttttttgacacatattcaccagttgctcgcttgaccatgattcgagtactacttgctctggcagcctctcatggtcttctcgtccatcagatgaacattaagacagctttcctaaacggagatctggaggaggagatctatatggaccaaccagacgggtatgtactagaaggtcaggagggaatggtgtgtaaactgttgaaatccttgtatggcctcaagcaagcacctaagcaatggcatgagaagtttgacaccacgcttacatctgtaggctttgttgtgaacgaagctgacaaatgtgtgtactatcgctatggtgggggagaaggagtgatcttgtgcttatatgtcgatgacatattgatctttgggaccagtctcagtgtgattgaggaggtcaaggactatctgtccaagagttttgaaatgaaggatttgggagaggctgatgttattcttaacatcaaactacaaa

SEQ ID NO: 18415 - DNA, 1151 bp, Oryza sativa
ttaatcctgttagtcgcaacttgctatgttcctgttcctgatgttcatgcctttagcatactggttatgttacatgttcctgctcctgatgttcatgcctttagcatgctactggttatgttacatgttatcactagatcaccctacactgttcatgccataattattgtcttaatattttggattaaaatatgccgatatatgaccatatttccaacagctctctcttgaccatcttatccctaacaccaaaactctaacccgatcacttagctgctggagagagaagatgtggttatcttggacagtgtaggtggaagccagagggatactgccaccctagagctaaacatcggcaaccactttgtttgtgccactgctacaactacttcgcctacagacacgaagggggggtggtggagttagcatagaggatattgccgcagcgaggttagtgcggagaaaattgcggcaacgggaattcggcgcgtccgcgcgtcggccaggttttttcgtgatttcaccgtaggatccataagcacaactccttttttatattagtataaatatatgctttacaaaatatgtggagaaagatcagaaatcaaattttaattttttggcaggaaaacgatgaggctttcaccggtcagcactgtctagttgggcccacatgtcaggcgctgctttcctgtcaggcgctcctagtcctatctgaggagagtttagcagcaacgcacagttatggacgtgttcgtcaccaccgccgaccccgacggcatagcagcgcttgacgatgacgcgctgctcccggcgatggacgtgttcgtcaccaccgccgaccccgacaaggagccgccgctcgccacggcgaacaccgtgctgtccatatatcctcgccgcgggctaccccgccggcaaggtgacgtgctacatttccgacgacgcaggcgcggaggtgacacgtaacgcggtcgtggaggcggcccggttcgcggcgctttgggtgtcgttctgccggaagcacggcgtcgagccgaggaacccggaggcgtacttcaacgccggcgagggtggtggtggcaaggcgaaggtggtggcgagggggagctacagggggatggcgtggccggagctggtgcgcgacagga

SEQ ID NO: 18416 - DNA, 1194 bp, Oryza sativa
tgcccagagagaaacacactcccttataggcgagcaaaatatttttggaagagataaagctaaaaatgatattgtcaagatgatttcagaagctgctgaatctaattctaataccctgtcagtgcttccactaattggaatgggaggtgtaggcaagactgccctagcaaaactggtatttaatgataaatcaaccaaagataagtttgataagatgctatgggcatctgtatctaatgcgtttgacctaaaacatattgtaaatataatcatacaatcagatagcggtgaaagcaataaccaattaaccctagaagcattaacaaagaaacttcatgagcttttaagggacaagagatacttgctagtgttagatgacatatcaaatgataatgtcaactgggaagaattgataaacctgctaccgagtggtagaagtggatgcatgattttaatcactacacgtcttacaaaaattgcatcagaattgaagacattagaaccatacgaagtgccaaaacttccacatgaagaatgcaggaaaatatttgttcgatatgctttcagaggagaaaaggcgaaggatagagagttactaaaaattggagaatccattgtacagaaatgtgatggccttcctttagcagctagaacattgggatccctattgttcagaaaagacatttctatgtggcaagaagtaaaggaaaataatttgctgagtactgggaaaggtaaagatgatatcttgtcagtattaaaactcagttatgatgcacttccatctgatttaaaaacttgtttttcctggttatccacttttccaaaggactatgatattttcagagaacttataataatgtattggatggcaatgggtctattgaatccagctagtcgaactaaggaggcaataagagtgggagagaaatactttaatgagcttgctggaagatctcttttccaggactatgtttttaatcatgatggcagcatctcacattgcaaaatgcatagccttgttcatgatctagcaatatctgtgtctcaaaatgagcatgcaattgttggctgtgaaaattttactgccactgaaagagttaagaacctagtgtgggaccacaaagacttcacaacagaactaaaatttccaacacaactgagaagggcaagaaaggctaggacatttgcatg

SEQ ID NO: 18417 - DNA, 1385 bp, Oryza sativa
gacgagaacgagcagtcgtgcgggaagcactccccaaaaacctgatcacccgcctacccgatgcagatctcaggcgaaggtgtggttccgaaggccctgctccttccaatctctcgtgcacgcaagcgatcagaagcgaggaggcgagagagcagcacaggcgcggaggaggaggaactaacacccgggaaagaagcaagcggatcgttctgatcggactcgcgacctccttatctatcaggagagaggcagtcgtgggaacgtgggatcatggacgcgccgttgcggaggcagtcgtgggaacgtgggttcatggttgcaaaagaatagtgacgtgacgtgacgcatgcacgccagccaagcctcggctcggcgcgcgcgcgcgtgcgtgtggctttccgacccccacctcaaccagtcaacaggaagcctccaataactccctatttaggttgagatattcctcgcttaaatcctgaggtggtattattatccttaacacttattatgggcctttgagatttaataggataaattgggcctagcccaattattctaacaatccccaccaaatttcatggctcataagaaatgttctcaaggttgttcctgtttgatataccagggttttggtggagactgttaagttgaacttccacctaggaaatgagctacatcagatcacaactgaataatggactatgccttgaattgtcagttttgtgtgatctggtttcactcagatccttgactggtactgggctgtcgttcgcatcccctctgttcggagcatataagtcaaactctaggcctttcatgagtatctagagatcgcccaaacctcatagactgtgactagcagtcgaactcatataggtgtgttccttctgagatgttctgcaagtcaacatctctgcttggaaaagccacccggatcacattaaggcatgagccatcctaccatgcgggaaagaagagaagtacatcatgaaaatgagcccttttcaagggtctcttctctcagtcacacaatagtttgtttcgccatccaaattcacaagatctccgatcacaatggacaggtttccactattgtgcaaccttaggtgggtatcaagcccatttccctcgatgcactatctatcacattacgtggtagccccttggtaaactgatctgccagatttctagccgtttggacatagtccaatgctatcactccggagtttttctgctttctgacagatttcagtcttctcttgatatgcctagatgacttcatgttgtcctttgaactgttcactttaataatcactgtttgattatcacagttcattaggatagctggcactagtttttcaaccactagcaaatccatcaggagt

SEQ ID NO: 18418 - DNA, 1441 bp, Oryza sativa
tttttagaacaagtaataataagcaacagtgcacacggaattgcagagttccatggaatgacggaattccccttgcttagtttgatatttttcgcaagaactgagcttgcgcttttgaagcaacagtgtagcacaacttcaaccaccatggtggttaatttataagcgtatatcatctgcatgcaaacatatgggtgaagtgaacaagtgtgcaaatgttttgaatattatcactaataaaatgtgtagtaaaaaaacaattaaagacaagtaactggattatggattgataatggaagtatggaccactctaaggtagatgtacttacttctatgcccaggttttactggaatattgacgcctttcagggatctcaattttcttcagagaagaaaatctctggatgaaatctggcaacttcttgaattctttgcagtcactaaccttcaggtattcaagagtggaagcagctgatgcaaagctatctggaaaggtctcaaactttggaagccccacaagttcaattgatttgagactcttcattccacccattgcttcctttggttccatcaaatttaactcatcacagttatgaatcaccaatttctgaagggtgactaaccggttcatgctagaggggagagagggcaaatttggacaattgaagacaaatagctctctaagtgcactgaggctgccaaatccttctgtcagtgatgttaacattgggcaggcactaatctgtagaaataccatggaagtccaacccatgagggcatcattaggaagatattgttgcttagatgtgaggattaagtacctcaagctgacaagtcttttaacatctcttggcagctcctccagttctttgcaccaagcaagttgaagtgtttgcaaattcaccagcttacacagagaattgggaaggtatttgatcttcatattccattgcagatctaggtatcttaggtgcttcaaatttccaattgaacttggtaactcctcaaactcaacttcagagaaaaccaagattcgtaggcgtgtaaaggttgccaagagatcttcaagaaaggatttgctcacagtaccatagttgtgcctactcgcaaatgtccttgccttccttgcccttctcagttgttttggaaattttaggtcctttgagaactccttctggtcccacacaagatgcttaactcttttggaggcactaaagttttcacagctaattgttgcatgctcattgggagatacagatattgctaggtcatgaacaaagctatgcattttacaatgtgagatggtgccatcatgactaaaaacatagtcttggaaaagagatctccctgcaagctcactaaaatatctctctcccattcttattgcctccttacttccactagctgtattcaacagacccattgccatccaatacattat

SEQ ID NO: 18419 - DNA, 673 bp, Oryza sativa
aaatatgtactaaaaaaccatctcatttgaatcaaattaagcaaacgaaggggaaaaattaattgaaagaaagaacttctttttttttggttagctaggttgctatgagcctctgatgatcatgccaccatctgctcctgctccggccactgcgcgaatatgtcgccggcggcgtggccgtccttgacaagagagttcacccatgacacgtccggctccgccgccgcggcgtgcgtcgccaccggcatggcggattggccgcggaacgcgaacgacgccgacttgcggagcttgtgcagctcgtcgccctggacgccccagtccagcttgccgtccggcgagccccagtccgagagaatggacggcgcgccggtcgtcgccggcgacatgagcgaacgcgccgccggggcgcggcctccgcggtcgatgaagctctggctgcgcttggcgaacgccgaggcgcgggagctcatgatcgccttcgccatggagtggtccagcccgaacgcggtgttcgcgccgcccaccatcggcgaggtcggcatgtgcatctgcgtggtgtccgccatggagctgtacgcgggcatgtcgccggcctgcttgagggacagcgcgtggagctgggacagcatggccgggtcgacggagccgagcaggtcggtgtagtccggca

SEQ ID NO: 18420 - DNA, 646 bp, Oryza sativa
gctgccgccacgacatacccaagcacccccgtgctcccgtacagcgccgccaccatcgccgccgtcctccgctccatcccgagcctcgccacgccgctcgccgaaggcccataccacaacccagccacgccaagagacaccttctcctcctccacgaccctcctcaccgccgccacgtcgtccgctgccgccagctcaagaagcaaggacgccgccatcaccgtcgcctccttctgctgctgcggcagcggcggtgtggacggcttgcgcggcccagagcacatgacacacacaaacaaacacgcacgcagagtgttcgaccgagttcttgttagtcaaaacaaacacctagttcttgatttcttgttaaattcagagaggagaagaagaacaagaagagggagaagaggaattctcgatcgatggatggatttggagagtggtgtggttggagaggggagggtgggaggtgggtggggaagggtatatgtagagagggagagtaatggaggaatgggggttgatagagataagggaagttggagacgaagaagcagctcgtctccttctccttcgcgcgttttttttttcccttctctttacacaaaaataaaataatcgttttattttttgggggctgcaggaa

SEQ ID NO: 18421 - DNA, 672 bp, Oryza sativa
caaacggccatgaaagaggtatggtctgcagggcctgggccggctgatgggtttgcttggcgtggaactggcacgccctgcaccgccggaccaggtcaaccgcatcgttgagagccgtcggccaatagaaaccctggcgaaaggccttgccaaccaaggtgcgtgaggcggagtgggctccgcactcgccttcatggatatcggcaagaagctcgacgccttgttcccgaggaatgcacttcaggaggactccgttagccgcgcgccgatagagggtcccttccaccagcacgtagcgcttggagatgcgctggatgcgttcactcccttcgcagtcctcgggtagagtcttatctgtgaggtacgcctggatctcagtgatccaagcaatcaatctaagggagctgggagcactcccctcgggtcccgaggcctggactccgacaggcctcgggggccgttcaggcgcgtccgtctcccctagggggtcgggccgcgccgacagctgggcaagcctttcttaaaaggcgcccggtggggtctgggctcgcgaggaagcgagccttgaaagttcgtcggcgaccgcgttatcccgtctgggcacgtgccgaagctctatcccgtcaaaatggcgctccatacgccgcacttggcgcacgtaagcgtccatct

SEQ ID NO: 18422 - DNA, 729 bp, Oryza sativa
tctagaaaacacaaaaggtcgcaccccgcggtggagtcgacaatctgatctatgcgtggcagggggtaagggtccttaggacatgccttgttaaggtcggtgtagtcgatgcacatccgaagcttgccgttcgccttgggaacgacgaccgggttcgccagccactccggatggatgacctcacggatgaatccggcctccagaagtcgcgccacctcctcgcggatgaaggcttgacgtttcggggcctgccgccgcactttctgccggaccggccttgcgcccggccgcacggcaagacggtgctcaatcacctccctggggaccccgggcatgtccgccggtctccaggcgaagacgtcggcgtttgcccgcaggaaggagacgagcgcgtcttcctatttgccgtccagaagaccaccgattcatgtggtcttggacgggccgtcgcccagggcaacctctttgaccgggacctcgtcgcacgtgatcatccgctgcctcggggcggctgggacggaggtgctgagcctctcgttgccaccctcgggcttggacgcggcggcgaggtggtccgcgcgctgctccatacaagcaagcgtgactttgaggtcgccatggccagagatggggccaccggggcccggcatcttcatctggaggtaggcgtagtggaccgcccccatgaacttcaccaacgcgggcctccctaggacacgcgttgtaggg

SEQ ID NO: 18423 - DNA, 1361 bp, Oryza sativa
cgtggatcgaggagttgccagcggtgctctgggcgaaccgaaccacgccaagccgagcaaccggggaaacgcctttcttcgtcgtctacggcgcggaggcggttctcccatccgagctcaccctgaggtcccctcgggccaccacatgcataagcttatattttttctcttccgtatttcaataaaagcattttcgatttcctaaggactgtgtctgtgccattgtttcctttcgaagaatcttggcttgaattagcacgctcgtgctcgatcctgccctcggtggcccgggccggctaaaatcgccaaacggggcccagaaccgagccgtgccccggggcgtggtgaactccgggggggaatcggcaaaggcccacaatcgggtcatccataaccctcggtcaccacgttcccggcctggccagtctcgacacgcggatctccccaggcactagccccgacccgcgccatttgaggctaggacctgggcacgagccctcgttcaagccaagacacagaaggactgcggcatagaccatcctcgtctcatacacacaacaaacagagctgacacaaaaatttcctctttatttgattgcagattgaattagtttatacaagaagggggcccgaaggcctcagaagaagaaagaaaaagctatttaagattggcgggggcctgggggctcacgccgacgcgcccgggtcgccggcctcgtcgtcgctgtcgtccgcaccaccgtcaccgccctcctcgtcggagtcgagggcgaacgcgagccgaggggccgtaccctcgaagctgtggacgatgtggtcggcggcgtcccggacctgtgcgcgcgcgccatcctcggttccaggagggaactcgtccagcgttgcccacggggagaagtcagggtccctggcctagtagcttgccagtacgagctccaccgccccccgggcgaggtccctcgaggatgacttgatcgtctcctcgagctcctcggggagccgctggagggtcccggccatctctgagaggcgctgggcgaggcccccctggttggcggcatatttcgcggtccgcccgccccagaggctcgcctgccgcccggcgcggtctagacgggagacggcgtcccgaagcatgccgggccctacctcacctgccaagcggagggcctcgacctccccggcggacgagtccagcgcgccctgcagctcggcgatggtgtgttcggcggctgcaaggcgggcggctaggtcgccgtcacccgcgggcgccccgccgctgcgcgctctcgtgtccagctccttcgcccgcgcctcgaattcagcggcccgctgatccagtgcggccctctcggcgcggg

SEQ ID NO: 18424 - DNA, 3845 bp, Oryza sativa
ggggggagatgaggtttccccggcatggttcggtcccccccatcttgcggagccgcttcttttttcgctccccctcgggctgcgacgtcggcacagcacccttcgggcgcctgctgctggcacgcaccgccccgccccctcggggaggagatggggagggggtatcctcctgtttcctcttcccccgggcgtcggtagggcggctgccccccgggcccccgtcacggggcccagaagcacgaccccctcccggggtagattgttcccccctgcggctcccgcccgcgccatcgtggcctcggggggcccgctcccccgacgccccgacctcctgcatgatggtcaggatgttggcgcgctctggatcgcagcagaggggaaggaccccttgagggatgagggatgcctccacggagctgagattcagcacccgttggaccactatcctgaagtcctcagggtcccagtcccatttgcgcccctggtgggtcctcatgatgtcctcgggcccggtgtactcccaggcgccccgggcgtgccgctggagcggcgcgatccggcgacgaaggtagtcgccgaacaccatggcccccgtgagcccctgggatcgcaaaccagccaggcggtcaagaacggcgtcgtagccgtctcccagatctaccggcgcccgccagctggaggcctgcgctgggggctggctcggaagtcggaggcgcgcttcgtcggcgagaggggtgtagaaccagtcgctcttccagtgatcccacttcttgcgaaggacgcagggaatatagcggttcagcaccggcccccgcggctggaagtagcagccaccgactaccgacggtggcgacaccggctgtacggtgaagaaccaccggaacaaccagagagatgggcgcaccccgatgaacatctcgcacaggtgcgcgaagatggccaacgtcattactgcattgggggtgaggtgcgccatctggagatcataaagctccagaacatccatgaagaaagaagagaatggcgggaccagccctgccattgcgaaggaaaggaagaatacggaccgccccgggtagtgtggcgccgggcgtccctcacccagcgcaaccacctcccggccggtggcagattccggcatgaatcggcgcggcagcccggcctgcctctcgctcacgatgcgagaaggcagcagcacgctaccgtcgagcggtgcggagccccgtgccataacgccggcggaggaggggtttgagagcgagtgagtgcggcgagggtagggcacaggaaacgagaagttagagcgcaagcggcgaaggcaaggggaataatggcgagaggaaggaaacgaatctcttcctcggcgtctttatacccttgccaaacgctatgcccggctcctcgcttcccgcgcccactatctcgccccctcgtttctcgcgccaactcctccactaatcccgctcgcccgtttgcggcgcacgaggcggatgtgcggccgtggcagtcgagatgggacatatcgtgcgcgcgttaactacgctcgccgaccgatgcaccatcatcacatctccaggcgaaacgaaccggctcgtcccaattcgcgcgctactcgagtaatgtagcggtcttgaagaaagccgctcattattgtcggtcggtttttcccttgccgatgcgcgcgatttgcgaccactggattcctgtccgcttttagagaccggccccacctgtcaccaggcctgaggagtggcgtcacgcccgagcgttttcctcgaggagggtgatcgccctggcataaccccgggggctactgtcggtgacatgggaccggggatatcttgactagaggtttggggcagccgcggtcacccacgtggcctgaccccctcgggggggtcgggcccaagggtgatgagaccgcccctccctctatctccccgaggggtcgggccgctcccgttttgtccccgagggctggggcgccccgaccccctgagggtttggcgccacgtgtgtgggttaggtgagcacagcggcgctcacctaaccgcgtttattgcgggttggacgagcgccccacgccgcatttaatgcagcgcagcacactcgttcggtccgtgacagggcacagtgtgtgactggtcacagaccggtcagaccgcgggttatgtggcaacaggcggcctttcgcacgccttgccccgtcctgtcggaatgatgagagcctctaggcactcgtccctagatggaaccggcgtgggaactcctggagttagcacgtcggtcccggctagattcataccaggcttcatcgcaaccattacaaggaagtcattttatgaagaagggctgacgtgtggcatgctaaactgacacgtggtagacaagaatgaccggtttgtgactggtctgatgccggtcacgtcatcagcaaacaaccgtgcttccacgttgcacttgcttccggcggagtggaggttggtatgacccatcccatcggagggtcattcggacagcagccattgcaaatctccgcccattaatgagggaggacagggttatcccggtgtcaggcgaaggtacgagccaagttttggtcaaagtaggatgggtccccacccaaaagaagggtaggtagaaatggtgtatgtggtatccccttgagatataaaaggaggaccatgcctaccaagaggggggactggagaaaagaggagtgagagggtctctagagtttgaactctcttgctctccagctctttgtaactccttcatacacagatccaccagaacacaggagtagggtactacgcttctcagcggcccgaacctgtctacatcgcccgtgtcttgcgcatttgctctctcgcgaaccattccacagatcaagggcttagaacctcacccagcgcccccggccgaaccggcaaaggggggcccgcgcggtctcccggtgaggagccccacgctccgtcaatgtcctatacggaaacaacctacggatataggagggagttccggataaggaaagacacccagagttctacatggaaacgacaaggactactaggattgtatccatattgatttccctagttcaaattggacaaggggacacctatgggtataaatacaagcctccctaggaggacagggggacacacacgcccaccacgagacaatcaactcccaacacaatcaacatagaagcctacatacaccaagacaagccgccggatatcgacatcagagatacgcctggatcgaccctatctggtaccttcagaggccggccgtagggatctagcactgtctctgattccgtcgggtgcgagctcgaggaggaaggctaccctgttgtcgactacgagtcagaccttcagaccgccatgtcgacaacagttagataggctaccctacatattgtactggtgtgattatggtgaataaaaagcaacatcggctccggccaacaagatgtagggctattacctgatagctcaggggcccgaacctgtataaaaatccatgtcttcatctcttttacctcagtctcgcgtatatcctagcaccgatgatccacatactgtccaaataccgtagtcgagacatcaaacgtcgacagtggcgcgacaggtagggggattttggtgcttcaggatttcgacgagatgcgtttaagatatggactctccgacaacaagctactcgatgacttcggctgtgcggagatctaacccaactgaagtacatcttccgaccagatcggaaccatcatcgtcatcgacaacttggtctatcgagatcatccaagcctcaagatacgcggcgggctgcaggaa

SEQ ID NO: 18425 - DNA, 920 bp, Oryza sativa
tccgacgttaaaccaactacggtctaacgctgggggctcgctctgttctcttctgtataaatcatgcttgtttacggtttacataatgcctgatatttaatctgctcgttatatcctgataatactagaagatccacgcagtttttgagtacatactcgatatcccctgctatatatcttgtcttctagaaaataattttcagaaacaattgagcactcgagtaggttgtagtcgagtacaccgcattatcgagaacgatctcgacaaatgcagagtcgtcgcgcccaacctaccaacgaagaccgacgacctatctcatagctccggccatcgctggactactcgagaaaagtttgttaacggataattcctcgctaacgccgtcggcttgatcacccgacatgattgcgaacggacatccggatatgctataagttgggtatgtgagtcatgctggccacataatatgcacatataataaaccaactttaacgcccctataggtaattaagagactcctactcctggttctcgaaccagtaaaatgtaatgatctctctcgcctcactttaagtggtcgagttacgactactgcctggtcctcgaccagcggcgtagcgtttctcccactacttctactttcagtggtcgagttacgactactgcctggtccccgaccagcgatgtagcgtttctccggctacttccactttaagtggtcgagttatgactactgcctggtcctcgactagcgatgtagcgtttctcccactatttccacttcaagtggtcgagttacgactactgcctagtcctcgaccagcgatgtagcgattctcccattacccctacttcaacaaagttgatgtcaggtacacaagatcgccaagggttttacccagagatcccttacccagat

SEQ ID NO: 18426 - DNA, 674 bp, Oryza sativa
aaaaattgggatctgtcttgtggttcaagggaaaaatcttggtcgctcgtttaagtgagatttgtcaaaacaagtcagtccagggttttagtaaaactgttgagatttattcgttagtcatttgggatttgggtcctagctcaggaacatgggttgcaaggtatttatgctcttattgttattattagtatgtatctaatttccccattattttatcgttatgtgggtctgtcttctttattcgctctcatgcaaaatgatctatgcataaaatttcgctcttattcgattctcttatttgagtcttttattgctttatttaaatttggatttgagcatgcattgatcctagtcctttgccttctctagatggccggccacccccccaaccaccgaggagaaggcatgatcgactttgtggcagagttggcacgtatgacgctggtggtgggctaccccaacgcgccagagtacacgacggttccaccgctcagtggcgagcttcctcaccgtgttcgcctggaggtccacggctacgtgggtacctgcctagctaatatggtggttgaggcatccggaggcacagtagatcacgcctgtcaggaggcagcatacctgatgatggccagactacgggagcgccacaactacatcttccacgacacggcgtaccg

SEQ ID NO: 18427 - DNA, 1444 bp, Oryza sativa
ttcaactgtggcgagcttggccacttcgccgacaaatgcccgaagcctaggcgtgccgggccaaggtttatccaggctcgtgtcaaccacgcatctgcggaggaggcacaagcagcaccagaggttgtactgggtacgtttcctgttaactcaatccctacaacagtactttttgattctggtgcaacgcattcgttcatttcaaagaagtttgtcgggatgcatgggttaataagagaggaacttagcacaccaatgcgggttcataccccagggaatagctccacttcggttcaattcagcccttctataacaatagaaattcaaagatcaccgtttctagccaacctcattcttctcgaatccaaaaacctagatgtcattcttgggatggattagctgaccaagtttaagggagtcatcgattgtgtgaatcgcacagtcaccctgaccaacgagaagggagaaacggtagtgtacaaatcaccaaactcaccaaagcaaggggtctccttgaatcagattgaagcggaaatcccagtggtcaccatggagaagaatttgaggaaattggaagatatccccatagtctacgagtatccagaagtgttccccgaagacctcactaccatgccacccaagagagagattgaattccggattaacttggcaccgggaaccgctccaatttacaagagaccgtacagaatggcggccaacgaactagcagaggtcaagaagcaggttgatgagcagctgcagaaagggtacattcgaccaagtacttcaccttggggtgctccagtcatttttgtggagaaaaaggataagacgaagaggatgtgcgttgattatcgcgcactcaacgaggtcacaatcaagaacaaatatcctttgccacgaatcgatgatttgtttgatcaactgaaaggagctaaagtgttttctaagatagacctgcgatcagcctaccaccagttgataatccgggaagaggatattccaaagacggccttcaccactcggtacgggctatatgagtgcacggttatgtctttcggacttactaacgcacctgcattcttcatgaatctgatgaacaaagtgttcatggaatttctggacaagcttgttgtggtattcatcgacgacatacttatctattcaaagtccgaagaagaacatgagcaacatctccgtctggtactcgagaagttgaaggagcactagctatacgccaagttcagcaagtgtgacttctggttaacggaagtcaaatttctgggccatgtcattacagctcaaggtgtggcagttgatccatcgaacgtggagtcagttaccaaatggaccccaccgaagaccgtgtcgcagactcaaagttttcttggacttgcgggatattaccgccgattcatcgaaaacttctccagaatcgcccggg

SEQ ID NO: 18428 - DNA, 737 bp, Oryza sativa
cggcgagctcggccccacttcttccgacgagcacgacgacgtggtggtggtggtggtggtcgtcgtcgtggacgacgacgacgacgacgacgacgagtgctgcgcgtgcagcaccgacaccgggcttgagctcggcatgccgcgctctgtcgccgccgctctcctcctgccgtggccgggatgctgcgcctcgtcgtcgtcgtcgtcgccgccgtagtgcagcttgcggcgggggcagccaccgctctgtttcttggctccgacgtgtccgctcttgccgtcgggttcgccattgtcgtggcgagaagcggcatccgggctgaagctgaggacgatgaactcgtcgccctcctccttcaagtacggcgccggcggcggcggccacccctccgccgagctcaccgacctgctcctcctcctccgccgctgccgccgcagcggctggcactccgtctccggcggcggcggcggcattgcgtcgagccccatcagcctggccacgacgcaggggctcatcccctcctcctgctgtacctgcacctgcaccaccaccgcaccgtcgtcgtcgccgccgcccgcattgccggcggcggcgtgcgcgcagagtaggcggcggaggaagtcgagagccaaggtggaggacgccatggcaatggcacctatggcagcatcagcttcgcaatgctgctgctattatatcttcttcttgcctccgttcttgattcgggctgcaggaa

SEQ ID NO: 18429 - DNA, 2680 bp, Oryza sativa
ttgatcaattgggtctgttgagccagcacttgagcaagggttgggttctcttcattgttattgtttccacttccactagcgtgagtgttcaccatctgttgcagattagaaaggatagaaggagaggggttacactaaagataagaccttaaccaggttaacactgatctgatgtgtgtagaccattatattgttcaagttgattaagcaagcaacctagtatagtcacacactcatcaatgaacttctccaatgatgggaatgcaaccatacctacacacaaagcaaacaacaaacgttctaccctactaactattcttcaaaattactttggcggtataggtgctaagacaggatccaaacttcattccatcttgaccacttggcacttcagttcttcctcgatccactttacttaacctccttaagtagacctcattggtgtcttcaagtttcaaccactagtttcagaactactcaagttgaacgagagaagagagtagacaatgaaacaatttgcaaagagttctagataaggaagaaaggaaaattttcacaaattatgttttcggaaaaatagtccttaaggtttgaccatttggcttatcctacagtcgagatggctctgataccaacttgtcacgcccggaaattcactaataatttccgaactaatttgtgcatgaaatcctcgtccaggaatcagccgaggtacacaaactgacaatttaatatacaaatccatcataataataacgttacatacttacaaaagaaaagaaaaacagcagcggaattaacggtctagcgatggcttcagctccactcccataggcagctcaactggggtataagccaaacgtcttctccttctggatcctttatcttcaactgaggtttgatgattattgcaagaatgagcatatgacatactcaacaagccacacagcaaatatgcaagtgcacaaggattccaaaggatggcataatataggctcatttgcgaaagcagcatttagcaaagagttaagagtagtaaaacagtagattaattaatcagaagttttaatcaacactgaacagcacacccatgctgtacaggcccaaccatcctgaacaaccatacccggctgaacagatctaactccaaaccaggagctaagcaaattattaccagttattacatccataattattgtgaaaggtgtgagactaatcacaaaaacattgctcaacccgcccataaccgcgggcacggctattcgaatagttttactctggccagaggtgtaccactgtacccacaagacacgattccacacatgttgccatgccccgaaataccaccacggcattgcaaagggggaaatcgtgacaataccctttgcacaacacaactcaaaacagtgcaccgttcctggatcataatcaaccccttataaacaaggcatggactccccagcgacccccgtggacttctcgccacttctcagtctggcgcactataatgaaccatgctatacaaaggataaagccgttgcccacgctggcttgtggttggtacggttaatgtctcacaacagtagctcgcgaaccggtccttaattgtcatgagcacaaccatcaaaaccatatgctcacaacccaccttaaccaggttttaattatcaattaattaacatcacacgattaaccatcgtgagctaccattaaatataaccataaataataatgtagtatatatgattcatcccattagtgagctaatgtttctaagcattgctaagcaattatatatataacttttagctgaaccaaaccaatacataaggttcaagctaatcaatttattacccaaggtatcaaggaatagggcattcaatgcaaattggccataacaaaggaataggttcacaccacccggtgacattcgaaaataaatgcacagttgaaataaatagagaatttaaatataggatcaacatgctcaaaggattgtgtttaggatctgtgtgacttgccgtgcagtaatcgatcttcaattaaccttcttgatcacgtccgacgcactcacgaaccttcgcaacgacggaaacgacaagctaacacgcaaaacgaagaaaaagactaataaaaaccaaataaacagtacataaaaagtaaaaaaacatgtagatcataattttagatgaattatgagacttgaacggcctcattccgacttcaaatgaatttattatgaattttacaagattaaatctaattaaagtccatttaaaaagacttaaataaatttaattcaatttatggacaattttaatatgtagatctttattttagaaaaatttagcaacttgaaccacctgaaacggatctatggttatttagttatgattttccgaagatttcatctattagaaaaaaggaaaaaaaaagaaaggatgatgatgtcagcatgacatcacccacggaggccggctagggttggcgacctcgccggagctagggaccttggccgggtgattggaggacacctacgcgtagaggacgacgaggcgaacccaacggtactcaccacaacgacaaacgacgaacgatgatggccggcgacgaagaggacggcggcggcggctcggcttgacggcgacggcggagctccggtggtcggcggcgaaggggg

SEQ ID NO: 18430 - DNA, 713 bp, Oryza sativa
atgtttgctgtctcagcatttggcttatttgttaacatcataatggctgtcttgcttggtcatgaccatggacatggacacggacatggtcatgggcatggacattcccatgaccatgatcatggtggttctgaccatgaccatcaccaccatgaagatcaagagcatggccatgtacatcaccacgaagatggccatggtaattcaattaccgtcaatctccatcaccatccaggcactggacaccaccaccatgatgctgaggaaccattgctcaagagtgatgctggttgtgacagcacccaatctggtgccaaggatgccaagaaggctcgtcgtaatatcaatgtacacagtgcttatctgcatgtgcttggggattcaatccagagcatcggtgtgatgattggaggggctatcatctggtacaagcccgagtggaagattattgatctcatctgcaccctcatcttctccgtgatcgtactcttcaccacaatcaagatgctgcgcaacatccttgaggtcctgatggagagcacgccccgcgagatcgatgccaccagccttgagaatggcctccgcgacatggacggtgtggttgcagcacatgagctgcacatctgggccataacggtggggaaggttctcctggcgtgccatgtgacaatcactcaggacgcagacgctgatcaaatgctgaacaaggtggg

SEQ ID NO: 18431 - DNA, 664 bp, Oryza sativa
caatgaaaaccaccacaaacttatccaagtattccatgagacactttgttcattaagttcatgaagaaggcaggggcattggttaaaccgaacgacatcaccgtgaattcaaacagtccgtatcgcgtggtgaatgcggtcttcggaatatcttcttcgcgaatacgtaattggtgatatccggaacgaagatcaatcttggagaatacagtggcacctttaagctgatcgaacagatcgtcgatccggggaagagggtacttgtttttgatggtgacttcattgagagctctgtagtcaacgcacatcctcttcgtcttgtctttcttctccacaaaaatcacaggagcaccccagggggaagtactcggacgtatataccccttttctttcagctcttccaactgtttcttaacttcggccagttcatttgctgccatacggtagggtcgcttgtacagaggagtggttcctggagcaagatctatccggaactcaatctctcgtttaggcggcataccaggtagttcttccggaaacacgtctccgaactctctgacgatggggatttctgacagtcctatctgatgaagttctgaacttctgactgaggttgggggtgcaaagaaaacaaccggttgttccggccctcggtacagagtga

SEQ ID NO: 18432 - DNA, 1491 bp, Oryza sativa
cccatgttggtctgctgggcgaggatttgggtgagaatggcgttggtatctggtggtgggggtggaggcgggggaggaggtggaggtgggttgccctgatggttgtggttgctgccttcaggttggttgccatcaccggtgttagcatttctcctggtcatcaccatctgaaaaccccacacagaaccagcaaacagagagagctgacaattaaagctaaccacccacgactaccataattcttaaatttattactgctattaaatgggttcattaaagttcaagttgcttaggcgaataaataaagacaggctccgacacagttacaccacacaccggcataaccgtgccccacacaacccaagaagacaaacgagaaagaacacacgcgcaagcctactaactgctcgtctaccgctgcgacgggccaggacggaaggtgagcaacagcgcatcctccgtgctaccaacgccggaggcttccccctcctggggaaccacgggcgcgggctcggcacgaggggtctcgacgaagcaagtccacgccagggactaacgaacaagctcaggcctggaggtgctcttgcgggcggtgatcttctggctgcggcagacgcggcgacgcttggggcggcagatctctccctgggcgatcttgagctgatgcagctgcgcctccaccgcgtctaggtccttcttgagctgcaggttctcctgacgcagctccaggatcttcaagttgttctcgaccatcccacggcgcaccatctgatggaagtcgatacgagccgcgtcgtacgcctccaccatgcgcgccaagtgcacgatggtagcgtcatcctccgagctagcatcccggaaggtggcgtggtcgcgggctcctccgcgacgagggtggtagcggtagggcgagtgctgcaactcgtccgggtagcgctggtgaagagtgccgatggcgaggagagcggcgctctggcaggcggcggggaaagagtctccacccgcggtgactgtcagcgaagtccgctcgggagagccagcgaggatcactgcagtgacctcccaagcagcgtggggctctgcatcgtccccctcctgctccggaagcggcctggcctggtagtccactccatgtggataccccaggaccacgcacatgccccgcagctccaagacgaaaccagtcatgtccaaaccacgacgggtgacgctgccggccatctacaaacaaaaacaaaaagaaaagcaacattttaaaggttagatttttggcgataaatgaagcagcaagacagagagagactagaggattttcacaaataagaagggattttatttttgaaaatattgctaaggcttgggatctacggctcgtcctagggtcaaggggggctctgataccaacttgtcacgaccggaaataacccaacgggcattccttacgtgcgtgcattaatccttgtcccaggaggcaaggtacaccaaaagttg

SEQ ID NO: 18433 - DNA, 3559 bp, Oryza sativa
tgggggggcacatcctctctattgcacgtattttctcgggattagcttctatgcctcgggaggagactagaaaaccgaggagtttgcccgccggcacaccaaacacacacttgtcggggttcagtttcacgcgtgtggacctaagactgtcgaaagctcggccaaatcctgcaacaacgtgtcctggtggcgcgtctttaccaccaggtcatcgacatactcctctatattgcgccttatctgattactcaaagtaatacgagtcatacgctgaaaagtagggcctgcattctttaacccaaaaggcatagttgtataacaaaagctgcccacgggagtaatgacggcagttttttcctcatcttccctagccaggcggatctggtgatacccagatgtcacgaccggaaataacccaacgggcattccttacgtgcgtgcattaatccttgtcccaggaggcaaggtacaccaaaagttgatacaattcagagtttaacaagcggaagcgtaattagataacttattacatgggcagcgaaggcccagcacacacaaagacaaacgagaaacagcggaagactagggcgacgaccacaggcacttgacggcaggcacgagctagacaccgaagccttcatcctcctggaactcctcttctggggttgggaaaaattgagcaagactgagtacaaccaccgtactcaacaagacacacccacaagtgcagaataaatgcaagggagtacaaaggagttataccataaaggggttagggttgcagtaaacagcatttaaagatatttagttgctcagggctattttgtaaacacgattctagaactaaacaatattatttatcaaggccgtgaacccacacgaacctgccttaacccaaggcctacgatgattcagaccgaactggcaacccgaccctgggccccagctcgtcccaagccaacccaggccaaccattccatattttagttgttaagcaagttttaagaattaaaacactaacttgggtacattgctcggcttgcccataaccgagggcgcggctattcgaatagattatactctgatcagagatgtacatctttacccacaagacacatcttcctcacgtgtaaccacgtgccacataccaccacggtatacagacgaaagacgtgacatagtttccaacccatcctagccatagacaagagtaccgacccaatcccacctacggccggaacacccgggacaggcaggcaggactgagcccctagcagcaggacaccggccctgtgccatgacatctcgactaccgggccgcagctcgtgtagccttcatttgccctggagaatgtccatcgacccccgacttcatccatctccaatccgtgtacttttgtttatgactagactgagccacaaactaagccttacccactagacatgtggaagtacggtagtgctttgcaacagaggcccgaagaccggtccttatatggccgaggtgctactatcaaaaccatgcaccccgagcccagcctaaaaccacttttggggattttgaatagagggggcggtgtgaatccaattccacaatactccaacaattccacagtgtccaggtgatatgaatattcccaaggtctagagttgtaaaaccacctaatgttacctaattaaatagcgaagcatctacctaaaatcatactagtggtaccatgagtagagtgttcactagttggggttttgttggttctagggtgaacaaggtaataataacaataacaataataaggtcgtaacaaaggtaaataggcatggctaaataaaacagtgataacgcgggaatttaaataaataggcggccataggcacggcggagcggcggccgagagaggggagggaagggggaaacgaaatggcggtcctcggctcaccccgggttgacggcgacgacgggaacggcgaccgaagcggagagaggcggcggcgcggctcgggtcgacgaggacgatggtgctccggcggtcggcgggcgaaacggaggagtggacgaggtcgacgagaacgcggcgaagccgaaggaggcgacgccgaagcgggaggaggtccggggcgacgacggcggcgaaccggagctcggcggcgacggcggagagagaggacgacggcgcgagctcgaatccgatggggagagcgagcggcggacggcggaaacggaggagggaggcacggggagcgtttaaatagggttgggagtgagagagggcggccggaggggaaggaaatcggtgcggcgatctcgggctccattgatgcgccggcgaagatttcgggagagtaaatccgaacgaatccgagggagagagagagggaaaagaggggggaaagagagagggaatcacggggagtgatttccccctctttattgcgcgcggggacggcgggatgcggcggaatccgcggcggcggcggcgctagggcacgggcgaggcggcgggcgcggcgcgaggtaggggatgacgggtgggccccacccgtcagcgagggtggcgggcgggcccgcccgtcagcggcacgcgcggggaggaggctgatgggccgcgggggagaggagagagagggagggagttgggccgagccggcccaagagaggaagggggggaaaaggacttttagggatttttctttttataaaacccttttaactttgtttatttcttcttaattattatttgtgctctgaaaattccactaaaatttatttacgcattttaggcttttaggaaatatacaaaaatcctccaagccttatttgacttttagctttgcacattttaattgttggaggctttcacatggattttacttattcttcgcacaatttcgaggatgtattttagagtcgatttgggacgcgacaccagagtaggcatctagaaaacacaaaaggtcgcaccccgcagtggagtcgactatctgatctatgcgtggtaaagggaagggatctttagggcatgccttgttgaggtccgtgtagtcaatgcacatccggagcttaccgttggccttcgggacgaccaccgggttcgccaaccactccggatggataacctcgcggataaagtcagcctccaggagccgcgccacttcctctcggatgaaggcctgccgctccggggcttgacaccgcactttttgccggacgggtcgcgcatccagccgcatggcgaggcggtgctcgatcacctccctagggaccccgggcatgtccgacggcttccattcgaagacgtcggagtttgcccgcaggaaggagacgagcgcgctttcctatttggcgtgcagggtcccgccaattttggcggtcttggacggatcatcgccaagggggatctccttgacgggcacctcgtcagccgaggtgaggcgcttcttggaggcgtgggacgcggaggcctccggggcctgtggctccgtggccactgccaggttgtcggcgcgctgctccgcgcaggcgagggtgactttgacatcgccaaagacggtgatgggacca

SEQ ID NO: 18434 - DNA, 713 bp, Oryza sativa
  unsure (1)..(713): unsure at all n locations
agcgagcactgtcaaatggtcgctctggtcaaaggtgagcttcacctccgaccagtgcgccttccgagccgcttcgtgggttgggacggtggctagaagctctcgccttatggccttgaagcctcggcgggaggtgtgagcgcaagccccccctccccncaggtcgagcgtggcgacggttccctgaggtatctggaactccagatcctcgctgttatcaccatcatcggtgggggccttcttcttcgcttcccctcgtcggtcatcggctggggtcgcgggggctttgccctctcgtcgaccctaccgcttctcctcatcggcttcccggaaccgctcggccaaaattcttgactgagcggcagtcggcgagactgtgctgataagtgttgtgcaccaagcaccacttgtctgccgaccggccctcaccggatggagcagtggagcttggcttatcgccggtggcctttcccttgcacggggcccatgagggcccatcagctgcaaggacatggccctcatcatcggagcgggccggtttccttttgcccctcctatctcaccgcttagagcggggaacagactgggggggtagccgcagccgccgcaccggtgccgggggagttccaggcccacgcctccttccaagccaccttgtccgccagctcgaacagctcggcggtggtcttgggatcttggaggggcgcaggaat

SEQ ID NO: 18435 - DNA, 838 bp, Oryza sativa
cggaaaaggaagggaaaaagaaaaagaaaaaaggagaaaagaattttccctagaattaaaatattgcttgctcaattttaattggttaaaattatttttagggctctgaaaattccacttaaaatcctgttagtgaatttcgacctgtagaactcaagaaaaattccacatgccaattccgattattatttgcattgatttaaaaggggtttactcttactttgcaccggtattttcttaggatcatttataaattaaatttaggcttggaaggagaacttcagggtgtgacacccgcccccgggcggagggaggccacgacgcgtcggggcacgacgccgcctcacttacggtgacggcggctcgccccgaggcgcgcttcaggcggcgggtgtccttctgcggcatccccccgtgaactcggagccggagacccctgtccagcgctggttgaacgacgtggccaacttggtcaccactgcccagcggcagttagccgcgggcggccgagccgccgtcaccggtacgtcgcatacccccattgccctctcctcgtcagcgaggaggagggcccatcgatcggccacggccttgaggcggtccacggctccaacatcgtcgggggcctcgggaagccggaggcgtcccgacggtctctacggggagcaggacgctcgaatcaatatcgagcgacgccgggacgagcgccgagctgcccgcatggggaaggcgcctcctcatctggagtgccgcgttcctccccacgagacggccctccccccacgctcagccctggagggactggttgtagggcattcgtggcgagtcttcggaatgt

SEQ ID NO: 18436 - DNA, 1061 bp, Oryza sativa
ccccggagcggagtgacacgaagatacacgtaatcccctgcctcaaaagtgagctcccttcgacggttatccgcgtagctcttctgcgagactgggcaatcctcaacctttccttgatgattctgactttctcttctgcttccgctaatacctctgtcccgaacagttgacgctcgcctgtctgatcccagaagaggggtgtgcggcacttccggccgtataaagcttcaaacggtgccatctgtagactggcctggtagctgttgttgtacgagaattccgcatatggcaagcttttgtcccaagctccaccaaaatcaagagcgcaagctctcaatatatcttccaagatttgattgactcgctcggtttgaccatcagtttgcgggtgataggccgtgctgaaatttaaacgggtccccaattcttcctgcagcttctgccagaattttgaggtgaactgactccctcggttagatacaatctttttgggtactctatgtagacacatgattctcgagaggtagagctccgccaaccttttgcccgtatacgtggtatgtactggtatgaagtgagcaaccttagtgagtcgatccatgactatccagattgaatcgtgacccgatgatgtccagggcagtcctattataaagtccattccaatctcctcccatttccattccgggatttgaagaggttggagtaaacctgctggtctttggtgctctgccttcactcgttggcaaacatcgcagagtgcgacgaattcagctatttctctcctcatgctgacccaccaaaacttttctttgaggtcttgatacattttggtgctgcctggatggatggagtactgggtctgatgagcctcggtgagtatcagatccttcagttccttgtcgtcaggtacacacaatctttctcccaaccagattgtgccatgctcatcttcgtggaaatcccgggcttttccgactctcatgttctttttcagctctgctatttcagaatcatttacttgagctactctgactttatccacgagcgtaggccgtgcc

SEQ ID NO: 18437 - DNA, 646 bp, Oryza sativa
cggtggagttccaggtccaggcctcttccttgcgagccacacggtccgcgagctgaaaaagctccgcggtggtctggggctccttggaggcgatcttttcgagcatgcggttgtgccgcacgccccccctgaacgcgtagattaccgcgtgtgcggggatgcatggtatggtgttgcggacttgacagaaccgctgaatgtacgagcgaagagactcatcgtcccttcgctgtaccgcatgcaagtccgcttcttcacctgggcgcggatatgtgccttggaagttcatggtgaactgctagcacaaatcctcccaagagtggaccgacgcgggcggcaagttcattagccaaccccgcgcctgtcctttcagggccatggggaagaaattcgccatgaccctgtcgtcacccccggcggcctcgatcccggtcatgtagacctggagaaactcggcggggttgacgcttccgtcatatttttcggtgatggtgggccggaaccttgggggccaacggacgttccgaaggctcgccacaaaggctcgacagccgacaccaccaatcgggggcacggggggctggcccccgcgcccgaaccgaagtggcgctccggacgaggaagcgccttccgttgcgtgggaagc

SEQ ID NO: 18438 - DNA, 637 bp, Oryza sativa
gtgccgggccaagggttatccaggctcgcgtcaaccacgcatctgcggaggaggcacaagcagcaccagaggttgtactgggtacgtttcctgttaactcaatccctacaacagtgctttttgattctggtgcaacgcattcgttcatttcaaagaagtttgtcgggatgcatgggttaataagagaggaacttagcacaccaatgcgggttcataccccagggaatagctccacttcggttcaattcagcccttctataacaatagaaattcaaagatcaccgtttctagccaacctcattcttctcgaatccaaaaacctagatgtcattcttgggatggattagctgaccaagtttaagggagtcatcgattgtgtgaatcgcacagtcaccctgaccaacgagaagggagaaacggtagtgtacaaatcaccaaactcaccaaagcaaggggtctccttgaatcagattgaagcggaaatcccagtggtcaccatggagaagaatttgaggaaattggaagatatccccatagtctacgagtatccagaagtgttccccgaagacctcactaccatgccacccaagagagagattgaattccggattaacttggcaccgggaaccgctccaat

SEQ ID NO: 18439 - DNA, 3214 bp, Oryza sativa
ttaagcatgacataagtatttttgtatttgtataaaaaatttaaataagatgaatggtcaaacgttggttaaaaagtcaacggcgtcatacattaaaatacggagggagtataatggtatactatttcgtatttccggtaaaaatatgagctcatttagatgagaaatacaaataaaagtcacggacaaccctgcgatacaaattctgtactctatgtttgactttttcttttcatgtaggtgtcaaacatatagctggaaatatgtttgagagcgtacctaatggagatgcaattttcttgaaggtaagatgaataactagacgtaacatccatttccccttttattgagtatttaaatgttaactataagatagcatggtccccatattaattactatttatcttacgttcataaaaatctatgtgcactgacacaagatgtgtaaaacactattccattatcttaaaatttaaaaagaaattatcgatagcacaagccgatccataggtataatatatacttccttcgtccctaaataattgacgccgttaaattttttaaacatgtttggccgtttatattacccaaaaacttttatgaatatattcaaaaacttgagtagtattagtatatttaacaataaatcaaatgatagaaaagaattaataattacttaaaactttttaaataagatgaacggtcaaacatgttatactatttgttggtccattctttcataaaatgaactatgtttcattttggaagagcaaaggtgcgaaacttagttcattactttactttaaagtaggttgggtttaagacaaaggagtgagtccggctaacaccgtaccaaccctgaaaagtatatatgcattatattttaaagaaactaattatggtcagtttaacatataatacctcaagtcattctaatattttccacattcatattgatgttaatgaatctaaatataacttcaatatgaatgtgaaaaatgctagaataacttatattgtgaaacgagtcgataaataaccaactaacgtggcttgaatatatgtgcatgcagtcgatgctccacctacataacgatgaggactgcatcaagatcctcaagaagtgccaccaagcactcacacacaacgggaaggtgattgctgttgagatacttctcccagcgattccagagccggtcccaacagcacaaaacccattccggatggacatgatcatgctcaacaatcactggggaggaaaggagaggacggaaccagagtttgctaagctagccgtggaatgtggctacaccggtgtatttcaagcaacctatattttcgctaactattgggctcttgagttcagcaagtagttcttcaaaatcatgttaatttggttttatatttattatgtatttcaataagtatatatggcaaagagtaattccgatgccatgcaaatggtttgaaattgtttttacttgtgtaataaaaatataaattaccccctataaatcgaacatcgtactgcaaatggctcatatatatatatatatatatatatatatatatatatatatatatatatatatgtatgtatgtatgtatacatgtacatatattatgtatatgtatatgtacatatgtatacgtatatgtatatgtatatgtatatacgtatatgtatgtatatgtatgtatatacatatatatagatatatgtatgtatatatatacatacatatatgtatgtatatatatgtatgtacatatatacatacatacatacatacatacatacatcatatatatatatacatatatatatatacatatatatatatatatatatatatatatatatatatatatatatatacacacacacacacacacacacacacacacacacacacaccaacgagcggtgaagtttgacactcaactataataagtatgccctaatatgtatggtggcaatcagctgcaacatcataaatctctttatactcctattcctatatactggaataatattatactacagcagttcaagcaacaagctagaaaaaaagtaacaaactcagcgtaaaagtggaattgttacaaggatcagttaaatttgatcaagttaattacagtgtgaatgaattaatttaactggcgacgacagtttcagccttttatggcggtaggtgtgaaatctttttcctgtgtacacacgatccaacggctgttcgtctatatatagtttagcatgtacacatgcataagcataatgcatacgtacatgcgcgtgcacgtcatcaatgcatcgatttcatgctggatgatattccctccgttccacgttttgatctcttaatataaaaatccatttacatccgtatgaatttggacacgtggtatattgtaaatagacccatatataaatttattcaaaacctaaccaaaacacttataatttaaaatagagaaagtaatattaatatatagcaactgctatttaatgtttgttaacaaagatctggtcaaaattttaaagatgtgactgtcgatagtttatcaaatgattagtttaaaaagaaagtaaatggcacgtgtagatttatcttaaaaaatattattataaattatttcctccgtttcacaatgtaagtcattctaacatttttcacattcatattgatatcatgaatctagatagatatacattgtgaaacggagggagtattagattctataaacttatttaataaaaaatcagtcaaaattccaaaagttggtcttgtccttcatgtctgacttgtgactataggagtatatatagagtagtcattccattgtaaaaataaaccaatatggagtaataaatcaatagtactacacaaactcgattggtttatttttgagcggaggaggtatatataatatatatttgcattgatcagtgatctagtaactgacatttctattcaatatgagaagatggacagcccatttaatccgtttgtttgttgattaattaacggattccatgtcgtcgacaaaaagtaaggagaaaaatataataaaaccttaataaataaatgattgggcttgttaatgggcttcctcttcctgggcctgagcggtggcgcgcttgggccgccggcccatctcgtctcatctcccccgtcgccgtcgagctcgacggggaccgactcgttatcca

SEQ ID NO: 18440 - DNA, 2287 bp, Oryza sativa
taaccacacaggggatggtcctcaagccggcaaccttcccatgtgtgtaccacactccgtcttcgtaaaactgagagacgtagtctatggagagcggattgtgagtgtgctcctcatgcaagtcatctccaaagtccaagcgaatactgaggagccgccagaattgcctcctagagatagaacactgaagggtgtcggacatccacttcatctcactatagtctccagccacccacactgtagcatagaactgtcggattaaatcttcattgtagtcttgtttgagagtcacaatccgtcaatgccaacagtcttgaagagatcctgcaagccctcaaactctggagtctcattgatgtctctccaagaaatccacttatgctctgcaaaagctttccctgcataaacttgctcatacacactcttttggaaagcggtgtgaaaacggggattccgggtgtcccgaggcctcaaaaactgatcatggtgcctcaaaatggtatactgcgatggattcctcatgttcacaacaaactggatggagggatcaatgtgcatatcatcacttccttcatcctcatcctctccacttccactgacatcatctccactttcctcctcactagccccctcaacattggcctcaacctcttcatcactttgagcgtactcatctccgcttgactcctcactcacgggatcgggcgtgggctcacgacgactatgacgagtgcggggaggcatttgctgtcaaagagcaaaggatatgggatattagcaataacttttagaagacactatgtttaggcgaaaaggaaactgcacactgcatgtcaggggcggtcagaccgaagtccagcggccggtcagaccggtggataacggccggtcagaccgccgtccacatgtcggtcagaccgtcggccgagctcggtcagaccgtcgaccgctgaccgagctcgatcagaccacctctgacaagtgcacaagaaaatcccttttaccatcacatacaaatgactctaaaaatatttgctacatcaagattgcacaagattggaactagaacatcaaaggattggacctatttcatcaagattggaacaactacccatagccctagggtgaaatagatcgatttgagagaatgcacaagaggaagagtgatttaccggttggaggagttgaatcacaccaagaaactaccctctattggtgcaaatcgaagaacacctcgtgcttcacctagggttccatgccatggatcaaaaactcaacaaaaacacgaactgatacatggaatagagagaggaagcggaggagaatcacttacggtgtaaccggagagaaatccacggtcaaaccgaggggatttggtggaggaaagagttagggtttaaggggaggtgagagagagagagagagagtttttcgagttggggatgaatggggatgagataggagagggtaggtgcgggatggagaagaaaaaggggcaaaactgcctaggcccacctcagccggtcagaccggccctatgtggccggtcagaccaccgcacctggccagtcagaccgcgcatatagcgccggtcagaccgccaggccccctgccggctgtgcacagcccttgcacaagccggcaaccccacacaataaaattcaacaagaaatttgattttttaaagcaatctttgaaatgtgtgagtataaatattgctaaccacccataatatttaaaaattataatgatttgcaacaaaactcacttaagtgctaggaggtgaccttttatggtatataggggtttttgggctaaattgtttttcaaataacttttgaaatatttggtttttgaatatgatttgaataccaaaaacatttcaaatcctcctctttaccaactttgttttgaaacttttctcaaattctctctcaatctcattttggaggaaaatctcattttggccaaaaataagaatatagtttcttcaaaagagggccaaaagggcattttcatttaaaaatcattttccttgcaatgtgaggcttggaaaacatataggaaaccttttgaaacattttccaagagatagttttcaaattacattgattttacaaaagttttgacttatgttgacttgggcattttgaaaatactactagcaccactagttgatttgctcacatataaagggaagtagagcacatgcaagagtgcaaaactcccccttaatgtgacatgctccattttcgcaatgaagaatttagtggcaacaaatccaaag

SEQ ID NO: 18441 - DNA, 930 bp, Oryza sativa
cttaggagcggcttgaaaccgtgcacacatgcaaacactaaacatgatatccggcctagatgcagtaaggtaaagcaagctaccaatcatagaacgataaagctttaaatctaccggtttacctccctcatcaaggtcgagatgcccgttggttgccataggtgtcttgatgggcttcgcatcctccaagccaaacctcttgagtagatccttgatgtacttggtttggctcacgaacgtcccatccttgagttgcttgatttgaagtccaaggaagaagctcaattcttcaatcatggacatctcaaattccctagacatcatatcaccaaatcccttgcaaaataccttattagtagaaccgaaaatgaaatcatcaacataaatttgacacacaaagaaatcatcaccaatgatttttgtgaaaagggtggtgtcaacttttccaattttgaaatcctttgacaaaagaaaatctctcaatctttcataccaagccctaggagcttgttttaaaccataaagagcttttgagagtttataaacatggttaggatttttaggatcttcaaaaccgggaggttgttcaacaaagacaagttcggcaatttcaccatttagaaaagcacttttcacatccatttgaaatagttttatatcaaagcataatgcaaatgcaagaaggatgcgaatagcctcaagtcttgccacgggggcaaaagtttcaccgaagtccaaaccttcaacttgtgtgaaaccttgtgccaccaaccttgccttgtttctcaccaccaacccgttctcatcttgtttgttcctaaagacccactttgtccctatgacattgtggtctctaagtctttcaaccaaagtccacacattatttcttgcaaagttgttgagctcttcatgcatagcattcatccaatc

SEQ ID NO: 18442 - DNA, 657 bp, Oryza sativa
ccactaaaatcaagatttttatgtggtttcttcacaagaaagtaattctaacgaaaggtaacctggctaaaagaaaataggggggagacaaacattgttctttctgctatgcacaacaaacaatccaacatcttttctttgagtgtcatgtcgctcagtttgtttggagacgtgtgttttttgtttttaatatccccccggcccaccccataacgccaaaaacatttttggtaattggcttagagaggtatctaggtccattaagaagatgattctaatttgagctagcgctgtatgttggtcaatttggcgttgtcacaatgataaagtttttaatggtaaacaattatctaaccctatacaggttatcttcatatcttcctactggctccacttctggtctacaatgctaccacaggaggagcaggatactatgcgcaatggtgctatactcttggaatcggtagccaagggtctcttatttcactatgggtggcgtagttccataagaattgctagctaaaatattttatgtgatttaacgctagttaataataaatgggagttggggatttgtcccatcaccttatttctcattttgatttacttttatcttacctttttattactattaaacttatggttgtgtgtcttata

SEQ ID NO: 18443 - DNA, 3041 bp, Oryza sativa
gcggctgcgctgacgacgacgaccggcgcccatacactgctgcttcggtctcgcgcatggcggcgccgcacaacggaggaggaggacggcggcgggtttcggggcggcgaggtggtcggggcggcggctgcgggcgctgccgccgcaggtgagcgagttcctcagccccgagcagctggtccccggctcgccggccgacaccggcgacgtctcctccctcatcccaatcaggcaaagtactctatacatattgtacttcaccagcattatcctactcgctccgttctatattataaatcgtttaaattattttttatcaattttttttaggtttgatcaaatttacagaaaaaattagcaaacatttataacaccaaattagtttcattagatttagcattgaatatattttgataatatgtttgttttgtattgaaaatgttactatatttttctctaaacttagtcaaacttaaaaaagtttgataaaataaaaattcgaacgatttataatatgaaacggagggagtactaagtaaagtatatactggtacctgcaatacttgatagcaaaatcaagcaagtacaggatgaaatacgtgattaacttatgcttaagggttaagactctaattttaggattacagagctaatcaatacattgtgttaactaactttaagcttatatggcatcagataatattacaagacatgtatatatattaccaatgaaaataacaaattattccttggccttcgaagaagcagcaagataatgtcaggaaagacaatgttttgtatgaacaaaatataactgtatgattgtatcttatatgaaagtgggtgtaaatttattgtgttccaatgggctatgaaacatccaaattctcatctttaactgggccaaactaggccttgctgtgtcttgggctaggtagaacctgggttgggcttgggctaaccaggtcattgttggaagtgccttagtttcacatgattttttatttttgtgcttagcattttttatctccaacaattgacaaaaaccaggacttgatagtcactgtatggtcagtgagctcagactcaaaacatgacagtctagatggttactgtattttacaccagctgcaaaaacatgcgatcaatacgcatctaattaacagcataacctcacatctgacaaatgccacaaaattcaggactcattgatttttgcctctctgttttttctttaacttttgttgatggatgttcttgcgcctgtgtgcaaaatgcagtgctctgatgctgttcttctacttcgtgtccaactgggtggtgcctgagttaatcatgaaggatttgcaggagcccaaaaaggctgaagaatcagaagaagctgcctcttcaccggcagcaaccatgtcggtcgccggcgacggccaacctgaagctaaaatcagactcaaggtgaagaagacaaagaagaacaagaaggctgccatgaaggtgtagtgcacacaaacatgcatcaatataatgcatgctagtatgttattgcccccctcatgatgataatagatagcatcatcagtcaaagatcacactaaagtgctaattataatcaaagagaagattaattctccatcagaaggggggggcttacatatagtatgtactcatcatgttctgaatctgtgagccattcaattgaaagataattattccattgcatatttgcatctatgcttagctagccagtactaagtatcaacaacagctagcactagctaataaagttttgggagaagaatgaaaggtggagagggcattggtacaaacaggtggggcttgtattgtggtagcaggcaaaagtgggcaaatcagtcggttatcagtgtggtgggctgaactccacaaaatcctctcatcgcatcaactggttgttgttgttgttgttgttgccatcacacacaacagcatcaatgggaaagcttaggcatgctcagctcaaaagtaggaagggaccaagggcaggcaggatcatcaacttgcaaagcatgtgtaggtttcagtttcatggttcaattcaacaatcaacaccaaaaacacttcatggatcagagagattttttaatacgtgaaaatcgttcgttagcgcctttttaggaacaaattaggaatgacataggattatttgaggaattttttttcagggtatggaattctaagaatcttatggagaattttatccatgtggctctctcaaacaaaagaatgaacttttctgcatagccatgtgttcacatgtaataggcagccacacaggaaatctaacagaaggtcaaactttctttaatactctctccaaattcatatagaaatttatccaatagctcaattgagcaaatcatattctgcaattccttatgattcaacttggcgagccacttttgttttgtatttttttttatatggcagattccaccagagtgtaaatctgttgttccagaatttcgcaatttgtccggtaccatgcccttctagaatatctgacgagaccaaaatatggaggcataaccacttgcaatgaactgaactgaaaccatatgtaaagtatgctgcagagatcgatgaaggatgatagatagatatattccatttcttgctttgaagcaacagaacaaaaaaacccacacccacacatcactcctcccatttcgatcagaaataggtactgcaaaatcttcctgcttgcttcagaatccagaactctccattaatttctcgaaacaactgcctctagtacagtacagtgatagaaaaacataacaaaatgataaagaaaaagagagcaggattcagtcaattgacagccacagataaaagcaagaaacatttttctttcactcctgccgattttgtttctgaatttctgatgacagttaatttttgtggttaaggaggagtccagaacatcagatgccactagaaagaagatcattcaaggcgatgagtggtagaaaatcatccacacaactaaggccagggtaaagcca

SEQ ID NO: 18444 - DNA, 1762 bp, Oryza sativa
gcgcgccaccgcggcggagaaggccatccggctgctgctcaagtcgccggccgtgtcgccgtcgtcgtcgccgaagaagtcggcctcgccgccgtcgccgccgccgccgcaggaggcgaagaaggagtacccgcctgacctgacgctgcccgacctcaagagcggactgttcagcaccgacgagttccgcatgtacagcttcaaggtgaagccgtgctcccgcgcctactcccatgactggaccgagtgccccttcgtccaccccggcgagaacgcgcgccgccgcgaccctcgccgctactcctacagctgcgtgccttgcccggagttccgcaagggcggctcgtgccgcaagggcgacgcgtgcgagtacgcccatggcgtgttcgagtgctggctccacccggcgcagtacaggacgcgcctctgcaaggacgaggtcggctgcgcgcgccgcatctgcttcttcgcccacaagcccgacgagctccgcgccgtcaacccctccgccgtgtccgtcggcatgcagcccaccgtatcgtcgccgcgctcctcgccgcccaacgggctcgacatggcggcggcggcggcggcgatgatgagccccgcctggccgtcgtccccagcgagccgcctcaagacggcgctcggcgcgcgggagctcgacttcgacctcgagatgctcgcgctggaccagtaccagcagaagctgttcgacaaggtgtccggcgcgccgtcgccgagggcgagctggggcgccgcggcgaacggcctcgccaccgcgtcgccggcgagggccgtgccggactacaccgacctgctcggctccgtcgacccggccatgctgtcccagctccacgcgctgtccctcaagcaggccggcgacatgcccgcgtacagctccatggcggacaccacgcagatgcacatgccgacctcgccgatggtgggcggcgcgaacaccgcgttcgggctggaccactccatggcgaaggcgatcatgagctcccgcgcctcggcgttcgccaagcgcagccagagcttcatcgaccgcggaggccgcgccccggcggcgcgttcgctcatgtcgccggcgacgaccggcgcgccgtccattctctcggactggggctcgccggacggcaagctggactggggcgtccagggcgacgagctgcacaagctccgcaagtcggcgtcgttcgcgttccgcggccaatccgccatgccggtggcgacgcacgccgcggcggcggagccggacgtgtcatgggtgaactctcttgtcaaggacggccacgccgccggcgacatattcgcgcagtggccggagcaggagcagatggtggcatgatcatcagaggctcatagcaacctagctaaccaaaaaaaaagaagttctttctttcaattaatttttccccttcgtttgcttaatttgattcaaatgagatggttttttagtacatatttaagctgttcgcaaataatattgttcatcaacaaagaagcatgtatacccaaagggagctctagattgatgaagaacagctgatatttactctattaatttttgcccctctctttgggttttataaaatagttgtatacaagaattccaacaagagtttttattttactcgatatatattcatatatatctttgggcatcagtaagattttgatccatgtgctgtctgtcttatgttattaaccatgcaagattcatgttgttcatcaggaacatatgcttattatcagc

SEQ ID NO: 18445 - DNA, 745 bp, Oryza sativa
atgctttgttttgcatatcgctgtccgttattatagaccttggtttctgctggcacattgctctcaagaacacctgaagaaaccaagtataagattcaacacactcgtcggacacaataccacaggcaaaaatagtggtttgacgatggtggttgagcccaacaaagggaataaatggcatgttatatttgttcatcctttgtgtgctatcaaacacaacaacatcaccgaacgattgatagtccatgcgagactgagcatcacaccaaaacagatttttcagacgaccttcatcatcaacttggtactcatagaaaaaaccaggatccttgtcccgccttttcttcataagttctaaagttgcacttgcatcaccttccaaaattctagacctcttataccttgatgaataattgtacaagtcctttttgacaaatcccaccttatcgtatcctccatacttgcacttcatgaccttcattatgacattttttcgaataccaatagattctagtgaatgtatttcagatttttggaagtccttaattttcctatgagaccgaagaaatggagtcccgtcgtggctcgtcaatgggtggttatgctcatcaataaaattgtctacaaaccagataccatgtttcttatcaagcttgatgctaagactagcagcgcattccatttgagtcaacgctctttcccttcttacacaatcctcaggttttaccaaactaggatctcgaat

SEQ ID NO: 18446 - DNA, 756 bp, Oryza sativa
ccctatttgttttctgtttgttgttcgtgctcagcactaatgattgacaaaacaaaatccagggaaggtgtgactgctgttgaggaacctgtggactgcccaaatgtctcagaaatttcctgcaaatatgctctgatgttccaagactttctgcagtcatcaagcttgcctgtgtggaacagagttgataattgtggattttggcgtcaattcacagtatgatctctcaaagcttttcaactctttcagtgggtgcttatatgttcatttcctgttggtatattatacactttatttgaactattttagttctgggataataatttctcagactatggctgctgtataggttcgggagggaagatgtcaagctcaagctgttgcacagaatgcagaaaaccaaatatcagaagtcatgcttattgttcaggtagtacctcattctcaaatagatggtgctttagaatgtgctctatcaaacctcataaacttttggtggagaatataaaaaattaatacattaagacttctcatgtcaaaatgacattagtagatctgtgacatctgtcatgaaaaatatatttttagtagttgtgaaaaacataatactataataagtactggttcaaaggtgcgtgacaagggaacagaaggattgtaacatcaagaatcaaaatgcattgtatactacgagtcctgtagatcacatcagtgcaatacatgttcctactggcaggattgtctgacttcctatgt

SEQ ID NO: 18447 - DNA, 1055 bp, Oryza sativa
tatcgatgtattaaaattgacggcacaaagcaaagagaaagaagacggtaaaactagtgctttaatttagaattgatcgatgtgtagggcgattaaatttgctagtttattttctagtttcgccgtactattaagaggggtaatgacctagcaaagagatgattaaattgctacattaggtcattgcattttcacttgtgctcactttttcatcacacacacaaaaactcacctttgctttcactgagctcggcctgaccaggggcggtcagaccggccacatagtggcggtctgaccggcatgccctggccggtctgaccggcctcacaacggcggtctgaccggcccgtaaggccggtctgaccggcggcacatgcccggacagaccggccccctggaggccgggatgctgctacttgggatggccgatacagagccgacggagccgtattcggtcagaccgagccgaggccgatctgaccgcccactcaacgccggtctgaccggccaggcagatggggccctctgacagcactacaacggctagttttctagccgttgcagagtagcacggtctgaccggccatatacctccggtcagaccggcagagcacaaagttgggggatttcgcccccaatagctagttttggtggatgggagtataaatactcccccaccaacagcaaggggactcttttggcacccaattcaattgcatacacccctttcatctctctgacacccacttgagttttgtgttcatccatctagtgtgttagaggtttgatctagccataaatcaagtgcatttgcttccattgtagagctagtgtggcacttgattgatcatctccatgccgggtcattgcttgttactcttggaggttgccgcctcctagacggcttgtggaggagttgcccggtgacctctccgagaagattgtggaggaggcccggcgccggtttgtgagtggtttggagttcaccaccttcggagtgaaggaagaactaccctagtgatcgaggcttgggtagtcctctctgtgggcgggc

SEQ ID NO: 18448 - DNA, 1241 bp, Oryza sativa
aatttctggagcatcctaatcactaaagagaattttggatggtcaaaaactgataatgcatcatctatctcgatcaaaccgagtcaacatatgactaattacttgaagaagctcaatcaagcaagtaaactaaataatgaatcaagaaacattggaaaaacatatatatacaaatgtaccatgttattatcactggtcatccactcattgaacgtgagaaactaagttgcatgggaccggcggcgctggtctagcggtgcaagggcagccccgggtagggctccggcggaagggggaaccaccacggcgtctgtaggggcacgatgcggtggcgtgcggcgtggagtcgcgaggaggcacggcagcgagtgaggtggtccgacgatggatgcatgaccagggtttgatctatcggaaagagaaaaaatttcgggggtcagcggatttttttcggaaatttcgtacgaaattttcaagcaaaattggggaaaattgacctacacctcaatggaacacagggcttggactgccgttgtcgtcgatgcaatgcgccggcgagtgcatccgccgctgttcaagccaacgggcggtagagccgctgctgtctttgtgagaggaagagcgaggaggcgacggggattggtgtggcgttgtcatcgcgcgctcgggggcggattcatctctctctcttgatggctggatctgacacggacatatattaaacttgttgttgttgatgggacgagcaaggcccacataagggttaattgggccgaagaaaggcgtcgggtgttaagggcagccgagctgattcgtatcgggttttagggttttcttcctcttctcttgcatcctcccatctcctctccggcggcggcggcgtcttgtgcgcgtgagaaagagaggagaagaagatggcgacgatcgtgaacacgacggaggaggagccgatgctggccgtggtgcgcttcaccgccgagctggcctgggcggacgccggcgccgacgtcgccgagccggaggtcacccgtctctgcgtcgaggcgcagcagcacatcctcgccgcccgctggctcgacatggcctccctcatgctcgcctccgccgacctcctcctccaatccacgcgcctccccgacaaggacaaaggttcttcccttccctctctctctcccctattgaatttgagaggctcatgtggctgctgctcatcctttccaattctagatctcgagtgcatc

SEQ ID NO: 18449 - DNA, 1101 bp, Oryza sativa
agtggatcccccaccccctttcctctactggaagatccgtgattttgcgcatgcgtaccgctccgggatcacaaccccgtctgttgtcagtagccccattggattgaacaaatcattattttcttctctgcctcccctcctgcatgtgtgccacttgactttcttcttgttgcataggttgcggagcatatcattgccggtgtggaagagtggagcaacaagaagcctcccatgcctatgttggtttattttaacgcagatgatctaaggaaacaagctgaagcttccacaaagagatttcagcaaggttttcccttctctaaaatcatgatatttttgtattgttgacttttttatatatatatttgggttaaatactttcaaattgaaactccaccatattctatctcatcttcttgacatgtgatggtgctccttggctcaggaaacccaatttccatcttggacgggatctttatcgccattaaggatgacattgactgcttcccatatccatcaaagggttagttaacagactgaaggggcctggcaatttggttgctgtatctgagaagcgtattccaacttataccttttttttaaaaaaaatacaggtgctactacatttttcgacaaaattcgctctgtggagaaagacgcagtttgtgttgctcgtttgcggaaatgtggagtgttattcattgggaaagctaatatgcatgagctaggccttggagtaactggaaacaatccaaactatgggtatgcattatcatcatgtgactgcttattttgttcagatcccttagctagtatctagggagcacctgacggtttgtgtggtcacaaatgagaaatatcaacaacattttcaaggccaaacagactgtattattttattagctgtttcctagaatcaaattaaattgagcattagtaaatctagttgactaaccaaagtactgggatgaaaataaatattttgagctatatcagtcacatccaaatctaacacatttttttaaaagattaggaattcaaaattttgatccaatcttaagtgatagtccaatttactgttttctgatgcctagtgtagtg

SEQ ID NO: 18450 - DNA, 1339 bp, Oryza sativa
ttcgccgcccaccagctgcatggacccgcatctctatggtgggaccatttccaggctatgcagccggagggacagcctgttacttgggcccgcttcaccgccgctttccggagaacccatgtgcccgccggagtcgtggcccttaagaaaagagaattccgagagttgaagcaaggcaaccgctccgtgatggagtatttgcacgagttcaacaacctggcccgttacactccggaggatgtgcggaaagatgaggagaagcaagaaaagttcctggcaggaatggaccctgagctgtccgtccgtctagtctctggggactatccggatttccaacgtctggtggacaagagcatccgcttggaagccaagcacaaggaactggagtcgcacaagcgccgcttggcgaatttccgcaaccaacagggtgctaaccaaagggtccgctacaccaatccctatccagggggatcctcctcgcagcagcaacaacagcagcagcaacctcgctccgcgcctcgacctcaattcgtggtgcgcgtcccacagccgcagcagcaacagaatcaacaagggactcgagcgccccgtcctcctacgccaactgtgcagcctggtcaaggccgcagggacgcttcaggtccgcagcgtctgtgcttcaactgcttcgagccggggcactttgcggataaatgcccgaagccaaggcgtcagcaaggccaagcgcctccccgccccaacaacggtggtaaggacgtcagtcggggtcgtgtgaaccatgtgacggccgaggacgtgctgacaactccagacgtcatcgttggtacgttcctcattcattccatccctgctaccattttgttcgactctggagcttcccactcgtttatatctgtgccattcgtggggagaaatcagttgggggtagaaaggcttagaaaccctctgctcatcaccacccctggaggggttatgacagcaaagtattatagccctgccgtccctatagaaattcaggggattccttttccctcggatctgatcctgctagacaccaagaacttggatgtgatccttgggatgaattggttggctcaattccaaggagtagtggattgcgcgagacgcactgtcactctgtaccgagggccggaacaaccggttgttttctttgcacccccaacctcagtcagaagttcagaacttcatcagataggactgtcagaaatccccatcgtcagagagttcggagacgtgtttccggaagaactacctggtatgccgcctaaacgagagattgagttccggatagatcttgctccaggaaccactcctctgt

SEQ ID NO: 18451 - DNA, 1927 bp, Oryza sativa
tcactatcatcctggtaaggccaacgtggttgccgacgctctaagtcggaaaagccactgcaacactcttaacgtccgtggcattccactcgaacttaatcaacagatggaagccctgaacctaagcatagttggtcgcggattcttgactacgttggaagccaagcccaccttgctcgatcaaatccgcgaggctcagaagaatgatccagacatgcatggactcctcaagaatatgaaacagggtaaagccgctggtttcacagaggatgaacacggaaccctatggaacggaaatcgagtatgcgttccagataacagagaacttaaacagttgatacttcaggaagctcacgaaagtccttattccatccaccctggcagcacgaagatgtacttagacttgaaggagaaatactggtgggttagtatgaagcgggaaattgcagagttcgtggccctttgtgatgtgtgccagcgtgtcaaggcagagcaccaacgaccggccggacttctccaacctctccaagtacctgaatggaaatgggatgaaattgggatggatttcatcaccggacttccaaaaacccaaggtggatatgattctatatgggtagttgtggatcgattaaccaaggtagctcgattcattcctgtgaagaccacctatggagggaacaaactagccgagctctacttcgctaggatcgtaagtctccatggcgttcccaagaaaatcgtatctgataggggaagccaattcacctctcacttttggaagaagctccaagaagagctgggtacccgattaaacttcagcaccgcgtatcacccgcagacagatgggcagaccgagcgtctaaatcagatcctagaagatatgcttcgcgcatgtgtcctagatttcgggaagacctgggataagagtctcccctatgccgagttctcctacaataacagctaccaagccagcatacaaatggcgccttatgaagcgttgtatgggcgcaaatgccggacaccgctcctgtgggaccaagttggggaaagccaagtgttcgggactgatatcctgagagaagctgaagcgaaagtcagaaccattagggataatctaaaggtggcacagtcccagcagaaaagttatgcagataaccgtcgccgtgacctggaattcgcagtggatgattttgtgtaccttcgggtcacgccattgcggggtgtacacaggtttcagacaaaggggaagctcgcacctcggtatgtgggtcctttccgtatcgttgctcgacgcggagaagtcgcttaccagttggagctgcccgcctccttgggcaacgtgcatgatgtgttccatgtgtcgcaactcaagaaatgccttcgagtgccatccgagcaggccgactcagagcaaattgaagttcgcgaagacttgacctacgtggagaggccagtgaagatcctggacaccatggagcgcaggaccaggaaccgggtaatccgtttttgcaaggtccagtggagcaaccacgccgaagaagaagctacctgggagcgcgaagacgagctgaaggcagcccatcccgacctcttcgccagttcttccgaatctcggggtcgagattccgtttaagggggataggtttgtcgcgtcccaaatcgactctaaaatacatcctcgaaattgtgcgaagaataagtaaaatccatgtgaaagcctccaacaattaaaatgtgcaaagctaaaagtcaaataaggcttggaggatttttgtatatttcctaaaagcctaaaatgcgtaaataaattttagtggaattttcagagcacaaataataattaagaagaaataaacaaagttaaaagggttttataaaaagaaaaatccctaaaagtccatccccccccttcctctcttgggccggc

SEQ ID NO: 18452 - DNA, 811 bp, Oryza sativa
tccgttggtcgtgtagacgctgcagcttcggaagatccgctcttcgtggaagttgaagccggtgtttgggaaagcgagcaaggcaagtcacatcatctttgaacatattgaatcccagtttgtaaaattatgttgatttaacttattgcattatcgctttatttaaattcccgcgttatcactgttttatttagccatgcctatttacctttgttacgaccttattattgttattgttattattaccttgttcaccctagaaccaacaaaaccccaactagtggacactctactcatggtaccactagtatgattttaggtagatgcttcgctatttaattaggtaacattaggtggttttacaactctagaccttgggaatattcatatcacctggacactgtggaattgttggagtattgtggaattggattcacaccgccccctctattcaaaatccccaaaagtggttttaggctgggctcggggtgcatggttttgatagtagcacctcggccatataaggaccggtcttcgggcctctgttgcaaagcactaccgtacttccacatgtctagtgggtaaggcttagtttgtggctcagtctagtcataaacaaaagtacacggattggagatggatgaagtcgggggtcgatggacattctccagggcaaatgaaggatacacgagctgcggcccggtagtcgagatgtcatggcacagggccggtgtcctgctgctaggggctcagtcctgcctgcctgtcccgggtgttccggccgtaggtgggattgggtcggtactcttgt

SEQ ID NO: 18453 - DNA, 674 bp, Oryza sativa
gaaaattacataccagatcactcattaaccaaagaatatatacatatatagcaccttaatatggaccacaaatgttaaagcaaaaccaaaataaaggtaagtcaaaaggtcctacagatgcgaatacctgacaatgataacctggttaagctggtcaactttgcaatccaatatcttgcatgaaatagctttcacaatccaatactccacttcatcatcattgatctaataaatgttttacatggtcaatataaattcttcgacaggtgaacagtaacacaatggcaggattgaacagctaattcaccttaagtgcatctatgattgcatggtaagggatctccccagcacaacggctgctgaggtcaagcagggacatcagtctcatttttgttatgcaatcctcatgaaccagtcctgccaattgtttatcattagaaatcctgtaaacgaagcatcacattttccatatttgctccaagtaaagacatttaatgttttcaattcagcagttgtacataccataacctttcagcaaggcagaattagctgactgaaactctaaataggaatcaagcctctgagtaagggaatatcttcaagagctcataaaccagctgatacttttcgtcttttccagctgtgcaactgctggcatattgagtagatcacac

SEQ ID NO: 18454 - DNA, 2210 bp, Oryza sativa
cagtggatcccccatcttactagtctgatctgctgttgccattgtgaacactcaaggtcacacgcaccaaaagtgaacagtgagcaggacatgtcaagaaagctgaaacgtaccaactaggcaatttgtgcatatcttagatataatggctagactgatgatacgctgacggagcaaaattcataggattgagtacttaattaattaaattgatgatggcatgcatgacaagatagagtttaaagggactagaaagcaagtttttaccctcgagcacaatcaaggaatcaagtgcagatggactaagcatgcatgttagttttaaaataaatactaattatttgttgttgtctatatatatatatatatatatatatatatatcttaccaaatgttagttacagaccctgcatgcatgatcacaaaacgaccgtccttcccacaacaaaatgttgtcgttactgaccacgcacgattgagtatgctggaagctactatcacatgcactaaagtaattaacagctaggggtggcagagcagtctaacacgtaattgatgtggctttcacttgaagatttcacatacatatatagtagcagtatgagcttaactactgtgtatttttatgtatatatgatttctctatcttagatagtactactttttaggcaagaatatatattaatttttgataaatgataattacagaatctcatgcaagcactacaaattaagcggtacaaatatatccaaacagatagttagctaatatatatgctgactaaaaaaacttaaaactacttaatcaagcggctaaactgcacaaataatattggcttgcaatttcttgacaaaaaatgaatgtgtacatgtataaacttgcattcatactctacttttctacccgtacacactgtgcagcagctggtccatggtttcataccatgcatgacgcaccctttactaggggcatgccatgcatgaccatgatgcatactatgacgcgcatttgacatcattagcgagcctgtcttaaactaatcaggcaggcaattagcgtcaccaacatatgcatggcgcattactcagcattatattgttgttctagtggctgttaattatggcttctacacctcaatctatctctcctctcaccacacacatggaggtcctgcatacataggcatattttcatgcagggcatcaattcccttcctccatgataagcaaagcaaagcaaacccaacccaacccaaccccaaagactgcacactgcacccccatcatgcatgcatatatgcattatatgtctagacatatatatcatatatatatatatatatatatatatatatatatatatatatatatatatatatatatatatatcctatggcgtagcttagctccatccacacatcttttttcttctctcaccaagagagaaacttttcagacgcaaatctctttaccatgcaactgaaaagcaggagagatctagcgagaccatgtcgcccaaaagctacacctctgcctgcgcacagagagagatatcgatctcctctgaaaagcagacataattaaggggagcacgtacacactacacacaccaccaccatttttttccctgcagagattctaccgatcatcttcaaaagaagagctagtggtggtcatggtggactcatggtgagaagagaggaaagaaagatagttagatagatagatagatagatagatagatagatagcacatcgattgatcatgcaaaggcatgcataaatgcatctccatccatgcgttggaaaagctagcagctagcttcagcttcctcctgaagcttgataagaccagagcttgcagatggcatgggctggatagatagctagtagagaaactaaagaattactaggaagatgtttgatgcatctcagttgcaaaacccttataatttcttgaccaacctctcattgtcttctacagagaaaagggaaaccctaacaaaagatgagatgagagaaagaccatggactgattgatcgatcactagaaacgaaacgactgatctaacataaatagcaaatgtatcgggccgggcgtggcgcgcgcgcttcgcggcagtgcatcgtcctgagcaatgaagaataatccaagaattatgatcgattcgatctccatttggaagaacacaacaagatcatcatcagcag

SEQ ID NO: 18455 - DNA, 5301 bp, Oryza sativa
ctcctcaactcatcatggaacgggaacgacgacgacgaccccctcgccgccgcaccaccgccctgccccccctgcatctgatccgtccccgcggcggcgacggcggcggcgccctcggtgcccttgaaccgggtgacgagattcttccacttggacttgcactgatcgggggtcctggcgaagccgagggcgtggaggcgcgccgaggcggcctcccagagcgccttgttgcgcttggtggagaggaaggagtggtcgaggtcggcgcggatggcgaggaaggcggcggtctcggcgtgggaccactgcgggaggcgctcccgctcgagcgacggcgggtcggcggggagcagcggcggcggcggcggaggaggaggtggggggagtgggtcgggggcgaagtggtggggcggggaggcgaggagtgggtggtaggggttggagaaggaggagttgaggtggtggaagggatccatggctatggcctccgcctcactagtgggaaatgcgaggaggaagtggagaagacgatcgagagagagagagagagagagagagagagagagatggaatagaatgggaagtcaagggttgggcggagaggagagagaggaaagagaagaggagaggaggaaatctgtttcaacgcggaaacggcttgctttcccactgcttttcttcccagatctggatcttctgcggtctagtactacggtccttggattctgggtatgacctcatgcccgtctagcctctagagatggaatgcacacaacacaatagtcaaacttgtttatttgtagatttcgatacacgtaataagaaacttgtttacaaacatctttacagtgagtgatgtggtaaaccctttctatttctaattgttttactgtttctacttaggatctcttttacggttaatctgtttaagagctaacggctaacaaaatggtttcaacctcacctaaaagggtgatgattaattaaagagatgaagcaggattcaagtcactccactttagagtatgctactagaaagttaaatttagcaattttgagtcatgttaaataagaccgtaaaatctatcggttgaaatattagttagtaaatgtttattaaagattttcttttaagtacatactagcattagacattagaattttagttagtaaatgcttctaaaaatatggtttgagtgatttccattttgttctaccttttcttacctaggttttattttggaccatcctttatctaattttttttactttgggctagttttttttatcaattttacaaagaccacacaattatgccaactatcacccctatttacaggcaaagctcatatcttctccggggagagattggatctggctatacaaaacaaaagcgttagtcaaaagtacaacaaaagattaaaaaaacataacacaaagtgatattaactttgggtaataaaagttgacccaaaataattaaatcaaaaatggttttgataatgggcatgttcggcaaccgtggctgcgttgtagcgtagccaacggcaacagtgctgcaagcatcagactaacatgtggctgctgctgccacgattgtggcctggccttccgaacacgcctaatatatgtggctatgctatgcgagtaatgattaaatatattcatcgaaagttatatcgatatcctaagcgttactttaaagcatgtgactagcgatggtgcacattaatatttttattttaaaaatataatatgtattgtctattatatcgtcattcataaatatagtaaagaggatccaagttatgtaattagacaaatacacagactggatcaccaaatattgttatggcaagatattgtagagagtttatgatatgtttggattgatagcttactaaattttaaaaatacaaaagaaaatatgtatagttaaaaatggtagggaagtgatgaacacatcctaagatggccacagagttgatgggttcataggggatgcggtggtggggtccaaggaagggtggggtgggtggggccgtggggggcggacgccgttttgcgtggagggtgtcgtcacgcggacgacagcgcggcgtaaccagcaaggccaaggaggagggggacacgtccgatccgatccgacggctgcgatggatcgatcgatccggcgatctagaggcttcgtagttcttgctttgccgcgaaggcttccgtttacgcgttccatttggcggctgtgttgtgtgctgtgctatgcaagccacaatacaaaacaagcccagcaaacgtccgttgtccatttggattgaacacatacgtatactacacacgtcctacaaacgtactcctctcgttgtaaaattaagtttatgtgttagattttttttatattattaaaccaagaaaagtaagtagctacggataccctacagccacactggtgtaatgcgtcttgctgtacgtgtaaggggttgtttagatcaggggtgtaaaattttgacgtgtcatatcggagtattatatagagtgttgtatggggtgtttgggcactaataaaaaaactaattacagaattcatcaagtaaaccgcgaaacgaatttattaaacctaattaatccgttattaccaaatatttactgtagtaccacattgtcaaattatgcagaaattaagcttaaaagattcgtctcgcaaattagtcgtaatctgtgcaattagttgtttttatcctatatttaatacttcatgcaggtgttcaaacgttcgatgtgacagggcgtaaaattttagggtgtaatctaaatatggcctaaatgattaacttgtaaacttatttatagatcaaagtagtgggttcgtgatttattttagtctatataaatagattttgtgagtttgccacttactccctctgtttaaaaaataacttaaatcctatagataatttttagatacacgtgtgtctatgtgtgtatagatttgtccctaagattttacttttactttttctttttaagaaaaaaacatgagggagtacaccgttacctgccatgctgcgataccgtcgttgcgatgcgatggccggccgtgtgcgtgttccaacggcgatggcgatacttctgtataaacagttgatctatcgtactcctagaggttattaaggttattaagattgatgccattttaaatcatatctttttttaagcaaggctattaaagatatacatatatttagtatttttactgaactttgataaatctcgttaaaatttgataatattattaatttatattaaaattttgaaatcgctaaaattagataaggcccttgtttagtttcaaattttttcttcaaacttctaacttttttatcacatcaaaacttttctacacataaactttcaacttttctgtcacatcgtttcaatttcaaataaatttttaattttagcgtgaattaaacacaccaaggtttatttttactgcaatcgctaaaatagtctcctggtaatttggtggcgacagactgacatgcatgcgcgtgcatgttgtacgtcaagtcatggatgatgaacttgtcatgtttgtagctggagtactccagattggcagctgacagcacacgcatgcgcatgcacacacgtaatctccggccggatgtccatttcccctttgttcctagatctcggcagtggttacttcgtatgccaaattttattagtatacgggtatatatttaaaatattaaatatagataaataataaaataaattacagattctgcctgaaaactgcgagacgaatttattaagcctaattaatttatcattagcaaagtaaatatttactgtagcatcacattgtcaaatcatgatgtaattaggctcaaaagattcatctcgcaatttacatgtaaactgtgtaatttgtttttttcgtccatatttaatgctctatacatatgtccaaatatttaatgtgactgaattttttgaagtttaaagggaactaacactgccctcatcacgtaggaatactcctctataggctgtgattagttccttggccaaaatctttttaagtacacggaaagtattaaatatagtctaataacaaaataaattatagattccgcctacaaactgcaagacgaatttattaagcctaattactccgtcattagcaaatgtttaatgtagcatcacattatcaaatcatagcgtaattaggctcaaaagattcgtctcacaatttacatgcatattgtgtaattgatttttttttcatccatatttaatacttcgtacatgtctccaaacattcgatgtgacgtttttagaaaaaaaataaatctatacacggccatgatacttctatccacatttatagtcaactttctacagtacggtgtagttctctggaaggacaacatgttgtggaaattccggcaggtcgagagagaaagatcagcatggccgtaccgtggagcgtgcattgcaagaatcaacaacataacaggattactattgaccaactaagggtaatcgtatcccagaaaccatctactcctattaattctcatacttatcatgacatatatatacactatgtatagtaactattaatcttattaatcttattataggtggtttcttctagctgcagagctttttatatagagaccaaagttggtttgggtcccctagcttttgaaaaaaaaatacattgagatccatggatctttgtactatcatacaaaatagcataattgtcatagttatagataccacatacctaatagtagttgactaaatctcattaggacccaccacataccatgtctgtcggtgacatgggaccggggatatcttgactagaggtttggggcagccgcggtcacccacgtggcctgaccccctcgggggggtcgggcccaagggtgatgaggccgcccctccctctatctccccgaggggtcgggccgctcccgttttgtccccgagggctggggcgccccgaccccctgagggtttggcgccacgtgtgtgggttaggtgagcacagcggcgctcacctaaccgcgtttattgcgggttggacgagcgccccacgccgcatttaatgcagcgcagcacactcgttcggtccgtgacaggtcacagtgtgtgaccggtcacagaccggtcagatcgcgggttaggtggcaacaggcggcctttcgcacgcctcgccccgtcccgtcggaatgatgagagcctctaggcactcgtccctagatggagccggcgtgggaa

SEQ ID NO: 18456 - DNA, 847 bp, Oryza sativa
atggccgaacgggcagtggcgcacaccctctctccgagcgctagcggtgacgacagtgagcagaacccgcgtcgtcgagctcgtactccaccgcccccctctcgccgaagtcttaggcgggaggaggcgctcgagggggtcgaaagatccgcaacttcgccgcccacgagcgatggagaaggacggcgagacggggagcgtcgcctcctcgtctacggcgatggcagcacgccccagggcgcgctccaagctgcgggcgcgctcttgcgtcacccgcccgttgtccccgatccagagactccagcccgatgttggctggatgacgtggccgacttggtcatgacggcgcagcagcgcctaggcgccggtgggcggtcctccgccaccaaggcctctggcgctgctaccgccggctccgtgtcgtcgaggcggagggcgcggcgagcggcagccgttacccgccgttcgtctgccattccctcgtcaactgtcacaccctgattttcgtgttaggatttataaattatttaataaattattaatagaatttatatgaaatgttcattaatttacaagtgaagttaaatgtgggaaataaaatttcctaaatataaagcatgggtggatttaatttttattaaattctccatggttaattatactctctggaattttctcggatttttcggagctcaattcctaaatgtaaatgatacagagaacagttcagtaattatttgatcaataatgatctaattataattgttaagtgcttttcttgtttaaaatccttaaattataaattgttgtttaaaaggaatattagaaatgattttaaaagcttaaa

SEQ ID NO: 18457 - DNA, 659 bp, Oryza sativa
ctctatcaacgtccgccagaatctcaccgatgtcactgtgccccagctgggcgctgccgccgcccggctcgccatcgccgactggggccggccggcgtgcgagatcacccacctggtgatgtgcaccaccgtcagcggatgcatgcccggcgccgacttcgaggtggtgaagctgctcggtctcccgctcaccaccaagcgctgcatgatgtaccacatcggctgccatggcggcggcaccgcgctgcgcctcgccaaggacctcgccgagaacaatccaggcggccgtgtgctggtggtctgctccgaggtcgtctccatggtgttccgcgggccttgtgaatcgcacatgggcaacctggtagggcaggcgctgttcggggatgccgccggtgcggtggtggtcggcgcggatccggtggaggctaacagtgagcgcacgctgttcgagatggtgtcggcgtggcaggacatcatcccggagacggaggagatggtggtggcgaagctgcgggaggaggggctggtgtacaacctgcaccgcgacgtggcggcgcgcgtggcggccagcatggagtcgctggtgaagaaggcgatggtggagaaagactggaacgaggaggtgttccggctggtgcatcccggcgggagggacatcc

SEQ ID NO: 18458 - DNA, 3757 bp, Oryza sativa
acacataacaacctttaacaggacatataatttcatttcttttgtgatttcttgaaaaaaccaaccaccaaacatttgtgtggagttccatatgccatttggataaataaacgcttaccagatttatttgtaatgatcaattgattttctgtgactagttgaatgatggtactcctagagtgagaagcaaacgagcatatgttatgctcacataagagttgtgaaaaaaaaaaacccactccagcaaacgcacacgaattatttagtacaagtagtaggtttgcaatgtaagaaacaaaaaagctcgaagcagatcattataaggccaaacgaaacttggttattatttcccatgccagtgcagatttacataaaaactagtacggctgggcgctagactacagacgcagaaggcaggttgacgtactcacaggtgcctgaaaacttgtctgaaaactgcacccatgtgaatacaaccgactacgaaactgattaacatcaactcacctaattgactaagatagtactaataacacgtacttatagtaataaacagcatcagaagctaacattcagatgaacctgcaggaattgttggactctgctgatctgatttgcactgcagagctaacagtaactgcataaaaccagtgaaacaggttcctgataagttggtcccatgagatgagatgaagatgatccgttctatcatcaacactacctacctgtctcaagcggtcaagcctactcgcgctcaatctgaatggtcacatggctgatgttgtactcagacttgatgtacccaatcaccttgtccagcatttgatcagcgtctgcgtcctgagtgattgtcacatggcacgccaggagaaccttccccaccgttatggcccagatgtgcagctcatgtactgcaaccacaccgtccatgtcgcggaggccattctcaaggctggtggcatcgatctcgcggggcgtgctctccatcaggacctcaaggatgttgcgcagcatcttgattgtggtgaagagtacgatcacggagaagatgagggtgcagatgagatcaataatcttccactcgggcttgtaccagatgatagcccctccaatcatcacaccgatgctctggattgaatccccaagcacatgcagataagcactgtgtacattgatattacgacgagccttcttggcatccttggcaccagattgggtgctgtcacaaccagcatcactcttgagcaatggttcctcagcatcatggtggtggtgtccagtgcctggatggtgatggagattgacggtaattgaattaccatggccatcttcgtggtgatgtacatggccatgctcttgatcttcatggtggtgatggtcatggtcagaaccaccatgatcatggtcatgggaatgtccatgcccatgaccatgtccgtgtccatgtccatggtcatgaccaagcaagacagccattatgatgttaacaaataagccaaatgctgagacagcaaacatgagggagccctggacctcaccactttcattaatgagccttacaatagcttcatagacaagaataccagcaaggagccatatgagctgaatagaaaccagggcaccaagaatttctatacggaaaaacccatatgactgctgtggtgtagcttcccatccagctgcccaaagagagaacaaagatatggcaaaggccgcaacatccgaaaggagatgggctgcatcagtcaagattgccaaactgtttgctttgatacctccaaccacttcgaccgccatgaatatgatgcaaaggatcacagcaataatgagcttcctcattgacgccattctctcccttgcatcttttgagctattactggaatcagaaaagtcacaagcagcacctctgcaaactttgttcccagctgctacagaagtagatgatgagatgtccattctcacttcagcaatctggggaggtgctgagttatggctgtccatctagggggaaaagaatcatgtcaatacacaagtacaaagatgatgctatatttacttctcatgctctgagaaaacatgttaacataaggttcctggtagaaatagtgcgaaaagctagtgataagaatcctttcttgtgtcactgggggaggaaaaaaactgaacagcacttcataaagtaaaaggtggcatgaacattcttaacatgaatgaataacgaagttaaaacatcaaacatatataacataggcaacactgtttacaagtaaaaaatctccgtgccatggcagagcgtacttttatggtacttatgccaggtaacaatgagtagccttttgttaagcggcacattaaaaaaatgtgcatcagtaccaccttcctaaccaggagacaacagtagcaggtacaaaaaggttggccaaaggatataatgaatagaagtaaatatgttcgttttagaaggtgccaatgtctctttgctcaacaaatatagcaggcatagttcttgctagtgcaaatataatataagcattgcaaataatgaaaccattttcttagtcaggctaaagctttcaagatgtattaaaaaagcacaacaaaacaggaaataaaaaaaccataaaactgaatgcagaaggagagcactagaattgtcgtgctggcagtacaagaacagttagctggcacctggcagtcttttccaactaaaagtgacagtatcacgaaagggaagattaattaagtcgcactaatccaacaacaagaaggtccccctaaacataactagacattcagcacatgattgcaaacaaacgtcacaagattgaagtaggtacttcgtaaatcaaaataccctcaaacagatcaagttctctctacctaaccgaaggcaaccggcaatcgctggttacagcgaaagcacaagaggggaacaccaccaagggagcaagctaatcggcattcattcatgtttacgataacctacattagagtgtatgtccacaaatccaaaaggacaatataatgaaactaatgaagcactccagagctatcgtaatgagattttccaaccaatccatccatccatcggaagcttttcattggacacgaggacggactggtcagggaccaacgctgattgattgattgatcgatttatttcgccaattcaatgacgccgtgctcgcggacaaacagtttgtggctgacgaaagttgaaacctactccagaccaatcgaatctgtagtgttaggaagaacccaaggaggaaacgaccaaaaatcgatccctatcatcaccccgtaacaccgcaattggagacagggactcgtgattcgaccgattttgaaaaatttttctctcccccgatcaaatggacggagaagcgaatcgaagcgagaccccacacctccactcgaacaacccaatcccgcagtagcaacccgtaacctcgagtcgaacaacccaatcccgtgacccgtaaccgccgctcccctgatttctcctcctcctccatgaaacaatattccatcctaaacaaaaaaaaaaaaactagcgctccaaaatccgaaacaataacagcaacagggaatgaccccagggaaacccgcggcgagcgaagagcagattcgtggaacgaacgagagaggagcagaggttgatctggtctctcggtggggacgacgaatccatcgtaggaagaggtggtgggaaaggggatggggatgcggcgatgaggcgctaaccttggggatg

SEQ ID NO: 18459 - DNA, 4361 bp, Oryza sativa
tgggggggcacatcctctctattgcacgtattttctcgggattagcttctatgcctcgggaggagactagaaaaccgaggagtttgcccgccggcacaccaaacacacacttgtcggggttcagtttcacgcgtgtggacctaagactgtcgaaagctcggccaaatcctgcaacaacgtgtcctggtggcgcgtctttaccaccaggtcatcgacatactcctctatattgcgccttatctgattactcaaagtaatacgagtcatacgctgaaaagtagggcctgcattctttaacccaaaaggcatagttgtataacaaaagctgcccacgggagtaatgacggcagttttttcctcatcttccctagccaggcggatctggtgatacccagatgtcacgaccggaaataacccaacgggcattccttacgtgcgtgcattaatccttgtcccaggaggcaaggtacaccaaaagttgatacaattcagagtttaacaagcggaagcgtaattagataacttattacatgggcagcgaaggcccagcacacacaaagacaaacgagaaacagcggaagactagggcgacgaccacaggcacttgacggcaggcacgagctagacaccgaagccttcatcctcctggaactcctcttctggggttgggaaaaattgagcaagactgagtacaaccaccgtactcaacaagacacacccacaagtgcagaataaatgcaagggagtacaaaggagttataccataaaggggttagggttgcagtaaacagcatttaaagatatttagttgctcagggctattttgtaaacacgattctagaactaaacaatattatttatcaaggccgtgaacccacacgaacctgccttaacccaaggcctacgatgattcagaccgaactggcaacccgaccctgggccccagctcgtcccaagccaacccaggccaaccattccatattttagttgttaagcaagttttaagaattaaaacactaacttgggtacattgctcggcttgcccataaccgagggcgcggctattcgaatagattatactctgatcagagatgtacatctttacccacaagacacatcttcctcacgtgtaaccacgtgccacataccaccacggtatacagacgaaagacgtgacatagtttccaacccatcctagccatagacaagagtaccgacccaatcccacctacggccggaacacccgggacaggcaggcaggactgagcccctagcagcaggacaccggccctgtgccatgacatctcgactaccgggccgcagctcgtgtagccttcatttgccctggagaatgtccatcgacccccgacttcatccatctccaatccgtgtacttttgtttatgactagactgagccacaaactaagccttacccactagacatgtggaagtacggtagtgctttgcaacagaggcccgaagaccggtccttatatggccgaggtgctactatcaaaaccatgcaccccgagcccagcctaaaaccacttttggggattttgaatagagggggcggtgtgaatccaattccacaatactccaacaattccacagtgtccaggtgatatgaatattcccaaggtctagagttgtaaaaccacctaatgttacctaattaaatagcgaagcatctacctaaaatcatactagtggtaccatgagtagagtgttcactagttggggttttgttggttctagggtgaacaaggtaataataacaataacaataataaggtcgtaacaaaggtaaataggcatggctaaataaaacagtgataacgcgggaatttaaataaataggcggccataggcacggcggagcggcggccgagagaggggagggaagggggaaacgaaatggcggtcctcggctcaccccgggttgacggcgacgacgggaacggcgaccgaagcggagagaggcggcggcgcggctcgggtcgacgaggacgatggtgctccggcggtcggcgggcgaaacggaggagtggacgaggtcgacgagaacgcggcgaagccgaaggaggcgacgccgaagcgggaggaggtccggggcgacgacggcggcgaaccggagctcggcggcgacggcggagagagaggacgacggcgcgagctcgaatccgacggggagagcgagcggcggacggcggaaacggaggagggaggcacggggagcgtttaaatagggttgggagtgagagagggcggccggaggggaaggaaatcggcgcggcgatctcgggctccattgatgcgccggcgaagatttcgggagagtaaatctgaacgaatccgagggagagagagagggaaaagaggggggaaagagagagggaatcacggggagtgatttccccctctttattgcgcgcggggacggcgggatgcggcggaatccgcggcggcggcggcgctagggcacgggcgaggcggcgggcgcggcgcgaggtaggggatgacgggtgggccccacccgtcagcgagggtggcgggcgggcccgcccgtcagcggcacgcgcggggaggaggctgatgggccgcgggggagaggagagagagggagggagttgggccgagccggcccaagagaggaagggggggaaaaggacttttagggatttttctttttataaaacccttttaactttgtttatttcttcttaattattatttgtgctctgaaaattccactaaaatttatttacgcattttaggcttttaggaaatatacaaaaatcctccaagccttatttgacttttagctttgcacattttaattgttggaggctttcacatggattttacttattcttcgcacaatttcgaggatgtattttagagtcgatttgggacgcgacaccagagtaggcatctagaaaacacaaaaggtcgcaccccgcagtggagtcgactatctgatctatgcgtggtaaagggaagggatctttagggcatgccttgttgaggtccgtgtagtcaatgcacatccggagcttaccgttggccttcgggacgaccaccgggttcgccaaccactccggatggataacctcgcggataaagtcagcctccaggagccgcgccacttcctctcggatgaaggcctgccgctccggggcttgacaccgcactttttgccggacgggtcgcgcatccagccgcatggcgaggcggtgctcgatcacctccctagggaccccgggcatgtccgacggcttccattcgaagacgtcggagtttgcccgcaggaaggagacgagcgcgctttcctatttggcgtgcagggtcccgccaattttggcggtcttggacggatcatcgccaagggggatctccttgacgggcacctcgtcagccgaggtgaggcgcttcttggaggcgtgggacgcggaggcctccggggcctgtggctccgtggccactgccaggttgtcggcgcgctgctccgcgcaggcgagggtgactttgacatcgccaaagacggtgatgggaccactagggcccggtatcttcatctggaggtaggcgtagtgggtggcggccatgaacttcaccaacgcaggtctgcccaggaccgcgttgtagggcagattgaggtccgccacatcgaagtcgatccgctcggtacggaagttggtggagtcgccgaaggttatcgggagctcgacgtggccgaggggccacgtgtgtcccggagtcacgccgatgatcggcagcgacggctggagcttcatccccggggccttgagcgcattgaaggcggctggggagatgatgctcaagctggcccccccgtcaaccaggactcgcttcatcctaacgttgtgaatggtcggggagaccacgagggccaacttcccacctcgagcgagcactgtcaaatggtcgctctggtcaaaggtgagcttcacctccgaccagtgcgccttccgagccgcttcgtgggttgggacggtggctagaagctctcgccttatggcttgaagcctcggcgggaggtgtgagcgcaagccccccctccccccaggtcgagcgtggcgacggttccctgaggtatctggaactccagatcctcgctgttatcaccatcatcggtgggggccttcttcttcgcttcccctcgtcggtcatcggctggggtcgcgggggctttgccctctcgtcgaccctaccgcttctcctcatcggcttcccggaaccgctcggccaaaattcttgactgagcggcagtcggcgagactgtgctgataagtgttgtgcaccaagcaccacttgtctgccgaccggccctcaccgg

SEQ ID NO: 18460 - DNA, 652 bp, Oryza sativa
tccccatgcgggcagctcggcgctcgtcccggcgtcgctcgatattgattcgagcgtcctgctccccgtagagaccgtcgggacgcctccggcttcccgaggcccccgacgatgttggagccgtggaccgcctcaaggccgtggccgatcgatgggccctcctcctcgctgacgaggagagggcaatgggggtatgcgacgtaccggtgacggcggctcggccgcccgcggctaactgccgctgggcagtggtgaccaagttggccacgtcgttcaaccagcgctggacaggggtctccggctccgagttcacggggggatgccgcagaaggacacccgccgcctgaagcgcgcctcggggcgagccgccgtcaccgtaagtgaggcggcgtcgtgccccgacgcgtcgtggcctccctccgcccgggggcgggtgtcacaccctgaagttctccttccaagcctaaatttaatttataaatgatcctaagaaaataccggtgcaaagtaagagtaaaccccttttaaatcaatgcaaataataatcggaattggcatgtggaatttttcttgagttctacaggtcgaaattcactaacaggattttaagtggaattttcagagccctaaaaataattttaaccaattaaaa

SEQ ID NO: 18461 - DNA, 745 bp, Oryza sativa
tggatcccccgttttttaaaaaaaacggaccagaaaaggatctaggccagtttaggtcatggttcttccattgcctgctttgaaccatgttatacctactcaggcatatatgctcaactttaaccagtaggaatcagtaaaagttaggtataaatctcacacaaaaaacacaaaaccactaattttattgcataattaaagaacatatacataaaatccatagttttggttaaatttattaggatatgtagattagaataatggacaataaaaataaaggatatcaattttgtgggcatgttttgaagtttgcatggaagcatttggaatataaaggggcaaacaattgtaacaagaatggactaagatattgaaatttactcacagtagggtgaagcccaacacgaggaggatccacaatagcaacaatgtcttcgaactgacatgcagtagctgcagtcacatcattgttagaaatggaagaaccatcatcagatgtctttctgtcctccaaacagtccgatactttcaggtcaacagactcattgatcaatgatgcttccccatgaatatcttctccagcaacctcattgtattcatcatggctgccttccaacccattgccaaccctatcattggaattcccctttatctcatctatggcagaagaggaagaatcagctggtgcatccccgagctgctggctttcgccattgtcatttttctgcattgagctgtccaaatt

SEQ ID NO: 18462 - DNA, 750 bp, Oryza sativa
agaacaaatatcctttgccacgaatcgatgatttgtttgatcaactgaaaggagctaaagtgttttctaagatagacctgcgatcagcctaccaccagttgataatccgggaagaggatattccaaagacggccttcaccactcggtacgggctatatgagtgcacggttatgtctttcggacttactaacgcacctgcattcttcatgaatctgatgaacaaagtgttcatggaatttctggacaagcttgttgtggtattcatcgacgacatacttatctattcaaagtccgaagaagaacatgagcaacatctccgtctggtactcgagaagttgaaggagcactagctatacgccaagttcagcaagtgtgacttctggttaacggaagtcaaatttctgggccatgtcattacagctcaaggtgtggcagttgatccatcgaacgtggagtcagttaccaaatggaccccaccgaagaccgtgtcgcagattcaaagttttcttggacttgcgggatattaccgccgattcatcgaaaacttctccaggatcgcccgacccatgactcagttgcttaagaaagatgagaagtttaaatggacagctgagtgcgataagagttttgaggagctcaaaaagaaattagtatccgcaccagttttgattctgcccgatcagatgaaagacttccaagtctattgcgatgcatcccgccacggacttggatgtgtcctaatgcaagagg

SEQ ID NO: 18463 - DNA, 1136 bp, Oryza sativa
  unsure (1)..(1136): unsure at all n locations
tacacattattcagagactcctacgatagtcaagacaaaaaagacatcttaaccattaatacacaaaaatagttttttattagctttctttcattttctccctctgcgagcagaggaatttcttttaataaacactaagagtcggctctaagccgatatcataagtagcaacaatgttttctcttcctcccctctatcttccacgtcaccaaatttacttatatgataacagagagagtccgctaataaacaccgttgtagatacctcataagttttccccctcacgctcgcgaaatgttttctactggagaaacacatgtgtgcctacacctgtggcaacattcatggtacccgctccaaccccccccccnncccnnngncaaaaaaaaacacaaaccaaaatctctctcatcttttttttttcctttacaagaaaaacaaaaaaacgatgtanaaaggaaggtcgaaaaggaaaggaaaagaaaggaggatgcagcgacgaagagaggaagaaagaggctctctgatttgtttgcgtttgtgcagcgcgtcttcccttccttttgaccacgcgacacatccagcagccaaaaaaataaaaaacccaaaaaataaaacgattattttatttttgtgtaaagagaagggaaaaaaaaaacgcgcgaaggagaaggagacgagctgcttcttcgtctccaacttcccttatctctatcaacccccattcctccattactctccctctctacatatacccttccccacccacctcccaccctcccctctccaaccacaccactctccaaatccatccatcgatcgagaattcctcttctccctcttcttgttcttcttctcctctctgaatttaacaagaaatcaagaactaggtgtttgttttgactaacaagaactcggtcgaacactctgcgtgcgtgtttgtttgtgtgtgtcatgtgctctgggccgcgcaagccgtccacaccgccgctgccgcagcagcagaaggaggcgacggtgatggcggcgtccttgcttcttgagctggcggcagcggacgacgtggcggcggtgaggagggtcgtggaggaggagaaggtgtctcttggcgtggctgggttgtggtatgggcctt

SEQ ID NO: 18464 - DNA, 2253 bp, Oryza sativa
tttttcccgtacccaaccaaccactcttgcccccacttcattttttctttttttcttcgaatctgaatcgatccaccatcctagcctacagatcggtaacacaccatggacgaggatgacgacaccgtggcggttgacggcggtgaccggcggcggttgaggcgaaggcacagcttaatcggcaaggaggtgttcacctgggtcaagagcaacaaccggcggctgctccacatcggcgacgttgatagaacaagcaagtatggaaatgacactccgatttgcatctgcatactctccttcaacttcacgtatgaagccccaatttctttttgcaaatcaaattaacgtgtaatctgcaatattacctgatctgaattgatggtctgcacagatcctacatttgcacatcgtgctccatgtggctggccgcaggacaaggtggagtccgccagtgatggaggttgtttgctatttttcatttgctcgtcgtctctatgacatgaacaataatgtttttgctttttttttgcgcttgctagatgatggatggctgctactgcgcaacgtcgagcccatctctataccatgctgctacatcctcccttgattccatcgtcgcgtaccgttcgccactcggttgctctctccactaccagtcacaagacacagaccagcctctccatccttatagcaagatccagcaaagccaccaggatgtagtttcacgatggatttttggatgaatctttttttttcttttctagtttgattcacctgtgagtaatcttatcacttgtgtgtgattgagcctgtaatttttttcattcgtacggccattttgtgatacagactaacaatactcttagtatcagtttttactttttatactgtatattgaacacaccagtaaacatattactacatagtggatacgagatcatgggctatatagagagagggtggtaattgttttactcgcagaccacgaagcctcagtttttacccttatactgtgtattaaacacattagtaaacatattactacatggtggctacgagatcatgggctatattgagaggacggtggtaattattttagtcgcagaccacgaaatctaaataatatttataacactggtattcttttacgatcatctaggaatgatgcacgtacaatgtgagggcattcgtgcaagtaaatttgttaggtattcttttacgaccatctaggaatgatgcacatacaatgtgagggcatttgtgcaagtaaatttgttacttttgaaaggggcattcatgcgagtaaattcgttacttttgaaaaactccacaaagtaaattcgttacttttaaaacgttgtgaaacattagaaaaatgaacttggaaagaaaaactaaacggatggttatatatttaccgggtcctttgatgaagcacagataagatgtaaaagaagaaaaaagaaacacagcagggggggtggtaaaaaaacgaaaaaacgaacgagggagcattgtgcggcgctcgaactaggattagcgataccggacatttagtataataactatttgatgatgagaatgtttgggtaataaagtgaagcaggaaggaaaggaatatgaaattgggaatgctatggaaggtgggatatagtatactaggcataccctgcggcgggtactcggggaggtacatggggcgctcggggatcaccgtgtcctgcagcatctgcggtgcgtgcagtgcatcaaacaccaaaaattcatcaccatcaattcattattagcatagtagcaaatttaattaggcaaagctaatacccaacgtacccttgtgatgttgttctgcgacttgaggacggaggtgaggaggcggccgaataggggcgactccatgagccagacgaaggccctgagagagaagccggtgaggtgcggcgcctgcagcgacggcgactggtacctcaccgccgacaggtccacctcctccaccggcgtcatggcgcgcggcggcttccccatcgatcttgattcttagctactacacccacagctctagtagtctagtggctagtgtgggtggaggtggaggaatggagtggaggtggaagaagaagaagagtaggcgaagaaggcggcggcggagttggcgagggaaggagggaggaccatgaaattattgtccgcccacccggccgttgattttcttgtcaccccaactacactatttactccctcttcttcctccggtct

SEQ ID NO: 18465 - DNA, 4127 bp, Oryza sativa
taaaaaaataaactaggagcacgtaaaataaaaaaatcactagcatattatcaattaagttttaattattacaatctttaaaatagatttattttatattttaagcaaattctatataaaaaaatttacacaaaatacaccgtttaacaatttttaaaacgcatgctaacgaaaatccatatacaatctacatcttaattagtaatgctaccgcttaggattttcctcataccacttatttatttttctaaaaataaatacaccctctcttaaaaaaagtcaaatcctgactatgaacaggacaagcatttgtaggatttgattttttttttacaaaaaagagtactactattcaagattaaaatctaagcaaggattttaacaacttgtagtttaattgacattggtcaaatatacagatttgacttttatagttcaaattggcctcacaaaactcacggataggttggaagttagcatgcaggaggacgacaagacaacatgaggaaggagacatcgatggagtataccagactcaacaccaacaatttattatatcctccccttgtttcgtgctaacattaatcttacgcaaaaataggtgtggcatcatcaaccgtttacatgaaatatgtcattttcagccttgagcaataaactgattaatatccttgatactccatccgttacaaaaataagttaacctagtaccagatatgatatatcctagtattatgaatctgactagatatctgtcatatcccacactaggttaatttatgtgatatattctagtattacgaatctaaatagtgttgatgcgaaaaacacacatcggcctgagagatctgcttaactccagtgcatgtcctaaatcttgctttcgggcttaaagtcgtgccagttgatttaattctgcaatcaacaagaaaggaaaacaagaaaacaaggttaaatccataaacgatagccgatcggctaaaggccgatgacatatcgttaatcattaagccgatgttattggcattagatcggcaatgaagaataaagcaagataaagctaaatctactcaatcggctgtagatatcaatgatatataatctacctctagaaacatatttaaaccaagtgattgggatagattgatagtgagtcgagacagtataaatcacttatgcataaaagtactttaagacaaagattatatatattcatatcatagccgatgaagtagatctaacatatatcggcttgtactccgataccactctatgttaagatattaaaacaagaaaaatataccaaacagtaagcctaatatatcttagtgcaataagatcttagtataaaggtcagatttagtacgtcaagtaaacgtgtacagaacaagacaactgaatcaggtaagatcggctgaaaccccgatactatctctattgatgatcataagacaagctagatattataattctagatattgcttaatagatcgaactcgaccgatgcagcattaagcataaagaaaaacacaagatctaaacaagttgatgaaaacctctatgagatggtggatatactatataatctagatcaatatcgatatctaactctattgtctgccttccaatgatagatgttggctgatttagggttagatggtaatactgatagagattatacagcacatatgataactcgacgatttacataatcaagattagagtgtcataaagatgtatgcactaatcccgagaatacaagccgccatgacaagttttacctcttgttgaagatcgaaaccgatgtagctcaacccaaaagcaagaactcgtcgaaataatgaaaataaaaaatgtggcgatacgccgaaagtgttattgaattgtcgttatcaatatacatggtcttgggccatatttatacccaaaatacataatgtgtccttcccgggcacgactctaaatctgctacaaccgttaagatacgaacaagtctttcaggcaaactcttgccgataaatatctctaaggaaactattcaaaatatcataattaatagatacaattgcctatccgtgaccttatctcaatcatggcaatacttgtgcagcacgttgatcaatcccaaagatgattgtagaaccaccttagcgagatcggctatatcagttgtcctctatccgatccatcgtcagccgatgcagtctttagccgatgcctcccgtagccgatgcatactttgtttccgagaaccaatcctccaccaaatccgcttcaattttaacttctaatttggtacatgatctaccaattttggtcgtcaacagatagatacatgtcatatcccatactagattaacttattttgggacggaggaggtccattatattcttttcgtgaatagaaatcagtccaccatatatacataaagatatgtatcgatctctctctcaacaaaaaaaaatattgtaccgatatccacttattactagggcgcaacataaattaagttggtgaataaataaataaagaatgggcgattgctcttttgaccttttttgaaacctaactatcaatttgaccctacttttaagtttgcttattcgacaccgtttttcaaaatcgaagttatcacttgatcctgttttctgcagtgttagggtttcatttagaaaaagaaaaaaaattcttcatgagccacaatcgaccaaaaatacccctaagtacatgtcggtacttttccagaattctaactactccttccttatcctctccctctcctctctcaccggagcctaaaggggagattcctcccacggtggcaacgggggagggctggcgactgctcggcgactaggagaataggtggcggcggctcgggggcgaggaggagcgacggtgaggtggatccgatgaaggcttggtgcctgcgacaaggaaaatgagcagtagtggtggctctgtgacgaggacgagcaacagtgaggcggatccagcggaggcttgttgcacgggagatgagaaggaggagtggcagggtggatgtcacgccctgaagttttcccctttttcttgttttaaaaatttgttaaataaatcgtccagagaaattgttctaattaacctagagttgaatccctaattaataaatgcaattaataatcagaaatagcgtggtggaacttttcttgagttccccatgccctaatgcattaacaagatttttagtggaatttttagagccctataaataattttaaccaattaaaaatgagcaagtgcaatatttttaatcccgggaaaatccttttcctctttttcttttcttttccttcctttttctcttgagtcttgatgggccgtcagcctatctctctctctctcgcgccacctccctcttgctgggccggcccaagccgcctccctcctcttcccgggtcactgacaggtggggcccacctgttggccccgtcttcctcctccagccggcggcaaccgccgctgccgccccacctcttccgctcctcccgcgcccacgccgcgccgctcccatgtcctccccacgtcgccgccctctccccgcgtctcccgccccgcgcgcgcgcacgaaatgggcgggatttgatttcgaatcccaccccactctctctatctctccaccccacgtcgccggcggcttcggccaccctcccggccacgtcctcccctccctcgcccataaaaaccctccctcgagctccctctcttgtttccccattcgccgttgtcagggttatggataccacatacctaatagtagttgactaaatctcggcaggatccaccacataccatatcttatacggaaactgacctcgagggagttccggttaaggaaagacaaaccatagttctacatggaaacgacaatgactactcagattgtatccatattggtttccctagttctacttagacaaggggacacctatgggtataaatacaagaccccctaggaggagacgggagatgaccacctcaatcaacatacacggaacaacagaagccacaacatacaagccaacatacgccaagacaagacgccggatatcaacttcagggataggcacggttagtcccctacggt

SEQ ID NO: 18466 - DNA, 1739 bp, Oryza sativa
gattgccgcaaaaacccaccggagtccacttctcctcgtgctccggtgagtttgtccctcccctccgcctccggccgtcaatggcgtctgccgtggtcattttccctactcctaacccctcttctcccctcctctaggtgtcgccgccgctcgtccgcccctcctctcaccgagtcgtcgccgccgcctttcatcctccgctccggtcgttgtgctcgccggtgaggactccttgcccctccttttctcccccttcctgtgagcgccgagccacgccgcctttccggccgtgcaccgccacctttgcgccggccgtcggtcgccgtcggaggccgcgcgccgccgccgccgtcctgcccctctccccttgtgccactgacaatcggggcccgcctgtcgacgccgccccccccccttcgctgacgtcagccctgggcaatattgcgcaataaattgattaaggactttttctttattagtaaaaacacagattatcttctaaaattcatatctaattcatccaagctccgtttaagtccattcaagtctcagtaaatttataaaaatccctagaatccattaaaaatggttttgtttcctgttttagtagtcttatagtgtgttttgcttgtgtgctttgtttgtcgcgtagatttcggccgtttcgtcgatccgcggtttctcgaagatgttgctgtggtctcatcagtgcgagagcaaggcaagtcatgcattacatttgatcatattgtacccaatttacaaatatcccgcatttctattaaatgtcgcattcttttacaatgtcatgtgggatgggtcctattactcagccatttattgtttaccctatgccattgataacttgggtatcaaaatgattagatgttggtttaggaaatgcttagccatgcctagttcaactagtacacaaatggggatcacattattacatagactttgactattagcatagctttggattggtgccaccgtaatggtgttagttaattaaaatacactgaatggtggactgtgggtgcatggttttgctggtcgcacccatggcaattaaggaccggttcacgggaaaccctgggagacttaccgtgcttaccacaagcgggagtgggtaactgctcggtctgaagtatagctcgactctttcctaggcaccggtggcgagggtgggcgtgatggagttgggtcggccggggtgtccggttgtccagctaccggattcaccgcggcgcaagaggggaccacccactacccgttgggggtgggggtgaaaccttagcatggtgtggatggttaggggagggttatgtggagggtcttgtcacaatttccccctttgtagtatcatggtgatattttggggcatggcgacatgtgtggaatcgtgtcttgtgggtacagttgtacacctctggccagagtaaaactattcgaatagccgtgcccgcggttatgggcgatcaaccagattcaccgtgattagtctcacccctagtttagtttaatgaactggtgtagttcaggtggttggttgggcctgttgcaacgtggtgtagcgttagacagtgattggttaatattgattaattactacaattgttttaccgctttcaactactgtttttaaatgcctgctttattgcaaatgaaccctagcctcctttggttatatcctgcatcatacctcctcttccagtatgattggatgagtacagtgg

SEQ ID NO: 18467 - DNA, 2844 bp, Oryza sativa
tgctcactcaaaatcttgtcaagagtgtccttacccttgaagcacatctccaaactctgttgagcttaaccacttgctccttaagctcattgttctcaacaacaagtgaggcatcacaaatagaaacacaagtgctagagctagagctaggcatatccacaagatcatcacaagaggtagaaatgctagatgatacaacatgagcaatatggcaaatagcactatcatcaagcaaatcacaagatatgccaacatcaatgagaactccatgttgagtagtggaaaggaggttgtcatgagcttccttaagcttctcatgagaaatggtgagtctctcatgagaggtctttagctcctcatacaagacctccaaagaagcatgatccttctttcgggccttgaacttgacaatctccttctcactataagcatagagctccttaaacatactcacaagctcatcataggaaacatcatcacaatcatcatcactctcactatcactaagaaatgctaccttagaggagtcctttgccatgagacaaagtggagcgaagagtgatggagcctccttgatggcaacaacggccatcttcttcttcttggagcttgcatcatcaccaccttcttcttcggacccggatgaggcggagctctcctcatttgagtcccattccccgataaaggcctcaatattcttgccttccttcttgagcttcttcatgagcttgtagcctccactcttcttcttggatgacttgtctccatcatcatccttggaagggcacttggaagcaaagtgtcccttctcaccacactcaaagcacctcaagttgggaagagtcttgttgggtcttctatttcttctcctattggagttggagtcccttcctctctcctttctccttcacaagagatcattgaaccttctagcttgtaagggcaatctcttcctccaagtcctcattggcttcattcaccttgcccttgcccttgtctttaacttcggcttgtagaacaatgcacttcttggaatgtgagacttcctccatctccttcttcttcaacttgtacatgtcattggtgttgatcttccccaagaggcttgcgggtgtcatccttgacatgtcagagttgatgagcatggtgacaagggtctcatacttctctggtagagccctaagcatcttttgggcaacctcaagatcggtatagtttgccccaagtcccttgagatcatttacaatgacattgagcctcccatacatgtcattcacactctcatgaggcaacatggagaatgtctcatattggatcttgaggaaatgaagcttggcatccttgtactcgcttatgccctcatggatctccgccaacttgttccaaatctcatatgcagtctcaaggttgctcactctatcgaactcctcttggctcaaagagttgaacaaagcattcatagcttgggcattgagttggaggttgcggtgatcaatctccatcaagagcgtgccggtgatagcaaagcctacatccacaatactccaaatatggaagctcatagctttgaggtgagtagacattttaatttttcaagtggagtagtttgttccattaaacatgggagccttccctacatggttcacctcgttcgacatcttctctctaggcggtgaagcccaatcaagagagaccaagctctgataccacttgtaggatcgagatgtcgactagaggagggtgaataggtgatttaaaaactaaatgacacctaatcaaaactaacctaagttgctaggcttggtgagggtcaactctaactaagcaactaagttatgttttgcaaacctagggtgatagtggctcaattatatctctaggaaagtaaatcacactcctatgtcgatgcttagcaatcctagggtgataagatttcaagtttgtctctagaaatgtaaattgcacaaatgtaaatgcaacaatcaaatggacaaggagacaagagatttttcaccgaggttcggaaactcgccggtttcctactcctcgttgaggcgagcccaactccaccgctcaaccacgaagccaccgcacgcccccttcgtcaaggggtgggcaaggcgggagccggcccacggagaggactacccaagcctcgatcactagggtagttcttccttcactccgaaggtggtgaactccaaaccactcacaaaccagcgccgggcctcctccacaatcttctcggagaggtcaccgggcaactcctccacaagccgtctaggaggcggcaacctccaagagtaacaagtgatgacctggctcggagatgatcaagtgccacactagctctacaatgaagcaatgcacgtgactcctagctaatcaaccctcaatcacactaaatggatgaacacaaacattagagagtgtgagagtagtcaactactattaggtatgtggtatccataaccctgacagtagcccccgacttcaatgcaaatgaacgaattcatattctcaaccacgcgcagaccttggagtaactattatcgagctcatgtgaccgttctcggtgagttcagagataacgtttagacttccctatcagcctcgtgcgggcacctatagggtttgtctgatctccgatgtcaaccaagaaagaacagagcatacgactaagtctcccgtcttgctgtaatcgagaatttagattgaagtcaagaaattttatctcggtgggtacaccatctcttcattccgtattccttgtcgagatccaccaaccgttctcgagtaatcgagtaggcgtagagtctgcgaaggagccttgtcaatatttgt

SEQ ID NO: 18468 - DNA, 6706 bp, Oryza sativa
aattgaaaaagttcaaaaaccctttccctctaggcaccgacatgtggggcccacatgtcaggcccttcttcttcctctagcagccggccggccgagcccaagccgtcgcccgagccgccccttttctccctcaaatccgctccaatccggctctttttcttccgggtttttgaggggattttatcctctcgtcctcctctatctttcccctcaataatcggagcaaatggttgagtatcttgcccgaatcaaactcgttttcgagtttatctccaaaaccgagttttgattttctcggatcgatttcttgcgggaggagtccgatctcttcaatccaaggctataaataggaccccctagttcccctctttcgtttgccccatctcccgtggtctcccgtgctccgtagagtcgccgccgcgcgcacttagttcgccgccgccgccggccgtcttcagccacgccgcgccgtcgcttgcgtcgtcgccgccgcttgccgccgccgccgttaggtgcgccgtggtgaggagaacctcggccgcccgtcccccttcgccgccgaccaccggagctccgccgtcgccgtcaagccgagccgccgccgccgtcctcttcgtcgccggccatcatcgttcgtcgtttgtcgttgtggtgagtaccgttgggttcgcctcgtcgtcctctacgcgtaggtgtcctccaatcacccggccaaggtccctagctccggcgaggtcgccaaccctagccggcctccgtgggtgatgtcatgctgacatcatcatcctttctttttttttccttttttctaatagatgaaatcttcggaaaatcataactaaataaccatagatccgtttcaggtggttcaagttgctaaatttttctaaaataaagatctacatattaaaattgtccataaattgaattaaatttatttaagtctttttaaatggactttaattagatttaatcttgtaaaattcataataaattcatttgaagtcggaatgaggccgttcaagtctcataattcatctaaaattatgatctacatgtttttttactttttatgtactgtttatttggtttttattagtctttttcttcgttttgcgtgttagcttgtcgtttccgtcgttgcgaaggttcgtgagtgcgtcggaagtgatcaagaaggttaattgaagatcgattattgcaaggcaagtcacacagatcctaaacacaatcctttgagcatgttgatcctatatttaaattctctatttatttcaactgtgcatttattttcgaatgtcaccgggtggtgtgaacctattcctttgttatggccaatttgcattgaatgccctattccttgataccttgggtaataaattgattagcttgaaccttatgtattggtttggttcagctaaaagttatatatataattgcttagcaatgcttagaaacattagctcactaatgggatgaatcatatatactacattattatttatggttatatttaatggtagctcacgatggttaatcgtgtgatgttaattaattgataattaaaacctggttaaggtgggttgtgagcatatggttttgatggttgtgctcatgacaattaaggaccggttcgcgagctactgttgtgagacattaaccgtaccaaccacaagccagcgtgggcaacggctttatcctttgtatagcatggttcattatagtgcgccagactgagaagtggcgagaagtccacgggggtcgctggggagtccatgccttgtttataaggggttgattatgatccaggaacggtgcactgttttgagttgtgttgtgcaaagggtattgtcacgatttccccctttgcaatgccgtggtggtatttcggggcatggcaacatgtgtggaatcgtgtcttgtgggtacagtggtacacctctggccagagtaaaactattcgaatagccgtgcccgcggttatgggcgggttgagcaatgtttttcgtgattagtctcacacctttcacaataattatggatgtaataactggtaataatttgcttagctcctggtttggagttagatctgttcagccgggtatggttgttcaggatggttgggcctgtacagcatgggtgtgctgttcagtgttgattaaaacttctgattaattaatctactgttttactactcttaactctttgctaaatgctgctttcgcaaatgagcctatattatgccatcctttggaatccttgtgcacttgcatatttgctgtgtggcttgttgagtatgtcatatgctcattcttgcaataatcatcaaacctcagttgaagataaaggatccagaaggagaagacgtttggcttataccccagttgagctgcctatgggagtggagctgaagccatcgctagaccgttaattccgctgctgtttttcttttcttttgtaagtatgtaacgttattattatgatggatttgtatattaaattgtcagtttgtgtacctcggctgattcctggacgaggatttcatgcacaaattagttcggaaattattagtgaatttccgggcgtgacatcaacgcctccgacccaagaagatgtgcgtagggggctggatgcccgcctcagtatcgagcgctggcgcaatggtcgtcacgcttcccacgcaacggaaggcgcttcctcgtccggagcgccacttcggttcgggcgcgggggccagccccccgtgcccccgattggtggtgtcggctgtcgagcctttgtggcgagccttcggaacgtccgttggcccccaaggttccggcccaccatcaccgaaaaatatgacggaagcgtcaaccccgccgagtttctccaggtctacatgaccgggatcgaggccgccgggggtgacgacagggtcatggcgaatttcttccccatggccctgaaaggacaggcgcggggttggctaatgaacttgccgcccgcgtcggtccactcttgggaggatttgtgctagcagttcaccatgaacttccaaggcacatatccgcgcccaggtgaagaagcggacttgcatgcggtacagcgaagggacgatgagtctcttcgctcgtacattcagcggttctgtcaagtccgcaacaccataccatgcatccccgcacacgcggtaatctacgcgttcagggggggcgtgcggcacaaccgcatgctcgaaaagatcgcctccaaggagccccagaccaccgcggagctttttcagctcgcggaccgtgtggctcgcaaggaagaggcctggacctggaactccaccggttccggtgtggcagcttcggccgcccccggatccgccgctcggtcagggcggcgggacaggaggaggaagaagaggtcggcccattccgacgacgagggtcacgtcctcgccgtcgagggcgcttcgcgggccacctgaaaggggaggcctgcgagcgacaaaaagaaggaggccggcgctcccagcagggagcgcccgaccggcaagtggtgcaccgtgcacaacacctccctccacgacctcgcggactgccgcgcggtcaaaagtttggctgagtggacgaggaagtgggaggaggagaggaggcaggagcgccgtgagggcaaggccccggcggctccctccggcaaccggcaaagtgaggccaagcagaaggcccccgcagaggacatcgacgatggcgacgatgacctagggttccaggagcctggggccaccatcgccaccgtcgatgggggagcatgcgctcacgcttctcgtcggagcctcaaggccatgaagcgagagcttctggccgcggcccctacccatgaggcgacgcggcgggcgcggtggtcggaggttgccctcaccttcgaccagaccaaccacccgccgtgcgttgcccggggaggacagatcgcgatggtggtttcccccaccgttagcaacgtgaagttggggcgtgtcctcatagatgggggtgcagccctcaacatcctttcccccgcagcctttgacgccatcaaggccccggggatggtgcttcggccgtcccagccgattgtaggtgtgacgcaggggcacacttggccgctaggtcatatcgacctcccggtcaccttcggtggatccgccaacttccgcacggagcgggtgaacttcgatgtggcggacctcagtctgccctacaacgcggtcctagggaggcccgcgttggtgaagttcatggtggcggtccactacgcctacctccagatgaagatgccgggccccggtggccccatctctgtccatggcgacctcaaagtcacgcttgcttgtatggagcagcgcgcggaccacctcgccgccgcgtccaagcccgagggtggcaacgagaggctcagcacctccgtcccagccgccccgaggcagcggatgatcacgtgcgacgaggtcccggtcaaagaggttgccctgggcgacggcccgtccaagaccacatgaatcggtggtcttctggacggcaaataggaagacgcgctcgtctccttcctgcgggcaaacgccgacgtcttcgcctggagaccggcggacatgcccggggtccccagggaggtgattgagcaccgtcttgccgtgcggccgggcgcaaggccggtccggcagaaagtgcggcggcaggccccgaaacgtcaagccttcatccgcgaggaggtggcgcgacttctggaggccggattcatccgtgaggtcatccatccggagtggctggcgaacccggtcgtcgttcccaaggcgaacggcaagcttcggatgtgcatcgactacaccgaccttaacaaggcatgtcctaaggacccttaccccctgccacgcatagatcagattgtcgactccaccgcggggtgcgaccttttgtgttttctagatgcatactctggttatcatcagattcgcatggctagggaggatgaggaaaaaactgcattcattacccccattggaacttattgttatacgacaatgcctttcgggttaaagaatacaggtcctacttttcaacgtactactcgaatttctttgggtagccaaataggacgtaatgttgaggcctatgttgatgacttggttgtgaagacgcgcaaccaagagaccttactctcggatctagcggaaactttcgaaagcctccgctccgcccgcataaagctgaaccccgataagtgcgtgttcggcgtgcctgcgggcaagcttcttgggttcttggtctctgcccgaggcatcgaagccaaccccaagaagatacgagctatagagcggatgcgcccccccagcaagcttagggatgtgcagtgcttcaccggctgcatggccgccctaagtcggttcatatcgaggctgggagagaaggcactacccctatttaagctcctcaaacactccgggccgtttatctggacggaggaggctgagcgggccttcactcagttgaaggcgtacctcagttctcccccagtcctggtcgccccggagccagatgagccgctgctactttacctagcagcaaccccgcaggtggtcagcgcggcgttggttgtggagcgcgacgaggacaaccctcaccccgcgcatccccaccctgtgtcgactcgacccgggagagagcagggaggagaggcccccgagccgaacggcggcccgaggcccccgacggccggagctggccctccgcctgcttgtccgacggtgccaggcgcccccgacccccaggatggccccggggccactgcgggaaggccgcgcctgtcgccctccgaccccgaggtcgtcggcacagaagccgagtgcgccccgcgcggcctctcggacgaagagcgccctggagatgcggcccctagtgaagaagatcggccccgccgaaaggtgcagcggcctgtctacttcgttagcgaggccctccaggacgctaagacctgataccctcaggcccagaagatgctttacgctattctgatggcttcgaggaagttgcgccattattttcaggcgcatcgggtcacggtggttacgtcttaccccctcggccaaatcttgcataaccgagagggtactggacgggtggtgaaatgggcaatcgaactctctgagttcgatttgcactttgaaccacgccacgcaatcaagagccaggccctcgccgactttgtggcagagtggaccccggcccctgagcccatctccgtccccgaggccagctcgggcccctcgcagctgcctcacaccgcctactgggtgatgcagttcgacggctccctatctcttcagggcgccggtgcgggggtcacgttgacctcgccaaacggagacgtcctcagatacctggttcgcctcgactttcgggcgaccaataatatggcggagtacgagggactccttgcgggactcagggtggcagctggactggggatccgtcgcctcctggtgttaggcgactcccagctggtcgttaaccaggtctgtaaggagtaccagtgctctgacccgcagatggacgcttacgtgcgccaagtgcggcgtatggagcgccattttgacgggatagagcttcggcacgtgcccagacgggataacgcggtcgccgacgaactttcaaggctcgcttcctcgcgagccagaccccacgggcgccttttaagaaaggct

SEQ ID NO: 18469 - DNA, 5379 bp, Oryza sativa
tcacagataagactctacccgaggactgcgaagggagtgaacgcatccagcgcatctccaagcgctacgtgctggtggaagggaccctctatcggcgcgcggctaacggagtcctcctgaagtgcattcctcgggaacaaggcgtcgagcttcttgccgatatccatgaaggcgagtgcggagcccactccgcctcacgcaccttggttggcaaggcctttcgccagggtttctattggccgacggctctcaacgatgcggttgacctggtccggcggtgcagggcgtgccagttccacgccaagcaaacccatcagccggcccaggccctgcagaccatacctctttcatggccgtttgctgtctgggggctcgatatcctgggtccgtttaggcgggccccgggcgggttcgagtatctgtatgtcgctgtcgacaagttcactaagtggcccgaggcttacccggtcatcaagatcgataagcactccgcgcttaaattcatcaggggcattactgctcggtttgggatgcctaatcgtatcattacggataacggcacccagttcactagtgaactcttcggtgactactgcgaagatatgggcatcaagctctgcttcgcctctcccgcccaccccagaagcaatggccaagtggagcgcgccaacgcagaaatcctcaagggcctcaaaaccaaaaccttcaatatcctcaagaagcacggcgactcgtggatcgaggagttgccagcggtgctctgggcgaaccgaaccacgccaagccgagcaaccggggaaacgcctttcttcgtcgtctacggcgcggaggcggttctcccatccgagctcaccctgaggtcccctcgggccaccacatgcataagcttatattttttctcttccgtatttcaataaaagcattttcgatttcctaaggactgtgtctgtgccattgtttcctttcgaagaatcttggcttgaattagcacgctcgtgctcgatcctgccctcggtggcccgggccggctaaaatcgccaaacggggcccagaaccgagccgtgccccggggcgtggtgaactccgggggggaatcggcaaaggcccacaatcgggtcatccataaccctcggtcaccacgttcccggcctggccagtctcgacacgcggatctccccaggcactagccccgacccgcgccatttgaggctaggacctgggcacgagccctcgttcaagccaagacacagaaggactgcggcatagaccatcctcgtctcatacacacaacaaacagagctgacacaaaaatttcctctttatttgattgcagattgaattagtttatacaagaagggggcccgaaggcctcagaagaagaaagaaaaagctatttaagattggcgggggcctgggggctcacgccgacgcgcccgggtcgccggcctcgtcgtcgctgtcgtccgcaccaccgtcaccgccctcctcgtcggagtcgagggcgaacgcgagccgaggggccgtaccctcgaagctgtggacgatgtggtcggcggcgtcccggacctgtgcgcgcgcgccatcctcggttccaggagggaactcgtccagcgttgcccacggggagaagtcagggtccctggcctagtagcttgccagtacgagctccaccgccccccgggcgaggtccctcgaggatgacttgatcgtctcctcgagctcctcggggagccgctggagggtcccggccatctctgagaggcgctgggcgaggcccccctggttggcggcatatttcgcggtccgcccgccccagaggctcgcctgccgcccggcgcggtctagacgggagacggcgtcccgaagcatgccgggccctacctcacctgccaagcggagggcctcgacctccccggcggacgagtccagcgcgccctgcagctcggcgatggtgtgttcggcggctgcgaggcgggcggctaggtcgccgtcacccgcggccgccccgccgctgcgcgctctcgtgtccagctccttcgcccgcgcctcgaattcagcggcccgctgatccagtgcggccctctcggcgcgggcgccttccagattgaggcgcgcctgctcctcccgcagctgcgccgcggcctcggcctcctcgagagctcgctcccgctcagtgagctcgtcctcgtggaggcggagtgcggactcctcttcggcgcaggcggcctcgtgcgccgccagcgttgcctcccggatggcgacggcggcctcgcgacccgccagttccctctccttcgtgtccagggcgcgggcgcgctcctccagcaccgtggcgcgagcctcaagggcctcttcgcgctgccgggacgcgtcgagcttcttctctagctccgccccccggctcccgtattggaggcagaggtcgtcccgcgccgcgttaaacacggcggtggcaatgagggcagtctcccgctcctcctccacctccctggcgatctccgccaggtccctacgacgggcctcgagctctgaggcgtgccggcggtgtgccttgcggcccgcctccaccatggcctccaccgagcgtcgcccctcttcgacacgcgcccacgccgcgtcgagctccgcccgctctgcctgcaggacctccatctgggcacttaacccgtccaacaccgtggtgttcgcggtggccaaggcctgcagaaggggctcagcgctcagtggggcagcggaaggcatgggggagagccgcctcggtaaggatgccgcacggctcggcccgccgatcgacgtgccggactcggggacgtcccccgaagctggctcgtcctgagcgtcgcccgaggggtcgggcccgagcggtgcgcccgcgacctcgtcgtgggtggcctcggaagtcgtcgtcgcctcgggcggagtcgggtcgggggcttggcaggccgcccggcgtgcgcgcgccgcctccgtctcccggacggactcctcggcccggtggagtctggcctcctcccaagcggcttcctcagcctggcgagcccggacagcctcctgggcagcttcctcggcttcccggaggcggtttgcggcttctcgccggtcagcttcccgcctccgggcctccgcggtcgccgtctcctcggcctcagaccggccggacttggaatggcgggaagggcgcgacgggatctcgctgaggcagaagaaaaaccagaagacgaaaaacgggtgagtgaaaacttgccttgggagatgtgagaatgaatacggccgcagtgggcgcagggacgaacctgcgaggaggtcggctaaacgaccaccttgggggggagatgaggtttccccggcatggttcggtcccccccatcttgcggagccgcttcttttttcgctccccctcgggctgcgacgtcggcacagcacccttcgggcgcctgctgctggcacgcaccgccccgccccctcggggaggagatggggagggggtatcctcctgtttcctcttcccccgggcgtcggtagggcggctgccccccgggcccccgtcacggggcccagaagcacgaccccctcccggggtagattgttcccccctgcggctcccgcccgcgccatcgtggcctcggggggcccgctcccccgacgccccgacctcctgcatgatggtcaggatgttggcgcgctctggatcgcagcagaggggaaggaccccttgagggatgagggatgcctccacggagctgagattcagcacccgttggaccactatcctgaagtcctcagggtcccagtcccatttgcgcccctggtgggtcctcatgatgtcctcgggcccggtgtactcccaggcgccccgggcgtgccgctggagcggcgcgatccggcgacgaaggtagtcgccgaacaccatggcccccgtgagcccctgggatcgcaaaccagccaggcggtcaagaacggcgtcgtagccgtctcccagatctaccggcgcccgccagctggaggcctgcgctgggggctggctcggaagtcggaggcgcgcttcgtcggcgagaggggtgtagaaccagtcgctcttccagtgatcccacttcttgcgaaggacgcagggaatatagcggttcagcaccggcccccgcggctggaagtagcagccaccgactaccgacggtggcgacaccggctgtacggtgaagaaccaccggaacaaccagagagatgggcgcaccccgatgaacatctcgcacaggtgcgcgaagatggccaacgtcattactgcattgggggtgaggtgcgccatctggagatcataaagctccagaacatccatgaagaaagaagagaatggcgggaccagccctgccattgcgaaggaaaggaagaatacggaccgccccgggtagtgtggcgccgggcgtccctcacccagcgcaaccacctcccggccggtggcagattccggcatgaatcggcgcggcagcccggcctgcctctcgctcacgatgcgagaaggcagcagcacgctaccgtcgagcggtgcggagccccgtgccataacgccggcggaggaggggtttgagagcgagtgagtgcggcgagggtagggcacaggaaacgagaagttagagcgcaagcggcgaaggcaaggggaataatggcgagaggaaggaaacgaatctcttcctcggcgtctttatacccttgccaaacgctatgcccggctcctcgcttcccgcgcccactatctcgccccctcgtttctcgcgccaactcctccactaatcccgctcgcccgtttgcggcgcacgaggcggatgtgcggccgtggcagtcgagatgggacatatcgtgcgcgcgttaactacgctcgccgaccgatgcaccatcatcacatctccaggcgaaacgaaccggctcgtcccaattcgcgcgctactcgagtaatgtagcggtcttgaagaaagccgctcattattgtcggtcggtttttcccttgccgatgcgcgcgatttgcgaccactggattcctgtccgcttttagagaccggccccacctgtcaccaggcctgaggagtggcgtcacgcccgagcgttttcctcgaggagggtgatcgccctggcataaccccgggggctactgtcggtgacatgggaccggggatatcttgactagaggtttggggcagccgcggtcacccacgtggcctgaccccctcgggggggtcgggcccgagggtgatgagaccgcccctccctctatctccccgaggggtcgggccgctcccgtttcgtccccgagggctggggcgccccgaccccctgagggtttggcgccacgtgtgtgggttagatgagcacagcggcgctcacctaaccgcg

SEQ ID NO: 18470 - DNA, 1059 bp, Oryza sativa
cacgttgcacctgcttccggcggagtggaggttggtatgacccatcccatcggaggctcattcggacagcagccattgcaaatctccgcccattaatgagggaggacagggttatcccggtgtcaggcgaaggtacgagccaagttttggtcaaagtaggatgggtccccacccaaaagaagggtaggtagaaatggtgtatgtggtatccccttgagatataaaaggaggaccatgcctaccaagaggggggactggagaaaagaggagtgagagggtctctagagtttgaactctcttgctctccagctctttgtaactccttcatacacagatccaccagaacacaggagtagggtattacgcttctcagcggcccgaacctgtctacatcgcccgtgtcttgcgcatttgctctctcgcgaaccattccacagatcaagggcttagaacctcacccagcgcccccggccgaaccggcaaaggggggcccgcgcggtctcccggtgaggagccccacgctccgtcaatgtcctatacggaaacaacctacggatataggagggagttccggataaggaaagacaaccagagttctacatggaaacgacaaggactactcggattgtatccatattgatttccctagttctacttggacaaggggacacctatgggtataaatacaagcctccctaggaggacagggggacacacacgcccaccacgagacaatcaactcccaacacaatcaacatagaagcctacatacaccaagacaagccgccggatatcgacatcagagatacgcctggatcgaccctatctggtaccttcagaggccggccgtagggatctagcactgtctctgattccgtcgggtgcgagctcgaggaggaaggctaccctgttgtcgactacgagtcagaccttcagaccgccatgtcgacaacagttagataggctaccctacatattgtactggtgtgattatggtgaataaaaagcaacatcggctccggccaacaggatgtagggctattacctgatagctcaggg

SEQ ID NO: 18471 - DNA, 2244 bp, Oryza sativa
tggactctccgacaacaagctactcgatgacttcggctgtgaggagatctaacccaactgaagtacatcttccgaccagatcggaaccatcatcgtcatcgacaacttggtctatcgagatcatccaagcctcaagatacgcggcgtaccaaaatatgtcagatcatattatgtccaacgagtacacaataaggtaattggtagattggtttttcaaattgatctactaatttcgtagatacagccggcatgtatctacaaaggtacgcaatattttatatgcaatttatcgtacctattcagatcatacaatattgtcagatctataatttattatgtttacctagagcatgttttttatacaatatctattgcgcggatgtttccgacgttaaaccaactacggtctaacgctgggggctcgctctgttctcttctgtataaatcatgcttgtttacggtttacataatgcctgatatttaatctgctcgttatatcctgataatactagaagatccacgcagtttttgagtacatactcgatatcccctgctatatatcttgtcttctagaaaataattttcagaaacaattgagcactcgagtaggttgtagtcgagtacaccgcattatcgagaacgatctcgacaaatgcagagtcgtcgcgcccaacctaccaacgaagaccgacgacctatctcatagctccggccatcgctggactactcgagaaaagtttgttaacggataattcctcgctaacgccgtcggcttgatcacccgacatgattgcgaacggacatccggatatgctataagttgggtatgtgagtcatgctggccacataatatgcacatataataaaccaactttaacgcccctataggtaattaagagactcctactcctggttctcgaaccagtaaaatgtaatgatctctctcgcctcactttaagtggtcgagttacgactactgcctggtcctcgaccagcggcgtagcgtttctcccactacttctactttcagtggtcgagttacgactactgcctggtccccgaccagcgatgtagcgtttctccggctacttccactttaagtggtcgagttatgactactgcctggtcctcgactagcgatgtagcgtttctcccactatttccacttcaagtggtcgagttacgactactgcctagtcctcgaccagcgatgtagcgattctcccattacccctacttcaacaaagttgatgtcaggtacacaagatcgccaagggttttacccagagatcccttacccagatgacacctagcgctgaaacctatcctactgtccctttacgccgtcttgacaaggcctccgaggaacctaagggatcttcggctggggacgcctagagccgataaggccttgtcggatcctgtagagacgaaagaccatgtaagatctggtcatgtaagagttctcgccgtgcgtattaaccaagccgtgtaatcggaaattaactttccaacttcacggctgggggctaggatcagtgcttattcaaccaacgcaggtcaagggtccaagagccttatccttcgagaacgattctccgacgacaaggctgggggctagggagagtgtatgactctacaaattgactgatcgaagtcggtaagagagaagacgctcatacacaaaacattggtctgtaaatttatttcatttttagtttccatatatattataacatgtcaccctttgagcgttcgctcgggggctatttctatctgatattcttttttgagtgttgatttcaggaaaattctattcgacattgacgaagactccatgtctctatggttctacaccaagatcgactaaggcgagtacgacaaatgttgacaaggctccgtcgtagattctgcgccttctcaatcactcgagaacggttggtgaatctcgataaggaatacggaatgaagagatggtgtacccgccgagataaaatttcttgacttcaatccaaattttctattacagcaagacaggagacttagtcgtacgctctatactttctcggtcgacatcagagattgacttagacaaaccctttcggtgcccgcacgaggctgacaaaggaagtctaacgttatctctgaactcaccgaaaacgttcacatgagctcgataatagttattccaaagtctgcgcgtgattgagaatatgaattcgttcatttgcattaaagtcaggg

SEQ ID NO: 18472 - DNA, 1263 bp, Oryza sativa
ttgtttgtactttaactaaatttttattccttctaatatatccggcaaatctccagccatcttaagtttcaaaaaaagaatgccaggcaacccaaaaaaccgatccgattaaaccaagcaaacccacccctacgtgatactatcatatacccctgataatttcacaaaactatttgtgcagttgtgctccttagcgtgggagatgctgtgattagcggtagcggccggcaaggcccaaacaacattgtctcccttgagtagcctggcagcaatcgaatatagtataagtatatgctctctccgtttcacaatgtaaatcattctaacattttccacatttatattgatgttaatgaatttagacatatgaatgtgggaaatactagaataacttatattgtgagacagagaaagtagtatacatgaacccactacagaatcatgaacattaaatccaattgcgatcaacatcttgacaaattgttcaccacacaaaagtaaatcaacacaatgatttcacacagtaatagacccgatatatggagaaaagtacctaactttgttttcctgtcatcagatggaatggatcactactagaaaaaaagatttttccaggcggcccaaaaccattttcacaggaggggaagaggatcgccgctaccatctcgactgtgaaattaaaccattttcgcaagcgcgcccgtggcccgccagcgaaaatcatcccaggaaaataaaaaaaaccacggggcaccgccggccagggctcccctccacccgtcgtcgtcggcgccgtcgtcgtcgtcatcgtcaccgtcatcgtcgttgtcggcgcggcggcggagggggcgaggagatgaagcggctggtagaggcggcgaggagggaagccggcggcgcacggatctggagccgtcgtcgtcgctcgtcgtggccggcagcggagggatgcggcggcgcgcggacgttgtcgtgaagggagccagtggcgcggacgtgggagaggagggagccggcaacgcgcggatctggagccgtcgtcgtcgctcgtcatggccagcgacggagggatgcggcagcgcgcggacgtcgtcgtggagggagccgacagcctggacgtgggagaggagtgagccggcggcgcgcggatctggagcggagggagccgtcggaggcgtcgcggttgtcgtcatcgtcgaggagggaggccgccggtggcgaggagggatgcggcggcgcacggacgtcgtgtggagggagccg

SEQ ID NO: 18473 - DNA, 1112 bp, Oryza sativa
tttccagtggccaagggggtaccttacttagctagatgtgttaaatcagcaaccaaacttgacttgcagcgtctttgccgtgtcttccccgtaagtgtcgtgcatatgccatcggcgttttcattgatagatacagctctgcatctactctcaacctcaatctttggacactgctgtatattacatggggtatatatatatcctctctgccttccttctcccagttgcagaccaaaggagccagagcagcacaaatattgagaaaataaggagaccggccactgaagagcatgccttctctctacatattccttgggcttcttctcttctccctgcaggctcctccatgtcctgctgcaactgatactctgaaggcaggacaagtgctctctgccggtgacaagctcgtctcgaggaatggcaagttcgcgctcggcttcttcaacccaagcgcaaacatcagtaagtcatctgacaacatctcctccagttggtacattggcatatggttcaacaagatcccagtttttactgtcgtgtgggtcgctaatagggagaggtcaatcgctgagcccgacttcaagctaacacagctcaaaatatcacaagatggcaatcttgccatcgtaaaccatgccaatgaatccataatatggtccactcgtattgtcaataggacagaggccagcatgaacacaagtgttcttctccacgacagtggaaatcttgtcatacaaagcacatctaatgcagtgctgtggcaaagctttgactacccaacagatgttgctcttcctaatgccaagattggctggaacaaggtaaccggtctgaaccgtgttggtgtttcgaagaagagcctcattgatatgggcactggctcttatagtgtacaactatacaccaatggcaccagaagggtgaccctcgagcaccgaaacccttcaatagagtactggtattggtcgccagatgaatcgggaatgaagataccagcactcaagcaactactgtacatgaatccacagaccagaggtttagtcaccccggcatatgttaacagcagtgaagaggagtactacagctacaattcatcagatgaatcatcttcc

SEQ ID NO: 18474 - DNA, 678 bp, Oryza sativa
caactcactccttcccttccaattcttgaatcagaactgagctgattgacttctcaccagctgataaatacaacctaaatggtactcctttgtaacatcccggcctagggcttaataggattaatagaatactcatattaacaagttgcaacttcttttccggaagccaatctccagagaactccagggttaagcgtgcttggcctggagcaatttgggatgggtgaccgaccgggaaattcttcccgggtgcacacgagtgaggacaaagtgtgcacataagacatgtgttggtctgtgagggcagtctatgacctatgaaagctatcggatgtaagtgggcccggcctggggaaaggcggaacgttacatcctttctgtgggggaatcaaaacagttcagagaactgagatattccttgatattatccaaaactttttgttgctctgccccccaagtgaattgttgatcggctttcaaccgcaataagggtgtaaaaggttccaaccttccagaaaaattagagataaacctcctaacaaaatttatcttgccgatcatttcttgtagctcggttttattttccgggggcttaattttttggattgcattaacgctcctttgggttacctcaatccctctttcatgaacgagaaatcccaagaactggccagccga

SEQ ID NO: 18475 - DNA, 1463 bp, Oryza sativa
acccggataaggataatcggaacatcctaactctcaaggcgtccacagccgatgcttcaccacactgagcaaggtatcggctgatgtgctcataattaagttgacacaccctcttgccctgagaacttggagaaatcagggattttaaaccgattaggaaggggaaccctttcaaaccacttgggataagactgccgatacaaactcccagtctcttttggtctaagcccaaattgctccctcattacatcagcaatgacatcagcccatggtcgttgctgagctgctccttgtggttgctgctgcatgggctcgaactgaccaaactgaggagtgaactgttgctgggccgatcccgctggttgatattgggcttgcggggatggaagctgacaatgatagctcaagtttccccctggtagttatgtagattcggctgaatgttgcgcaccaagtgctcaggaaccatctgaggtaccacggtgccatccggttgtgcatgatgaaccaaatgctctgggataacttgattcacaaactgctgcgcaggttgccccccatgtactgcaaatctagccgatgcattggccggccccaggcgctaaatcggctgaacgacctgcagtcgtaccggagtctgctggatcagctgaggtcgttgccttggcggtgtttgctggattggttggagatgctgctgcgttgatggtgcttgctgaactggctgcacgacctgttactggatcggctgtaccactggctgaattggtggtgtctgctgagctggctgcgcgacctgttattggatcggctgtacaaccggctaaattgatgacatctgttggatcggctgctgctgcactagatcaacaattggtggtggtggaaaaaacatagcagcaacctgatcttgagtcggctgattcgaggtttgtccagcaagctgtggatgttccctcattagcaatcgagggttgatcggctgagctgacgccgtggccgatgtagcaggtaagggcgttgatgctggcgctgttggttgagtcgtggatgcgacagatggagccgcctgcacaactggctgagcatcggtgatcaaagttcgataattcagaaaaacgccttcttgcaagtacaccgggcctgtagcctgatgctcagctatcgagccatcggctatcgttttcatcatgttcgacagtgtattgactaagacctcggattgattgatcaaagcatgatgcaccgcgtaatcaacccgatcttgaaagttgttgaaaaaatcttgtgctagctcaatattctgattaagatttcctccttgcggcccttgagcagaatcacctggagctccgtgcacttcttgagggttatcgccttgatttcctatagaaccaccgatagcacccttgttgctcggctgattcgagccatctggggcttgtttcacttctccatcctta

SEQ ID NO: 18476 - DNA, 993 bp, Oryza sativa
cccggttagggcatatgtattgtgagcatgatgtgatgtgaccctgtagttctggttggagctgcctttaagttcggctgcttagtggaagctctatgatttagactccctttagttgctcttgccgtgtggacgtgtaaaattcgggcaggatgggtgttgtatgggtattttgaatttattttgggtgtgtatttatgtatctaacattctaactacgcatttatcgctgtttcacgtcatgtatgtaaccgtgcagttattagtttattgtcttcattcgtgcttagcataacgacattaatggcttaccttgttattcaattgcggcggcagcctctgcgggctcggttcactgctccatccaatgtttccaaatatgcggatgcttctactcaagtgttgtcagcaaattttcctggaaaaggtgagagcaagtactgtttccttttttatgcttttgtttcgcactttatgccgctgttgcgtgatgttcctttctcaaataggaagtctcttacacttgttcttttctcttgcctcttatattttgatttgctaggcagtaatagcctgagtctctcaagtgcttttcctcacaaaacagttgctccaagttataagaagacaacgagggtgaatcaagggcttttcaaacctggcaccaatcgaaaccttacttggcaaaagcctgtgtcaagtgataaccttgtgataagtttctctgatgatgatagtgggtccgactctggaatgtcaaagcaagataagagaggcaggaaagacagttcacaaggtacatataaaacagggattaatgtgcacactggaattatgagggaagaagcacctcaacagaagatccatgctgcaaaggttggatctgcaaattggtcagctgttccactaacatataggaattcacgggtaggcaggggattgagtgccacctttgctaggagagatccacctgtctcgcaagtcactccccaa

SEQ ID NO: 18477 - DNA, 5966 bp, Oryza sativa
tcaagagcatagaaggaagtgcgaagtagaggaaagagaagctctaagagcttatcgcagagcacaaagagctttaattgaggccaatgaaaggtgtgccattcttcgcagaaaaagagagctttgctctgcacaagtccatggttttatcgctgaaaattcttctttggcacagcctttgagtattcagaatgctggacacggtcttgtaatgccatctgtgctcaactctcaagctaatgcagatggtcagatgcctggaaatcagggtggcaggtctggcagtccatacccagaggagtcccctcagcagccagttgataagcatgaggcacgctcacacaatttcaatgataacagcacaccttcagattacatggaggatgatcttctacccccctcaaagcgggcaagatcagattgtatttcaaatctggaagatcacatggaagaaactatacatgtttatcctgtggaaaacagacaaatttctggtgaaagtgtgcaggactatgagcttttggaagcttctttgagatcaaggttggtggagagatttgggaagaaatcatatttgaataattctggagaagccactgaagaactctcctttggaaaagtatctgagattgagcgtgagaaggcatatgtgggacctctgctacaggaggctgatgagaatgttatgacaaacattgaaggttatacgcatttctgtattccccaagtccattgtgttcctattattgacttttgcgttaaacttagtgatggcctacgtacatgtcatgcatcaaaatattgccagttgccatcatactggagatctagcatgttttcatctgttaaattaatcagtcatcttgctatctttgcaataactaattactatggccaagctcttctaaacacccaaaacatggctaaaattggtcgattgaaataaaattgagtgggcattaaatcctacaacatacagagtagttctttatcttctatatccatcacaactggaggacatgttgagtgtatccttgcatgttaattaaaaatgtggataagtatggcatgtctttctacagtttaatgacatgaggtctattgcataggtatggtggagcttgggaatgatgcacatgaaaagagagctgattctagcaatgcgccttcaattggcaactatgatcatgaggaaaatatttcctcttttggagaattatgcatgccattgagcgtgactcatcccattattccttcttcagctccacaaaatgctgcaagacacatgaagggtttatttcctgatttacacaagaaagcttcagactacaaaaatgactgtcagaccagcaatgcagcctctgtagcaacggttcgtttgccagatgttgccaaggataatgctaagatgcactcaacaactagaaaggatatggacattgtgagtggtgcggttgatcccttctggcctttctgtatgtttgagcttcgaggaaaatgcaatgatgaagaatgtccatggcaacatgttgagcatcatgcttggagaaagtcaaagcacacaaagcattcaaagccctcattttcaggtttgttttatgttcagacaatattaatcttgttgatgattgattatggtgcatacatgtatggttttcatattatgtttgctgaagtttctacattaatgcctggaattaatgcagggtggattccttatggtctgtttcagcatattctgcccgtgccaacttatcgtgttggttcaaatcttattagggctgatctgaacttgatccagtcggtgttggctagcagcatttggcagtattggcaaagggggttttgtgcttcctttccttttcctttatctgttcaaagggtgcttccatcagatgctccatccttacaggctggtgatgattcgagtgcaaattttgatagggacagacaactattgaatcttcgaatgctggatagtaggaaggtgggtaggattcgtcatatcacagttatcgtcagaattgtgggagttatcagtatctggttctccgctctgaacttatcctttcaagtttgctgtcctgcctaatattgtgatggctctggctaactcttttcggtgctcaatttgtgttagtccactcctttcattcttctccttgcaaaaaaggaagatagatacagatggaattttgcacccaaagtggacaaattattaaatttgccattgatagtgttcttatttgccacatctgttttcttagtagctgaaactcatgacttgacatacttcctgctagtttcatactatctagtttcttgccctattctcttcttatattttgactagtgttatttaactttgtgtgctgtagaataagattgtacagggatctgttgatgctgaactattcttagaaggggcactaattctgtattttggaaaaatcaacaaacctgataggctcaaggtgatcttccccgttgagtgttttgagatgttctagctctttcaagtttcaactttcaacacattttaattgggcttcatttattttctacctgcttatctcaaaatattcatcctgcaggctcttttatatctagcacgtgctattgaggccgatccaagcacagttatcttgtgggtgttttatcttcatatttactatcaaaaggatgaaggactagggaaagatgacatgttttcccatgcggtagactattttatcaatcttttgccgatcggttcacaccctactatgaaagtttcatagtaaaatgcgtgaactgttaatacttttttcttttgtttagcctgcatgtcctgttttacttttatgtgctgagtggttggtctgctcaccttagaaatgcaaaaggctatatcataatttcatttaatttcctacactgtttcgattccatactcagttcgttcatttataaacacttgatgagccctttcatgctatgacacgcttcaactgaagtatgctcagtgacggaggtttgagcagtgaaaggcttttatgagtttgtattcactttgtacttattggacaagacataactagatggtcaactgagaaaaaaaaaactagttggacttcttgtcagaccaaaatattggaccattggtagcatgagcattattgtatttctagaccatgtaggctatgacacaatgtatatttgctttagtttgtatcatcttatactaatattatgtggtctttgataaaacatctacttttcttccttttaggttcaacacaatgtttgctcctatgaactatggcttatgtacattaacagcaggttgcgctttgatgatcggttggatgcttacaatgatgctttgagcatgctctgccaaatgacagctgtcacagacatggaattgaaagatagaagttcttttgtcctagatatcttgttacagatggtttacttcttgtgcatgtctggaaatgtggacaaagcaatttccaggatttatgggattctgccgactgcaactcccgactgttctggtgacaagttgctcgctgatgtcatttcttgcttgaccatttctgacagatgcatattttggatttcctgcatatatgtctcaatttacaggaaacttccagaggaaattatagatcaactggaatttcttaaggatttacctaattcgttagtatggtctcctattgaacttacagtagataacagaagtcagattttagtactattgaactatgctgctggtaagattgctgtagatattaatgaaacggttaaaaacggggatccatcttacctgaggctctcacaattcctcgctgttaaccacattaattgtctagctactcttgaaggcttccaatcttgtgctaatctgctggtgaagtatatggaggagtatccaatgtgtcctcatattcttgttttctcagctcggctacatagaaagtacggttcatgtcctggtctgaaaggatttgatgaattgctcctgggttggcctaaagaggtgcaaggaattcagtatctgtggaaccaatgtgctgagcatgctctggcagataatatcgagctagctgagaagttgctgactcgctggtttgaagaatatggaaaagatggtgatattcaaagtggtggtgctactagaccaatggagatcagcaatgaagagtctgtacggtcatcagtttcctctatacaagaagttggttctggtacatctacatcagaggatcaaatcttttggctattaaacctctcattatacaggacgatagagaacaatctacaggaagcaaaagttgctatggacaaagcattgaagttagcacatggggagagctatgagcactgtataaaggaacatgctgcaattcacacactggagaaaacgtcatcatctacagatgttcaaactcaagcaaccttcagtcttatcagtggttatcttgtagatcaacggaacttgcccgtgagggatctgctgtcaagaaggtttatgaagaatgttaagaagcacaggcttaagcggttgatagatgagactataggcccaacttccgcgaatcctgctctgataaactctgtcctcgaggtgtgctacggtccatctctccttccagaaacgataggtgaagttaagtacctggtcgattttgttgaatcagtgatggaggttcttcctgcaaactaccgtctggccttggcggttggtaaattcatggttaagcattgcacaggtgatgactctatttccatgggcacccgattctgggccagctccattctgatcaacgccattttccgagctgttcctgtcgcaccagaatcagtatggttagaaggtgccagtctccttgagaaacttcaggcagcagagaccgtgaagagattctaccagcaggcaacctcagtctacccgttctccttcaagctatggcactcttacttgaactcctgtaaggccagtgggagcagcacagagagcatcgccgaagctgcgaggcaacggggcatcgagctgagcgtaacgcctccctagcaggggccctcttggtttgatgacgtggcgattcgccaggtggagctgtagttagtgttgtgtttactggaaagtgagagtagatacacccggtggtgatggggcgactggataattttcttcttgtttaggcacaggtttagtgacacataggcggtggataccaaccataccatacatcacagcagctgctgttactgatggtgtgacttatggatcaaaaaaagaggatataggcatacggttttgcatgcccccacagagtggagttttggctgactcgagagtatgatgtttttgtaggcagatttcttgatctgtttcaggtttatgtttgtttaccctgttgcagtgtatggcatgcacaactgttgtttttttgaaacattatgatcgatcaatcatgaatgtgaatgagaattttgttaaaccattgcgatgtgtttgcatctgaatccatagctgctgcatcgaatttttgttgattcgcgagctcatgcgtctcatttttgttttcatagcggattgctggtgttaaatagccgaatacaggggtcggtgtttccattaccgacctttgtttgctcggctagtggactcgattaatagtcagatttcttttaggcaatgattttcaaatgttcacatagtttttagccagggacgtgtttatttatgcataaacctaaggaacagaatgtacatttttgttagtactggcactgtgattcctccatcaaattatcagtagtacttcctctgtttaacacattataaagatccacatatgtgcttataatgtggaaacagtggaatcgaagggagtagaaggtttacgcaaatttttagtcaaattttgtgaaatttagtactccctccgtccctaaatataagagattttggc

SEQ ID NO: 18478 - DNA, 8005 bp, Oryza sativa
cccactcaagtactctactcacaggtaacctctcccctccattttttatcgatccatccatcgctcgctcgctcgaacgacgccgcggcgcgatcaagatcgcacccacttcacctcgatccgccactccggagaagaagcggcgcggcgcaccgatcgatgcatccgctggtgggggcgctggtggcgggggcgcgggagcggtggtggtgccgcggggaaggcggcgcggcggtgcggcacgcggtggcgtgggcgggggcgctggcgctggccgtgtccgtggcgtcgttcgcgccggaggccgcgttcgtgtgggcgcttaccggcggcggaggaggcggggggagtggggagttgtgcgcggcgggcgcggtgcgggtgccgctcgacggcgggggggacttcgtgtgcgtgccggcgaggatggcggtgcggtccggcgccgacatgatcgtgcccccggcgttcgccggcctcgccgtcggcgcctccgcctgcttcgtccgcgccctcgccatcggccgccgcctcgacgactactagcgatcgaatccgccgccgccgccgctcttctcgtcgacgagatcaacggcatatgctctcttctctccgcgcttacaaatacgcctcctactttacaaggcgtatttctattcacattttcttcgctcacaaatacgccttctatcttggaaggcgtattttgcttcacattcctttcctgtaatctgaaattctgaataatttacttacaaatgccggcaatctttggtgtaatcacaagattatcaaacaagaccatggaaaatgtgcacacaagctgcaatttctgagtgatgattcgtagtggttacacagaaatcaccattttcaaggcgtattttgatttcacatttttcttcggttacaaatacgccttccaccttggaaggagtactttacttcacattctatttctttaatctgaatttctgaaatgatgtacttacaaatgctggttaatctttggtgtaatcataagatcatcaaacaagaccatggaaaatgtgcacacaatgtccagtcttttgcatacagattcatagctgcctagttggttacacagaatttgccattaatcatcactgtgttgtatatgtcaaattaacttgtattgataatttctcactgtaaaagacctaattaagcagctatctctaagatgattacatgcatgtttggtgatctacaacactactatcatgtactaggtaagacttccaactccatcaccttttagatacataaacaattaggtgtaggtatccacacatcattttcaggaagagatgactgaatgtcacctgaaacatagaagctgctgagacaggacaacaggagcatatttcttctcctgtcaagtttttttttctttttttcttttcctgcagtgatcactagacactgctttagtttccaagcatgacaacaacaagtgctccatagcataggagcaattattcaggagagaaaaaaaaaggctgtttgtataatgcctttatccaagatcttgtagtccataattcagaggtgctgctgagataggtcaatatgttttttttcttcttctctagtcaagcatttctttcttcctgcagtgatcaactagacactgcttaatttccaggcatgacaacaagtgctctatagcataggaggaattattcaggaaaaaaacacaaaaacttgtacaatgtcttatctgagaatctgtggtccttaggatgtaccgtgaggtatcaccacacttcaattatgcacatatataccatcatcaaccccaattcaacatctccatctcctgactcccaaaaccaaaggaaacccagcgattttcattgtttaccaatgaacaatgcttataccaatatgagtccattgggtgatcaaatcctggccgtccggtttgtgcccggggacggccgccccagatcgacggccggcgaggcgaccagctgggtgaagctgatgggctcggcgtagcgcggcgagccgtggaagaaggcgtggacgcagttgtggtaggcggcctgggtgccgtgcaccttgtcccagaagatgtagttgtcccggtccgggcacaggtgggtggtcgccgagcagtcggcctccgcgttcagcttgccgtctccgcagcacgccctcgccacctccctcacccctgttccatccatccaaccacacataattaaaaagataaggtgaaaaggagctaaccacagtggccctaatcacgaagataaaggaagaggcaaaaatcttgggctatggcaggagccaaacgtctagctgagatgttaccgtagacccggaccattgtgctgtaaatattactctttttcgttacttgtaaatttgcccttctatatccaatgaataggcaagctttgcctttcgttcaaaaaaaaaagataaggtgaaacctctgtgttctttttttcttttgaagtgaaatactgtaggaaagaatcctgaaggagaaagctctgtctggaacacaggaacttcgtagaagttttttataggaaagaaatgtgtatttttattgaagtataaagtgacttgtctatccttcgctatcaaccaaaataaacttctatttaaacttgttaatttaatggcgggctaatgataaatatttctgaatatatattaagatgctctcctggtttcaaaattatctaagagtttcttttatgtagtttatattgcaaaatgatgggtctcctatgaatttctaattatgagtatgagaatcgaaagacatgaagattctcaattctccatggcatctaggagatggataattttttagaaacaagaagaccagaagtatcttactctctattcactaccatttcacaaacatcttcgacttgtaacttaccagccgaagatggattctttatcatgtcgtagaaggtgtagtaaatgctgccgatggagtacaccaagtccggcatggaggctgtggcggcggcggtcatctctcgtcggaggagacggttgaagagccgtgcctgccagttgtcagtgccactgcatgaaccattttcaatggggaccctggagatcggtagacaccctagaggtagcacgtcaagtatccccagcctccgagcccctagattgtacagtgtctgcatcacgagcaacacaacatgaacatctttttaaaaagaaataagatgcatatatgttagactgacatgtttccccctccaatgttaaatgcaagtcgtttgagactgaattatcgacaatggaaatcaatcaatccaacctctacatccagtaagttgtttgagactatagtcaatctaaacagaagttgctaaagaattttgagacactatctaatttaaattttgattatatcctttgtaattgaaggcaaccgctcttattttccaatacgtgccaatagggacttctttggaataaaatagttttataagattttcacaagaattggttgttcatttccaccaaaatttccacaaaagttatccattccaatggaggcctaaacaggggggaataagaacatagtacttcttttcacaagtctaagagaaccttgttaggaaaaaaataaccgttgtttggaattatgaaagtacatatacaccttgatatgcttgatgtaagtggcaaccatgtgggcgatgaaggccggcgcgtcgctgacggggacgatgccatcagtgaaggcattgtagtcgttgccgccggtgcaggtaatgaacaaggactgggagagcaagttgtcgatgttctcaccgtcgacctcgccggcggtgatcattgcctcctttgttttggtgaagagcttgacctgctctccaaggctgattgtgccgttcccctgcatgtcatatcatgcaattgatcaaactatctgaacaattcactcaaaaaaaaatcgaagtatctgaatagaatagggatagtaatactgattgtcttttctcaagagaaaaagtaagaaaacaatttaattttagaccgttcgtttttcatcgtagaaaaggagcttttcgatgccttcctctgtttcattactaaagtaaaagaaattaatcaatattagtccatagccactagtccatatctctgttcttcattatgtaatgcaggtagaacagagtgttcaatttgtgctagactgactagctgactttagatttcgttgctgtactttgtaacaatctgtgatttatccattgatttgttctgtgcaatacaatctctgcttccaaatgggcaatcggatgcaagcatggtacccaactcatcagcgtgtgcataactcaatgcatttcaaggcacatggatggtgctgagagatgactccggttcattcgttgcagcaagaacaggatgtggtgtctgttcgttgcaggtgcactttttctgaagtttgggcctgccgtgatggagcgaaattggcaatcgaatggggatgccaaaggattgtggttgaaacagagtatcatggaattgttcaggtatggaattcgaagaaaggccatcgctcaggggtgtttctttcccctcgaggggatgtcccctcgtttcttatatgacattaaaataattatggaaactttttaaaaatatattgttcatgattgtaatccttcagataaaatacaacttcatgtttacatcccaagataagagagagagagagaagggagtaggtcatgcatcactaagcatcaaattttggattgggtttcaaatttcagtatggtatggccaacatcctttatatgattcaaaatcttcaaaaattgcataaatctagctgaattaatttgttctgctaaaagcaaaacagaaattccagccgttcttattctgtgaacgctattacttacaatgaagtcgaggatgccggatccgctggaggcgtagttggcgccgacgaggcctcgccggagttcgccgtctcttcccggcgtcgtcagggagaggtacgccggcgggctcttcttgaaccccacatgctgcgctgcaaatcaatatatatgcacatgcgtaataatttgatttttctttctttctttcgtcggtaataatcaaataataagagatccatacacataaaaaaattattcctctttttaaaaatatatatagatctttgatttatattttttggggctcaaataaatgattttctttttctttctcgaatatagaatataagcaaaaaaaaaaaagcttcctcagctgatgtttaccgatgacgtcggcgaggttgaagccgttggtgaagcggccaccgccgccgccgtcggcggcggcggcctcgggcgggaggtcgatgccgcagggtggctccggcggcctcggcgccggcggcggcaggaagtcgttgttgccgacgtccaccagcgagtcgccgaacacgtacatcgccgggaccgtctgccggccgaccccctcgccggccgccgacgaggcggcagaggcggcggccaccacaacggcggccactcgcagccatccagccgccgccgccgccgtgctccacctcctctcccccgccatggctgatcgatcgaatcagctgagctaccagcgaagtgatggtcccgagctcatcgattagtagctgagctgagcttaatgagaattgagaagtggcgaattatatttagttaactagtaataaaaacacccatgctttgtagtaatgaatgaaattaaatatgttataatatatcatattttaattaacatgttagtatgacttgtttacttatttatttaaatatatggtattcacttgtttattaaaaataaatataggaatatttcacaacattgagaaaatgccaagggctaatttgtacaaagtgtactactaaaagaatggtgaggtggaagtgcgaaagattttgatgtgaaacacgagcgagagagccgagagcgaatcaaaatcaagaattgatttgccttgttaatctcctgtggtgcagaaggatgtggggtagaccggtggagtgtgtgggccaggcattcagtcctatgaattattgttgctctgtgacgtttgttgttgcctgcctgggctggatagatagtacttcatcatttttaaaatatactttctgtccttctaaattatactccttttgttgtagaatgtaagaagttttaaaattaaacacggttattaaaacaataggtagaagttagtgctggagggttgtgattggatgagtagtagaggtaggtggaaaaaataaatggtagacggtttgtgattggttgtgaaaaaaatgttggtgaaggagttgttatattttgagataaattctgagggttaataaaatacccatgggtaaattggaaccatgctattataatttttcaaagtttaagatatgccatcggtaaaatacacatgctttgtaatgaataaaattaaatatattataatatatcatacttttatcaatatgttagtacgacttgtttacttatttaaatatatggtattatatggtattcgcttgtttattaaaaataaatataggaatatttacaacattaagaaaatgccaagggctaatttgtacaaagtatactactaaaagaatggtgaggtggtagtgcaaaagattttgatgtgaaacacgagcgagagagccgagagcgaatcaaaatcaagaattgatttgcgttgttaatctcctgtggtgcaggaggatgtgggtagaccggtggagtgtgtgggccaggcatttagtgtgaattattgttgctcggtgtcgtttgtgcaattgtgcttgccttcctgggcctggatagatactactcctattcgatagtactccctccgaaaaaaagaaaaaaaataacctagctaaacataggttgagtttttttagacgaaagcagtgggtcggaatttaatggatgtgttaggattttgagttagacagagtaagctactactactcagtaagaatttggaatatcaatttcaatatatgactacatgtttttagttttgtaattaatacctccattttttagttattatatttttacattatgtttgaccattcgttttattcaaaaataatttaaataaatattttttttattttggcttgatttatcaataaagaaactttaatcagtacttgtattattaagatttacataattttttaataagacaaatagtcaaagattgtaacaaaagttaacggtgttatatattaaaatatgagtgagaatctagactagtactactatttagggagctagaaattacgagagaagctataactaacaaaaactcttcaatcaagatcggactagatacaatcatacaatacactattattcttgttcttttcttttatagactgagttctaaactttaaatttaaactttcttgtttttcaaactgttaaacgatgtatttatgtgtaaaaattttctatataaagtttttttttaaaaagaaatcaaacaaatatatttttcaaagttataatagttatacttaattaatcatatgtcaatgagtttcccatgctgctaatatgctagtccgatatggagtttcaaacaaacccataggatcgttggcaaagctccagctccttcgggcctagccaaacagtttcaactccatccataataggagtggagcgagctaaagtagtcccacaatacgaactattgaggtgaagctttgcttaggatgtagttctatcaaatatgcccttagtcaccaaactagttgtctagcacacgtcttctggtagaattttaaatatatgttcattgaaaaatatagccgtacgaaattgtttcatcgtttactcatattttcttaacatgttaaatagtaatattttagtcattattattagtgattttgcgattttaaggtttaatagtatgtattctattttttttggaagggaa

SEQ ID NO: 18479 - DNA, 7595 bp, Oryza sativa
aaatcagtcagaattttgtctttttttgttacaactaaaatacaatgaatttgaagataagatttcacacgtaggtgtaatactattgaaaatatatgtccaattttttctaaaattttctgtgatatttgctagttggtgtgcgcattgcacatgatatgttcctttttagacatcatttatttgagagcgaagggatgctctgctgtgaaatttccgtgtatgaattgttcgttgcgtgtggataagcagattgtggttcacattctaatttctcccaaccggattttttttccacaaaccgtttgtggagtgacattatgataaacggtgtagtcatggcatgtagtgtgttgtcaaactgatgcattgatgagacgtatagaaaaagacgtgttatatacgcttttatgcattttgtgttattgatgccgataaattgggaaaataccaccgactagtttgacttcgttgagggttgagctgagattctattaaatgattgggaagtgtacagcgactatactgacaacgatcattggccatgttgtttgctggcttatatttagtttggaatttctttgttttcaaacagatttaatcaaatgtgcacgtaccgaagggagtaacttttttttttgtcatgaaaccacgtcaaaatagcacccatcctttttcagaacaaaaaagcagctattacaaacatatatatttgattgctgttagattggtacaaacaaccacggaacagaaacaacggtaccaaacaagatttgctacaaggccgacttcccaattttgaatgcaatcacttcaattcagcaaaaaaatcgctgaaacaaatggcagacagaggggtgttgtgttgtacatcaactgacagatacttcatttccttttggtttcgtatcgctcgtgcatacagtgtgtgctgcttaggttgttggtaacactgatgaagaagatgtgcggtgaaattggcaccactttggaattggtttctgttggacaaaaggatttcctcacgatctggtggtcgatggcttctccacaacaagtgtaagtaacaagaatgagccgaaagagatgatgagcgcaatggccatcaagataagcatggcttgtagcgtgatatttgggctcaggaagaagatgactgcgatggcacccgattgccaaaccctccactgtgcaaaagctgcctcctgcatttgacatttttccaaaataaatatttcagtatccatttaagcatcagcaattgaaatgtgattcattatatttttccgtcatcgataggaagaatgctactgtgcagatgaaaagctgaagaaaactaaaatgagactaccttgacatcctcgaacagcagcccaagtaatgcgcttaactgtgtatgtaagacaccatcaccaacaccccataaagcacctataaacagtggaactgccgcaccaagcaatccacccattggactgtaggcagtagaaagatgagctcattgtgataccaatggcaagcataactgcagaagaatggtacaacagcacaatgatgattcatgaagccaaacctgtaaaaaagaagtaaccagaacaggactacagcatgaagaatagctccaaccgaaacgatagatgtagctgaatgaagcccagaggtcaaacgtccagcaaccaatgcacactgcagtgtcagacaaccatcaaaagtcagctaaaacataaattatggcattttcaatagtttagcatgatatagattagttatagatagctgggaaacaagatatgccatactttcacaaagcaatagcaacagtaggaccctagggaaacgataatctagagttcagactgaaatgccaccaggatagtgctaacaactttagtgatttaaacttacaacagcatcggctgcaccatatattgccatggctccgccaactccagagacgccaagaacaggtgttacaatatttttagtgaatacagccctaaaaattacacagcattatctcacagaaaaaatattaataaatcaaacagcaaaaaaatgtccaaaagcaatttgtgctactaagtgcttaccatacaaatgccgcttgtaatcctgaatatactataagagggatgataagaatcatccttcggtccttgagaggggcaacaatatacttcatcatggccccaaatgaggaatgtgttggagcagtatttcctttctcatcccttttggaaagtaaacacattaatacaatgccgacaatcatgcagccaagaaacacaacaaacagcagatttttccccgtgacacttcatcctggagtaacaaggaatcacatggacaagcatgattgttattaagaacataaaaggtttcaaaatttatcaaaagtcatacagaccttaactagtatattgatcaacagcttgaacaaatacttttgagggtttagacttctgagtattgctaacctcaggagtcaggacattttataatagttaagtccatgggaaattagagtaggactgctaatattttagatatttattttaaaatgtacatctaaatgataaacattaagatttattttcggtagtgctcattgtgattcttctatagttgtcttgtagtgtgctgcaatatttttgtttgcgatcattattttgttacaactaatatactgatgcattttgagacaattttggcataatgtaaacctagcagaattttgaattgggtatagaggtataacagaagtttccaggatagaataaaagaaacaatgggactctccggttaatatcaaaactatattttctcttactacaacaaatcatgatgctaaaagtacatctcatgaagctcactttagttactagttagcagtacacaaatcacaatacataacaaatgacagtctaggatattctaataagacatgagaagatcaaaattaagatgctaacctttccatctctcagtagtgcaagagagatcagatttccgatgacctgcataattcgaatgttgtattaagtcatagacaccttgtatctgtagagcccacatgtgcagaaagaaatactagtagacgctgcgcttgtggtatgaagaacgaatactaaaatatgtcttggcaagttttggtggagaatagctttgtacgagtacgaccagtcgaccatacctgtgtgctagcaaacattccccagaactctccattgaagttccccaaagtttggccttcaggcaaattattgtctcttgcatgactgagggcagcagacgtgagatatgtaccctgcagtgtgagatatattatgtgagctggattactggatgcaacagaagacttcacaagctcactggcaagtaaatacctgcccaacccagatgatcgatgcagaaaaacccagatacagggaggctggcaccattgtgtacctgacaatttgttgtgcaaattaacatccatatatagaatctcagcataccttaaatataatgtattcatttttaataatattttgcacagctgaatcatttagtagtatattagaaagcacatcaactagggccaaaatccatcggccatccatatcttttgagagtgctatatataaaagaaaatgaaacatgttgctggtaaatagtctagtagaaaacttgtcgatagttttaactaggagtaattcgctacatgtgctacttcagatttcactctcagctacaccaaaaaagggtaacacagcatttgattaccagaaaatggaaatgccctccgtccacaaccaaacactcaaaataaactggtgagaccgcatcccgaatcaaacatgagctacacactacaccgccaaattaagactatatgatcgattaagatcagtaataccagtgtctgagcgaaaggagcatcatatcaacacggtctagctagctaggcatttcatcaaacaggcgtgaggcatccaaaccagcacgcccaattaggcaccagcgctaccatgcgcgggacggtccatgtgaaaactcaaaaccatgcgattcataggcgagcgcacgcaccatgtcgggacgaggttagcgaggatgaagatgacgtagccgctggtgccgacgacgagcgcgcgcttggagccgagccacgtgaccacgggcgacgcggtcaccgcgaagagcgtgaaggaggtgtacaggatccccatggacaccgtgcccaggtcgccctcctgcagccagcatcacccacggatcaggaaaggcggcgatcgagatcagctcgagaccgatcgccgacgacgacgaggacgacgagagatgcacactcacggtgttgaccgagctctggaggttctgcgcggcgcagtaggcggagaagatgaagaggaacgcggcggagaggacgtgcaggtcgcccgcgtggctccagcggtggcccgagtaacccaacggcgcgacgccggcgaggagcggcgccgtggcacccccgtcggcgccggcgccggccggccgcctcctcatcgccttcgtcgtcgcggtggtggcctcctcgcgcgtccatggcccgcggcggcggaggcggaagcttctagaagcgatcgatccgcgcggcttgagggttgaggcgggaagcttcttctagaaggttttttttttttatatagatagaggaggagacgaggaccggcgacggcgaggagagtggagcggaggcggcgaggtggggcccacatggcggtttgtacctacctgcatgtggggcccacatggcgtttccttcctgtccccgcctcttcttgtcacttcgtcagtggccttcgaagattctttttttcttcttcacttctatttttcaaatatgttatttgaatacggagtatatggtattcacttgtttaaaagaaatattaaaatattctataatattactacatccgttcaaaaaaagactgcagttttacatattttcatatccaacgtttaaccgtccgtcttatttgaaattttcttatgattagtatttttgttgttattaaatgataaaatattaatagtattttatgtgtgactaattttttagtttttttataaatttttcaaataagacggatggtcaaatattgaacacataaaccctcaactgcatttaaaatgtgacggaggtagtaataaaattttaagggctaatttataaaaaagtgtaaaagaatgttgaggtggtagtgccaccaccatatttttaaaggagtatagattttgatgtgcacacgaacgagagagccgagagcaaatcaaaatcaagaattgatttgcgatttgcgttgtttttcttgttgtggtgcaggaggatgtggggtagaccgatggagtgtgtgggtcccgttcgtttccactacaaagagtggataaatttttggatattcgtgatattttaaactactaaacggtgcgtttcgtgtgaaaactttctatataaaagttgttttaaaatatcagattatttttcaagtttgtaataattaaaactcaattaattacacattattaccaccttggttttgtgtgaaacacttaatctttatcttcatcttcatctttagaagattcaaacaccacctgcgttgtttttttctccaacaaaagttggataaacttttggatactcgtagcacgtttttcaaactgctaaacggtacgtttcttgcgaaaacattctatatgaaagttgttctaaaatatcagattaattcattttttaagtttataataattaaaacttaattaatcacacgttattaccacctcgttttgcgtgaaacacttaatctttttcagaagattcaaacactaccttagtgacgccgataatttgggaaaatattgacttcgttgaaagttgagcagagattttattaaatgattgggaagtgtacagcgactatatcgacaacgatctttggtcatgttgttttctggcttatatttggtttggaatttcttgttttcaaacagatttaatcaaatgtacacttctggagcatcgtttcgacatatttgcaaacgaaaagtaatttatgaataaaacttttatatacgtgttcttaacgatttaaaagcaaaggcagaaaaataaacttcgatgaaaaaaaatctcaaaatcaactctaaatttaaggttgaaaattcaaattttgactgataagcataagcataagaaaaagatgaggcccttcatatattaatgaccgaaggagtaaccttcttctttttttcatcaaaccacgtcgaaataacactcatcctttttcagaacaaaagagcagctattataaacatatatatttgactgatgttacatttggtagaaacaaccacggaacagaaacaactggaggaaaacagattttgctacaaggccgtcactctaattttgaatgcaatcacttcaattcagcaaaaatcgctgaaacaaatggagtcagggtggtgttgtgttgcacatcaactgacagatacctcatttccttttggtttcgtatcgctcgtgcatacagtatgtgctgctttggttgttggtaacactgatcaagatatgtggtgaaattggccccactttggaattggtttctgttggacaaaaggatttcggatttcctcacgatctgacggtcgatggcttctccacaacaagtgtaagtaacaagaatgcgccgaaagagatgatgagcgcagtggccatcaagataagcatggcttgtagcgtaatatttgggctcaggaagaagatgactgcgatggcacccgattgccaaaccttcaactgtgcaaaagctgcctcctgcatttgacatttttccaaaataatcatttcagtatccatttaagtatcagcaaatgaaatgccatatattatatttttccgtcatcgataggaagaacgctaccgtgctgatgaaaagctaaagaaaactaaaacgatattaccttgacatcctcgaacagcagcccaagtaatgcacttaactgtgtattcaagacaccatcaccaacaccccataaggcacctataaacagtggaactgctgcaccaagcagtccacccattggactgtaggcaatagaaagatgagctcactgtgataccaatggcaagcataactgcagaagaaaggtgtaacagcacagtgacgattaacgaaaccaaacctgtaaaaaagaagtaaccagaacaggactacagcctgaagaatagctccaaccgaaacgatagatgtagctgaatgaagcccagaggtcaaacgtccagcaaccaatgaacactgcagtgtcaggtaaccatcaaaagtcagctaaaacataaattatggcattttcaatagtttagcatgatatagattagttatagataactgggaaacaagatatgccatactttcacaaagcaatagcaacagtaggaccctagggaaaggataatagagagttcatagtgaaatggcatcaggctatgctaacaactttagtgatttaaacttacaacaacatcggctgcaccatatattgccatggctccgccaacgccagag

SEQ ID NO: 18480 - DNA, 5147 bp, Oryza sativa
gagaggggcaacaatatacttcatcatagccccaaatgaggaatgtgttggagcattatttcctttctcgtcccttttggaaagtaaacacattaatataatgccgacaatcatgcagccaagaaacacaacaaacagcagacttttccccgtgacacttcctccatcctggagtaacaaggaatcacatgatcaagcatgatttttattaagaacataaaaggtttcaaaatttaacaaaagtcatacagacttttaactagtatattgatgaacagtttgaacaaatacttttgggggtttagacttttgagtattgctaacctcaggagtcagggcatcttataatagttaagttcatgggaaattagagtaggacagctaatattttagatatttattttaaaatgtacatctaaaagataaatattaagatttattttcagtagtgctcattgcaattattctatagttctcttgtagtgtgctgcaatatttttgtttgcaatcattattttgttacaactaatatatcgatgcattttgagacaattttgtaaacctagcagaacacatattttgaattgggtatagaggtacaacagaagtttccaggatagaataaaagaaacaatgggactctccagttaacatcagaactatattttctcttactgcaacaaatcatgatgctaaaagtacgtatcatgaagttcactttagttactagttagcggtacacaatatataacaaatgacagtccaggatattctgataagacatgagaagatcaaaattaagatgctaacctttccatctctcagtagtgcaagagagatcaaatttccaatgacctgcataattcaaatgtaaatagtcaaagacaccttgtatctgtagagcccacatgtgcagaaagaaatagatgctacacttgagttatgaagaacagatactaaaatatgtcttggcaagttttggtggagaatagctttgtacaaccatacctgtgtgctagcaaacattccccagaactctccattgaagttccccaaagtttggccttcaggcaaattattgtctcttgcatgactgagggcagcagacgtgagatatgtaccctgcagtgtgagatatattatgtgagctggattactggataccagagaagacttatcaagcacactgtcaagtaaatacctgcccaacccagatgatcgatgcagtaaaacccagatacagggaggctggcaccattgtgtacctgataatttgttgcacaaattaaaatccgtatatagaatctcagaatatgttaaacataaaggattcatttctaatagtattttgtgtacctgacaatttgttgcacaaattaacatccatatatagaatctcagcatatgttaaacataaaggattcatttctaatagtattttgcacagctgaaatatttcatagtataatagaaagcacatcaactagggccagaatccatcggccatccatatttgtatgagagtgctatatattaaagaagaaaatgaaacattgttgctggtaaatactccctacgttttttaatagatgacgccgttgacttttgaacacatgtttattcattcatcttattcaaaaattttatgcaaatgtataagatataaataatgcttaaaatactttgagtgataaaacaattcacaaaaaaaataattagataacattttttgaataaaacaaatgatcaaacgtgtgacaaaaagtcaactacgtcatcaattaaaaaactgaggtagtagcatagtaaaaaaaacttgtcgattgttttaactaatttgctgtatgggctctcagctacaccaaaaagggtaacagagcatttaattatcagaaaatgaaaatgcattccgtgcacaaccaaacacttacagtagactggtgagacgagctacactgcaccgccaaattaaaaccatatgatcgattaacaacagtagtacccgtgtctgagcaaaaggagcatcatatcaacacggtctagctaggcatttcatcaaacaggcgtgaggcatccaaaccagcacgcccaattaggcaccagcgataccatgcggaccatgtcaaaaatcaaaaccatgggatccgtaggcgaaggcgtcaaaacccaaaaccatgggatccgtaggcgaaggcgagcgtacggccgcacgcaccatgtcgggacgaggttggcgaggatgaagatgacgtagccgctggtgccgacgacgagcgcgcgcttggagccgagccacgtgaccacgggcgacgcggccaccgagaagagcgtgaaggaggtgtacagaatccccatggacaccgtgcccaggtcgccctcctgcggccagcatcatccacggatcaggaaaggcggcgatcgagatcagctcgaccgatcgacgacgaggaggacgaggacgaggaccgaggagggacgagatggcacactcacggtgttgaccgagctctcgaggttctgcgcggcgcagtaggcggagaagacgaagaggaacgcggcggagaggacgtgcaggtcgccggcgtggctacggcggtggcccgagtaacccaacggcgcggcgccggcgaggagcggcgccgcggccgcctcctcctcctcgtcgcggtggtggcctcctcgcgcgtccatggcccgcggcggaggcggaagcttctagaagcgatcgatccgcgcggcttgaggcgggaagctccttctagaaggccttttatagagcgggtagagtgaggtagcgaggggatgggaggggagcggaggcgacgaggcgcggaggcggaggtggggcccacatggcagtggctcgaagccgcggggtttgtccccacctgcaggtaactgctttggcgtttccttcctgtccccgcctcttgtcattttgtcagtggcctactggccttggaagatttttttttctagttacttccaatttttcaactaacaaggaccacttggtatcaggatagagatcagtcgactgcaccatgcctttgtcactaataaatgagcccgacgacacatcaggtccacatatcaatgacaaaggcacggtgtagtgggcagtgactgaagaggatcccaatcgcttggcataattggtggatgaagttcggcttcgtttacacaaatttttaaaaaacgatggtagaaagtagagatgtttgattcaaggtaaagttagaaagacaagtaatttaaatgagagtaaatcgtttttcctatcttgccgattgtattctcttatgctgtgtttggtaatgggagttagggaactctcccaaacaagtaaaatgaagcagtcccgttcgttagtcatgaaaagggtggattaaattttagattaaggttgcacgcttttcaaactgctaaacggtgtgtttcgtgcgaaaactttctatatgaaagttgttctaaaatatcagattaatcctttttcaagtttgaaataattaaaacttaattaatcacacgttattaccatctcgttttatgtgaaacacttaatctttatattcatctttattttcaggagattcaaacaatattatgagtatgcatgattttggattattggcttaggtatagtgtagactaagattcaaagactaaaaatttagacaaattttactacatggcactcaaagtttgtgtaatttgctaggggatatcgtaaaaacgtgctacagctgaaaaatactttaaaactagcaatttgctagaacacattttcaatccaattagagagagaactttttagaataacgagaatgatcttgagactctaaaatgatcctatcctaaaaacaaggatgagtccaacccatcttacctcatccccaaatcaaacacatgctaagctgcctgcaaccccagtgttgttatgctcttggattttttttcaaggatggcagtgacagtggcttggccgttggttcatatcctaatccaatgctgccgttggagctaaatagttaatcgcatccatttgcagctcaagcagtatcatacaatttgggggatcttctttgtcaggtgacgcatctgatcaaatcatggaactactaattaaaccatctgcctctccaacaaaaaaactaaaccatcagctgccgacgagattatcctactctgatgataatttgctccggattcgtcgcccgtttgagccaaaagtttcagctcggattcatccttactttcttggtgcaaaatgctgcagcttctggtcggcaacttggcagtcggcagttggcagtgggcaatgcatgttcagaacttcagatgaatcagatcgttgcgtttcaggctttcagctcggtcactctacttcttttcgttgcctaatgcatagaaacaagccgctatatgtgattcgcttatacttcatcgattcaaaaagagaagatatcacaattcacaagttatcggtatatggaaggactgcaatgaatttggagataggccatctagcgttgttgagaaatatccgccgaactgattcatctaaactttaggaaaggtatttttggtgtttcgaggctacgatttataagttgaagagacattggctatgtttagttcctttcaaacttccaacttttccgtcagatcaaatgtttggacacatgaagcattaaatataaacgaaaaaaacaattacatagtttgcatgtaaattgagagatgaatcttttgagcctaattacgtcataatttgataatgtgatgctacaactaatgatggattaattaggcttattagtctacatttaatacttcaattgtgtgtccgtatacgtcaattttttttgccaaaacaaataaacacctaaacatggccattatcaacattcttatagtatagacaggcaatcggatctttcaaacaaatgaagacacgtgatcaatgttatgaaaaatacatttttaacacgagaattttatgcttctactcttaccggtcacaagtcaaaactgagtgacaaaagcgataaaataacctaaattgtttctaaaattcaaaattggctacggctcaactgcgagtgtagataatcaagacaaatctttaatttaaacgcttccga

SEQ ID NO: 18481 - DNA, 3350 bp, Oryza sativa
gaggaggaggaagggatcgagcaggttggttaggttttaccaggaggggacgaggttggcggcgatgaagaggaggtagccggaggtgccgagcacgagcgcgcgcctggaccccatccgccgcaccaccggcgagcccaccaccgagaacgccgtgaacgacgtgtacaggagccccagcgacaccgaccccaggttctcgtcctgcaaccccacccacccaccagcaatgcaaaacaccaaatccgatcggattaatctgaatccatggaggccgcgtctgcgtgatcgatcgatcggtcgaattgaatcgattcggctaccgtgttgacggtgctctgcaggttctgggcggcgtggtaggcgaggaagacgaagaggaaggccgagctcagcaggtgcaggtcgcgggtctgggacgtcgccgccctcgccgccgccgcggcgccgcgtctgccggataccagcggggcggcctcctcctcctcctcgtcgagggccaccgcgagctcggctccggcgggagcgtggccgtcttccatggcggatttggggggaggagttggtggtggcgtggcttcggtgccaaactgcgcgagcactctgctctgcttgtgatttgggggaaggggggaggggcttgtttttctaaatttaaggtctacgaggggtgtttgtgataaattaagtggtttcaggagaatagcagatagtttagggggtctttgtgagaattttagctgtttcgtgtccgaagaagtccgaaccgcccgatgacaggcgtttgtttgttttaagaagagatagtagcttttacagggtgtggttagtttctgaaaaaagttgaaagtttgaagaaagttgggagtttagaaaaaaagttagaagtttatatgtgtaggaaaatttttggatgtgatgtgatgtgatggaaaattggaaatttggggtagttggggtgaactaaacacggccatagagagaaaaaaaaaacttcgtgaaatgatatttgggccatcttagtcacttaaatacggcaaacacaacatctaacctaagcccattttataggtggcaattaatcttatgtacttggacggacgggtatatagctataaatacaaacatatattttaatgagtaggtttcactgtaataaagctaaccaattgagctacgctcgcttcgttatataaaatggtgtttttgttgttaaacatagcatacatatctagtgaaataacttactcttttatctttgttcaagtaaaattttccatacgcttgatgtgttttgagtaagggtgaaattgaaatatgcatttttatagcttagccctttaagattgtcttggttgttggttgtttttgttgatacttatggacaagataacagatcacaagtagacatgtgcaactaaactatattgaactaatttagacttcactagcatagttgcacagaggaaaccattggataacctattcggttctgttggactctaattgtgcttttttgtctcttagtttttaaatcgtataaagattaaatttgattttatagtaaaaccaagtccatcttttatactttctctgttcaagtttaaatgtcatatatataaaaaaacggatctccacaaattgattgttacatttgcattggccacccattacgtctcgggtccaatgccctagccctttttggctcttgtgcaaaattactccgtcatcacgcattgtgcatcgggagtgatcctccactactcgttgtgttgcggctctacatattggatcaataaaattgacaacaatttttggttccaattatattgcgataatgtatctcttttctccatagttcgtcaactacaacagcttgcatgaaatggacaaccgtccacatgtagaaggtgtcatggaagtggagggaagcgagcaagtggacgctcttttggagagggagcgttatttcgctaaggtggtcgtatacgattctgcagatgtttatgtcgatgtcttggaggactacgtagctagtgacacgaaaattcccgattcccaagtcgtcgtagacgtacaaaagatggttgtcaccaaaagcgagctcgatagtgcgcatgtggtcgagagggagttttatggcgttcatatgattcggtgcgagtttcatggccaatacgaaaatacaatggcaaacaacatttattttcaacgcacaaatgcaatcaactaaaattcattcataaaatcagaaaaaaaaactgtagattcatttctatgaagacttaggaagaatgcaatcaaaggacaatccgtacaaaaccatactcgctcatcgaggattagaaagtatttgatcgttgacattgtgaagatgaaggcaaataatttccgttgatcttgaattctgatctcttacacagtccaataagagacaacctcatctttttcttatgcatatatttatcagctaaaatttaaattttcaaccttaaatttagagttgattttgggtttttttatcgtaaattatttttcagattgtgcttttagatcgttaagaacacgtatataacagtttattcacaaattattttccgtttgcaaataagctaaacaatggtcaatgggactgagaggaagaataagactgtctttgaggagaggagatagaggagattgagaagatacgcaaaacgagatgagctattagcacatgattaattgactattaagtattttaaacttcaaaaatggattaatatgatttttttaaagcaacttcttatagaattttttttaaaaaatacaccgtttagtagttcgggaaacgtgcacgcggaaagcgaaacaaaactcactacaatcacctagatcaccaggaaagaacacggcattagaatacgagaaagtgaagaaatgccgtaaacaccgtcagaaaagggtaaatcggcaaacgcgttccaccaaaaccctccacgtcagcatatcaacatccaggcccaacgcgcagaggatcccccgcaccagtcaacccaccctctatgacagtagggcccagcacgcggtggggcccaccccgcagtgaccgaaaagcctccccgtcattagcccggacagcgaccggaacccccttcaaaggcaccgccaatgccactgacaggtgggcccgtggttcatcggccccagatgtcagtgacaaaggcacgtacctttgaaggtagaggagcctcctgatcccccctcccacccgcacgccctcgccgccatgtcgtccgccaccgccgccgccaccgccaccatcgccgccgccgccgcgaagctcgccgacacccccggccccgccccct

SEQ ID NO: 18482 - DNA, 1669 bp, Oryza sativa
atagtgaacttcaaactatcattgaaaatgcttaaaaaatacctattatcatgatattaatcttaaagtacttcatgattggattgcaacctgttctttgccaacgccaatagaattatgatatggatgaaccattctttgtaatggagctgaagttacattcttgcatttcagcttcaaaattcacactggcgctgggctaatcattcctgaaatacaaaatgatggcaaggtaaatgccttttagttttttagttattgtttacttttaagcatgataatgccttttgaatttgaaggtataaaccactgtagtttgccattcacctccctcaatcgattttatttatatatctgccattatatggtttttgtttcttggtctgtataacctgcctgggcttgtatgcttcttgcaatttactagcaacatgatactttataccattatgaaggactcgcacaattgttcatagattcatttaaatacagaaaaacctcatgaagtcatacagtttacatttctgtacttctagttgccattttgttcttatgacttcaacttatatttcagtaagtatgccataacaactttcttaagtcatatggcaagcatgtcgtactgatggtttcagtctagcatactgttctagctcttgcaattttattggatgtgttaaaaggaaatatgttggcctgagctttcttagctccagtagtcttgataatacacctatcctgtcaagcgtaagccattaattgactgattcattcttgttgaatgtgattcccaaaaagtatgaaattattttattgatagatccacttgcatttatcttgttcacaggtaaaggttgatatgggccagcccattctctctggaccagatattccaacaaaactgccatccaccaagaatgaagccgttgtccaagctgatttggcagttgatggctcaacatggcaagtaacctgtgttagcatgggcaatccacattgtgtcacatttggcacaaaggagctcaaggtaattgacttgcaagttcatattctcgtagttttaaattacattctgtcaaaaccgttaatatgcctaaatatttcctatacaaatatgttaaattgttgcctattgattcatgtggatcttgcaattattcatttatggggatatcatggcttattaaaacatttcaatattttttatgtttccatacaggagtgcttgcttaggcccaaggtctacagtctagaactccagatcaatttaacgtgttttaatcctattatcttttgtttagtttttagttaaattaactgctgatcctaccagttggctttgtgatccacttgttcattaccacaagatttgctaatattgttgctttcacttccaataaatgtttgcactttctatgttatatacttcatgcaagcttgagaaatgtctctagatgcttcaatacgtgattgcctctgtttattggcccatatgttctgatatagccaacaagatccccctagcaaccataaatatttttttctgctagtgattaggttcctgtgttgtttgaactgtatatatcctagcctatccaggtccaggctgtccatataataatttattgttgtcttggctggaaaaacaggttttgcatgttgatgattt

SEQ ID NO: 18483 - DNA, 601 bp, Oryza sativa
gtttgtgagtggtttggagttcaccaccttcggagtgaaggaagaactaccccgagtgatcgaggcttgggtagtcctctccgtgggccggctcccgccttgcccaccccttgacgaaggggacgtgcggtggcttcgtggttgagcggtggagttgggctcgcctcaacggggagtaggaaaccggcgagtttccgaacctcggtgaaaaatctcttgtctcattgtctcatttgattgtcgcatttacatttgtgcaatttatatttctagagacacacttgagatcatatcaccctaggattgcaaaacatcgacataggagcgtgatttactttcctagagatatatttgagccactattaccctaggtttgcaaaacataacttagttgcttagttagagttcaccctcaccaagcctagcaacttaggttagatttgattaggtgttatttagttttaaatcgcctattcaccccccccccccccctctagtcgacatctcgatcctacaatgggtaacatatataagaaaattatatgaaaaagggagtatagtaaaaattaaaatgcctacggttaaagggggtgcaaagtgc

SEQ ID NO: 18484 - DNA, 11142 bp, Oryza sativa
ctgcccgttgctcctcctccgcctcggcgccgccgccgccgctccggtcctgtaggcgcgctgatccgaggttgggagcccagtctcaggacgaggcctagggtttcgtacaccccctcggctgctcggcggtgaggaggggggccgcggcgtcgctggagatccgatctccccgggctcggcggtgaagggggggcgcggcgcggaggttggctgcgctcgatttgggcggtacccccggaattcgagctccctataggcgaggaggacgaggaggaggaggaggagctatggcgtcgagcctgctcacaacggacaagaggttcgcgatccctcatcacccgccccgagccgccgccctcgtgcggtcgggcgattcaatttaattttttatttttaatcgtcgcgagcgggatgttggatgggttgggcatgtagaaatctgtgcattgttgcgaacggagagtttggttatgtttgtgtaatagcctgaaattataggaaaattttagattatttaccaccggtttgatagggtgtcacttatgctggtatatgaagctttggtttcgtttgatttgtgtggatagtagtttctggtggtgtgtaatataggtcatgtgttctttgggtggattggtccgatctagtgtttgtgggggcaatgggcaacggttgcgagatgttcagaagatggttttaccagtgtggtggcatgagaatgatatttaagaaaatgattgtagttatctattcgtctatgaacagagtgttctacttagtatttattcagtgtggacaatttagaaatgtgcagtgttcagtgttggcatacgtgtgttgtacacgtgcatgcatgaagtttgcgataactgaggtttcgtaccatgttaggtttcgtccattcgcagtaagcatgtctgaggaattccaaagcctatccaactgtccagttctataggtctactgatttcacttttgcgccttggtcaagtggcttttacgtaaagttggaagatttgttgtgacatatgtcgtcaagcacgatttggcatattgctgtcgtttggatttttggtctcagacacaattattcatgcgatttaaatgaaatcatcatttcttgtgtatgtgcttctttgttgatggcattttctaaaacgcctttgggtattcccgcggtttctttgcatagtagatgattatgcgccatcagtttaccattcaagactgtatattttattttatttttcaatagtattccttttatgcttgtgtactcaaggtagttcctttaattgttactccctccattcaactatataaggcatggtttacttgtatgcatgttcaactatataaggcacacactattttcagagtaatattttttttgctccatttcccctgctaacttggttctgcagcatagcatttaatacttcaaatgacaatttagtttctgttttgacgtgaggatctggctctttgcgatgaaatgcatgcagttgttttggcttcatagttattgcattgaatgtgcatgcgtgccatagtagttttcgcggtaggagttatgaagttgcatgtatgtaattaaggcactaattgggggcagtttagtcctttctgctggatcattgttctacgtgcaaaaagaaaactcaccttatatagctgaacggagggagtacatggttacgtcagcatttaagcagatgaggtactctatacttcattctttgatacattttgcagatgggctgcccctgcaaggaaatctggcatgaccgttcttggaaaaattccaaaacctattaatttgccaagtcagaggtattcgatttctatctggcctacccataacttgactttattgatttgtttatatgtgaactgattcacgagttcctcatgaaggttggaaaatcatggtcttgaccccaatgtggaaattgttccaaagtaagcagccctctttgttatacttatcacttgcttatgatttaatatttttagatatgcaatatgcttatttggagttctcgatgtttcttgtgattgctattgtgatgtgtttatggtatgtattttaggggcacccttacatggggtagcaaacccacacctacaaccccaaatgcatggaattcctcttcactcctttctcccaagaatgatggaagttccaattcacccagccactttaatggccgaccgtcttctggtggaggatcaagaccttccacagctggtagtgaatcccttgactcacctaatgcttggggttcaagttctcgaccatcgacagcatcgggcacacttccatccaatcatttacaaacaacaacaaatcgtcctcgaagtgcagagacaagaccaggaagctcacaactttcccggtttgcagacaattcttcagagaatatgaaagtatcaataagaactattgacaaatcggtaataaccacaccaaaacctattataactggctgggatgtaacatgtttttcatattattgatctgaactatgcagggatcttcatcacatggacatgggtttactctaagtaccggtgatttcccaacacttggctccgagtcaaacagtcaacgaggtaatctgcatcgtaagatgtctcttgttatttttcttttggatttataacattgtgctctctgacttagcatgttaaattcttaactatattgagcatgtggaacatagacaaaagctattgccattagaacagaactattttggccaattgcagtatttttacgaatgcgttgatgtgcgaatgttctctttacagtttacatccttttattctaggtcatagctctaagggccgcccgacttctagttctggtaaagagacagcgcaaaatgaacaaggaaagagcataacagctggtattactaattaaattgctttttcatcgatgataatgctcattgctgttggaaactttcaattgccttactgtgtggttggtaatgttttgtgtgctaggacctgctgaagaaatattgtcctccaatagccagtctgcggataacataaagacagatcagcatgtgtatgatggaggtgctcccttcccgggtacaagtctgccaaacaaagctcagcagccacagccttaccctggcaacttttgtgtggcccaccacattttgattcatggcatgcgcctccaggtcatcctcctgatggaatgtggcacagaggagcagcaccaggtgggccatacagaccactaggcccccctggtggtggtttccctgttgaaccattcgcttattatggtcagttccagcccagctcagaagcagcagcaaggcagggcccaggacacggtggatatcaacctaaaaatggagacgcgtatctttctgtgcctcctagttcctacatgatgaaccagcctgtcattccagttagaccagtttaccaaggtccaatgtcttacgacggatattatggtcctccgcgagcaaatttcaacaatcccaatgtgagagatccaccttttgttggaggtctcatcaacctggaatattaaatcaattccccaaccagcacgagaagttccatcctggacatcctcagaacagacctggcaaacatgaaacagctcccaatgagcatttcgaatctgatagagtacatgttatccagcgaggacagcctaggattttgcatgataacttaagaggtccccgtgaagtcgagaggaatgctcaacctgcaccaccacttcttccacatccaaatggaaataggattgatgtgaacaagaggtcagatataagagaatcctttaatgagaagaataggatccttatgaagtcagcacctgaccatagaggtccagctggtacaagccatttatctattccagaaaatgtacattcccacccccgggaagctgatgatggtactctccggaagaagttcaaggaagataattcagttgttcctgatcagcagcctgtcattaagaagaatgtggcattaatagagaaaatagagagtttgaataacaaagctagaaatgttgatgcacgtaatattacagaaccattcccatccaaacaagccaaggagatgcaaaaaagtacaagttcaaaggaagatcaggtgataaaatatggtccatctgctgtcaccactacaaattttgccaccatttctgtctgcctgcttatgtttcttatatttctcctatggtgcagaaactaccaaatgaacctgttcttgaaccttcacagtctgaattaactgaaatcatcacagctggaaagcttggcgaatcaactcgtgatcgaacacataggagaggtgattcttcaagaagcagtcaccatggttcttctaaagacaggttagttaataattttgcaggagaggggctgagagaaaattctgcagctgattcttcaccaattgttggttcgaggaatagccaacatgaacaacctcctgaggatgctttgaaactggcacctgtgatggtcactgatgacacttcactagattttgaatctcaggtatattgctgtagatttcttacttattttttcaatattgaagagcttatctagtaccttcctagttttcaatttcttaccatcacaaaagtatacatccatcattctactccagttttcaatttattgctgtagtttttaacaagctttctcaagattgactgccaatcagtgtagtatctttatatatctgttaaaaggattataatacttcatactaccttgattatcttttatttatagtaacacattccattgaaaaagagttgcatttttttgttcagttgactgtttcatcaagtttccagttcattaacctgtactgtcaatgtatttgagatgctggtcattcttcattttgcagtttaaacatagaaatatagaatcattgtctgatagctttaaattaggacatttactgctctactgtttgtttccaatttgccatgttacatgcttaggttaatcttttcattgttttgggttcaaattttatttgaaccttgtgagtacaaacataaaataatatatttaaatatataggatattctggacgctggcatggttctccaatatcaaactgtgatcattatagttttaaaaaatataaattatcatatcactatggaaatatttttttttcatgttaatctaatgaatgatgttttcccacggccatctaaatagtgtatatataattaaaattaaagaaatttgactgcatgctttctataatgtcatatatttctgaacagagcgcaatacaaagttatgtaccaatttctggcgacttgaaggcttgtagctatgcatgtcgcaaaactttgtattaaagttttttttcttgtccttggatgtgaactttttaccttaaaccgcctatagtgttgttgttagttacctacttgtgctgtatgtttttgccataattagatcagcatttagcaagctaccttgactgtagagttttttaatagaatgtagaattatttatagggatgcaatggatgaaatgttgaaaacaggcaactaataatgtaatatctagtgcaaggtaggaattcataaccatgttcttactgactatttttttattggttcttccattcagcgtgcaaaaatgagggagctggctgcacaacgtgcaaaacagttgcaagctgaggaggaggaacggacaaaacaacaaagagcaaaagctcttgtgaagttggaagaactgaataggcgttcatcagtacatcagaagagctcaaatgatgtaccaccagatattgctgatgtgcaacaaaagcaaaaggttggatttgaagagactgccaaacctgctaatttgtctgctgaatcttgtgatgtggcatgtgatggtcacaattctcttcagccaccaaatgatcctaagcatactgaattttctgtacagcccaagcctactgtgctaacacatactctaggtgttggtaaagaccctactattcataatactacaacgttggccaggaactcagagcatgaagcccagaaaggtgtagcgcaatcacatgacattaatgttccaaagcctaagcagggctacagaagaaggcaagctgtgtcagaggaaaaaaatcctagtgagaagtccagtggagcgataagcacggaaagtggtaagaaaattgctgaggccttttcaaacacttcaactgctgttgttacatcacatgatgacaccctggcccacaacaagaagagtgcccgtcactctagaaataagaaaaaggttgacgaagctccagttacttctaagcatccaccagtagcgctcaatgagcagaatgcagtcaaagtccctaatgagccaaaaccacaaactgctggtgttatcatcagtagttccatagttcctactgaaggtactgttgtcactgtgggaagtataatggtgggtggtatttcatttggatctttgaaccaggagtgtgtcaaaccgcaggagagtgtcaaaccggcagatgaagttcatagtagtacctcaaacagccacccaaaacgtcagcaggcaaaaagatcaggaaagaaccagcagtccatccagcctattgagagaccacatgggaatgagggcgctgtatgggcaccagttaagccatcaggacacagcgaacaatctggcgaagccatgtggagcacaggagtagttgctcccactcaaccagctgggctgaacaccaacgatggagagaatgttacaaaaacaaaaagagctgaaatggagaggtatgtacccaagcctctgtccaaagagcttcagcagcagaatttgaggcaaattttaccatcagaaaaatcctgtgaggagaacaagattcgtgacaaggaaatagttgaaaggtctactggtgctaaacctgagactgcacctgaggccaagaaatgggagggcaagaaaactagtaaggggcatggaaagtctcatccttcatggcgtagaaggaatacagatgaatcaactttggtaggaccaaaagctactgagctagcagacaactatcaagagtcacatgaacttcagaagcatactgtgcatcagccacctgaacctgacaagcaagcagatgctcctgccaggaacagttcagttccagctgaaacagtttcatcagtagtcactgttgccaaagaacatggtgcagctaacaagcaaaggcgtcagcatgttaaggctcagagaaatgagggaagtaactacccgaatgagaataaggatcaaatggcagcaccaccagcaccgggcattgattcaaactcatatgaacgtagaaacatgtcaagatctgatgtgaagcacagtggaacagtaccacaacctagatctcattggaaacctaaaaccatccctcagtcccagggaaattcgcatggcaataatgctaaggatgggcatgtggatagtgctactccacaagacagcagcaacaacaaccttgctgaaaacattggttggaacgatgaaaatcatgcacacagtgaagaagttaaaggagaaaagaggcatgtagacgattaccagaagagcgagagccatgaaaatgcagaacagcagcagcagcttagtcatgcgccacgccgacagggccaccacaatggtgggaggtaccacagaggaggtggcacaaacaggggaaggggttatgatgttgggaagcccagccatgtcacaaacgcagaaaggcggaggggtggcactcatctcgaataccagccagttggatcctataacaaaacagcagacttccagcagaacccaggtaccgatgagcgaaccgaaggggctccactgcacatggagcgcgtccacaacaggggtccacgccctgctggccagttggtcaataggaaccctgcctccaccccagctgctaactcttaccgagatgaataaataactatcctccaccctcaagatcgctaaaactgcaagctatctttagttgggtgatttacatttcgcagatgaatggagtatttggatcacaacctgacgccagtgactggtgtgatgcccgatgtcatctcgaccccgtcgtgtctaacatgttcagagattagcaggtcaaaagctatggctgccgttcgccgtctttgacggcggagagtagtagtaggatgtaatggattttgtctgtgcagggccgtttggccctttacgtgtgattgttaattgttctcaggagcatccctcccttgcttcggtgagatgtgatgtgatgttgatgttggaatgtactaacttggagttgattgagaaccggagttgattgagaaccggggttatattagttagtagtatgtaaacagaaaaaatagttcgttttgggcgatctgttgtggggattctgcaggacagactctgatattatcatatcatgttcatatcgtgtttgtgttatctggggaggtcagaattgagatgcttggttttattctcttaatagacatatggttcatgatcctggcaatttgcccaccagtctctgtggtaatataaactcattctgccaaatataggattgagtgggatcggaaatgatcacgtagatttgaactatcgtgatggagactatcttgacaggaaaagtattatctgcttgtattaaacgcaaaggtgagaaattttagttccaacctacaacacatacccaacctcctatcggacacaaatatttgtgcaggcaccggtgtctgatcctccttaaaaacgaccatcatccgcttagaaagatgacaggctagcagatttcaactacattattattactaaaataaatttatgttaagataaattggtttagattggagcgtaacattttaggccgcatttgcaaatttaccaccggttttttcaatattgcaaggatgccactcgaatgataatttcagtagtatttttgtaattttcgtggtagttttgcaataatgattcaaagtagtggtaaatttgtaattgcctctaatttattttaacatgtattcgggtctccttattttatttttaaaaaagtttatctctttcttcttaaataattaagctataacaggcttgttttcctcggctcccgtaaatgttcaatgattacttcgcgttcattaaagattcttgtaattttttaaggaaaactgagtcacggtatcaacacataattcttctttctactagtactgtacaaatttaggtagatcgccaccactgttggctagtgagcttttttgacataacttttagggcagtcccaatccatagtgtccataaacagtgtctatagtgtcatgtcaataagatatcacaatagaaactacactctacaacccatgatttcttaaagtgggccattaataaatacatcatctcttttctctaccaattatatttattcttcatctattataaagccactattctctcccaatgcaaaacttgatagtgtctagtgcataggttctcgtgttgaagctgtgtcttgcatgagacccaatttcttcatctattcactctctctcttaattaatatagtgtcacataagctaaaagtcctacatgacaatgtagttaatgccatagacaccatcctagatagagagttgagactgcccttaactattgtttttttaatggaacagttctaactaatgttagttgtgcaaaattactacttgttcagctagaggagcatgtttgtcagttgtcactatctctattgatatgaatagagtaccgccggctgtgatgcggatggagtaaaaagtattgacgataaataccctgcaatggactgtaaaatgccaagcatcaagtaaaaaaataggtctagctttggtctattatatgcaaatttaatcaatatatatagcatttacattgtttaagttggcttttttaaacaaaaaagcttcattttgtattgtacaccaaaaccccaatttttatggacggactttgatctcccatgatttaaccaataaaaaaaatgcagtgtggaatgtagtgaaatccacctagttgtaggaatctctattgtttatgtattcttttggccaaacaagaaaaaaagtttttccccaagatataatattttagacattaatcgattaacacagagtacaaaatgctcttacatttctgaacacagtgaaggagtagtaatatactttttttttctttgatgtggaagagcagcaagtaactatgatgtttttcacatgttgcctgacactagtatatggatacaatctctaactaacaacataatgctactttattattacttgtcaatatgtgattatatctacagaaattactctactaccttaaaaagctaagtcgtcctatctaatattttatccctaatctgctcatagcccatcgctacttatatgagttactccctccatcctaaaatatagcaacgtagaatgagatattaactagtacaatatgtccagatatattttaaatattatacagtaaggttctatctagtttttatgttgttatattatgtgacggagagagtaaaagttaaaaggataactatctgaaaatgttttttcatgaaaaagaattatgataatataatttttcacatataaataaatcccacaatacactttcaagattttaagtatacgctcagtatcaccaagcaaatatttcgagattcatcagagactttcagatattcagagcaatcagatattcagatccccatccatccaacccacccccacccacctcagctgccgccgccgccgctgcctcactaacgcctataaatacacccacccacatacgtcagcgcgcacgcgacccaagccgatccgcccgcacccgcacacacatcgctcggtcgaaggaggaggttctagaaacttctggaagcggcggaggtgtggggagagagagagagagagagagagagagagagaggcagagagccatggcgcggaagaagatccgggagtacgactccaagcgcctcctaagggagcacctcaagcgcctcgccgccatcgacctccacatcctctccgcccaggtacacca

SEQ ID NO: 18485 - DNA, 3177 bp, Oryza sativa
gggggggagggggggtaagggttggagttctgaggtgttttggactcggaggtgtgctccgattaggcgaaattctgctcaaagagggctcaatttcgtgttgtcaactggtgattgtagctgtggctgtagctgccggctgatgtggaagtatatgtgatttgttagaatggttagtacctggcaacgaaatctgtttgggtgattgggcaaaatacatttgaattggataaaatgagaatggggaattgtttacagcaatcgtacacttccactgctgctaagcttttcgcatatttgatgcaacctgcgatcatcggagcatcctttgtgctatgggatctcattagtggtatgatggtatgatgcttttgtttgtgggttggatgggtcatgtgatgcacaaggtgtgtcttagatctgttgcgatgatggtgtaaactctgtctgaggtattgctttattgtccttaccaaggttttggtttcggtgtctggttttcctaatgaaattccactgctggtaggtgaactggttggtagcttttgacttggagtgctctgcttttgatatttggttacctttcttttgatttttaaccataatggtagacgtttaatgtgcgctaccgaggtccaaagcttcatcttggatctgagattcaacatctctagtttgggttaggataatcttgctctgatggtgtaggctcatgttgaatttcagtaccatctatgaaaagctaagtgttgtcatatttctaaataccagataggaacaagcaatctattctgatttcctttgaactcaaaagcacactcagctgtgttagaatagctacgcttatgggtgaaaaagagtgaagttagttttgatatattcttgactgcattagcttttgttctgcagtagtttgtgtttaatagtgccgcaatccatgactaatttgaactgtactttttcttaggtcacggaatcaactgatttcacagagctcgtcaaccaagagccatggctctcgtctatgaagttggttgtgaaacccgacatgctgtttggcaaacgtgggaagagtggccttgtggccctcaacctagatcttgctcaagtccgccaattcgtcaaagagcggttgggagttgaggtagttatacattttcccatgctttgcctctaaaaccttgttagttataactattctaagctatccggtatgcctgttatgcaggttgagatgggtggctgcaaggctcctattacaacattcatagttgagccatttgttccacatgatcaagagtactatctttctattgtatcagagaggcttggttccaccattagcttctcggagtgtggaggtattgagatcgaggagaactgggataaggtcaagacagtttttcttcccaccgagaaagcaatgacacctgatgcgtgtgctccattgattgccaccctaccgttagaggtacgcttatacattgtatcaccttccccatgtcacgttgttttttttttaacatgttgacttttctcccattctggactcaattcctctagtgttagaacttattattgatgatacctattttggtctgcattagccatcttgtgctcatgtcattcacgtcttctgtctgaatttcaggttcggacaaaaataggtgatttcatcagaggtgtatattctgttttccaaggtaattcacagttgaaaaataaaaataatctggaattgttgttttccaagataactcagttcattctattgatcttctggcagacttggatttctcattccttgagatgaatccgttcaccatggtgaatggggaaccatatcctctagacatgagaggagaattggacgacacagctgcctttaagaactttaagaagtatgattcaggcttttttttttctagcttacatagtgtccagttcaatcctttcaccatgcttgtcatgctaaccagagcttccatggcataggtggggaaacattcagttccctctgcctttcggaagagtcctcagcccctctgaaagctttatccatgaactggatgagaaggtaacctcatatttctttctttcccctctgaagtctgctgcctgttagtacatatcacttaaatttggatacaaattgaatttcactgcctctgcatgcaaaatattgaatcttgaattgaggttgatgtaatttttcagacaagctcatcgctcaaattcacagtcctgaacccgaaagggcgcatttggacaatggttgcaggtggtggtgctagtgtcatatatgctgatactgtaagtctaactctatccagatcttttttaggttaagttttgaagtttatcagtgccattcacacactggacaatatcaccaggttggagatttgggatatgcgtcagagcttggaaattatgcagaatacagcggcgctcccaacgaggaggaggttctgcagtatgctagagtggttttggatgtaagggctccagaggaaccttttcggctgacagtttgatcattatgtttccgctctgacaaaatgatatttgaatctttgtagtgtgccactgctgatcctgatggccgtaagagagctcttctcattggaggtggtatagcgaacttcactgatgtcgctgctacattcagtggcatcattcgagctttaagagagaaggcaagtttcgattggatcgttgttctgtccccaaccactcccacttgttgccattaaaatcttcatccatcttattattgtctggcttccaaatctggtggcaggaatccaaattgaaggctgcacggatgaacatttacgttcggagaggtggtccaaactaccaaactggccttgccaaaatgcgtacactaggtgcagaacttggtgttccaattgaggtatggacctactggctacttactatgttcttccagcaaaccttagctcagccatttcctacactatttatcagaattcgtcagagattaactttattagacataggacaccattggaccatccccatgatcataacggacgagctgaattcactgaattgcaggtatatggaccagaggcaacaatgactggaatctgcaagcaagccattgattgcatcatggctgaagcataattcagacaactatttgcgctg

SEQ ID NO: 18486 - DNA, 2259 bp, Oryza sativa
  unsure (1)..(2259): unsure at all n locations
agaaagatcgtattgttagaataaactacatctgtaagtttgtaacgtaattacgcaataatgttaatgtttgtttctagttctgaattctctgtgccttggttggtggccttatccaccaaactcaaagagggttcttgattttgtcatgtatgagagacagtgaaatggagggcttagtgacaggaactgcgttgttgtggcttgattattgatgtagtcatatggtcatatattcatatacttcattctttttgccggacttttaatccaacttttggtcactgttagtgtttcaaatcacacctttgcctaaaggtcagatgtggtaaactggtaagagcaagtataataaaaggatgtgcataatatgtataaataagatataatatcatgattattaaaaccaaaacaaattaagattgcatggtattatgagaaaaaaaaaagaagagaaaatttaaaccatatatccatcattaaaatgctaaaaataattagggtgatgtggcttaatagataagaaagaaataagagtaactacacttagtaaggatgaactatatatatatatatatatatatatatatatatatatatatatatatatatatatatgggcatatataatgtagcaataggagggggtcttaagcctctaaagtagtccttatacactataaaaatagtccatacggtagtatttaggataagctctcaatatgcataatgcctacccataagaataaaaaataacaatactttctcttctccctcacatgtcatacaattaagtgggacaagtagaacccaggctaatgccttctcttaccatatacattgtagcaaacaccataactaatacgggtctcaccttattaccaagtactcgtggacataatacatcgagcatatgccctaactatataggattcccaatattttccgagtcgaagatccccaaacgttccggaccgttagatgacacaagcaacggtggatccgaagggataccgcagtagcccttcttcttcacggcagaggaatccaacatcccccggacgggacgaactgcagatcgagtcgcatcgcgggcgagagagagagagagagagagagagagagagagagagagaagacccggacgcggcggcgcacggcggcagccggagaagagcggggcgtggcggcaggcagcagctcgcgggcgtctcctccagtcttgctaacctcgccgcatggggatcggccacgtgctcggcgtcctcggcggcgccctcctcgcccacgccgcctacgccaccatccagtgtatgttgactgattcgccccccccccctccccctgcggttcgagtgattcccgccgcgggcttggatccgggccactgaggatgtggattgatcggatcggggcagtagatcgggtagggttggttcgcgtcgaaatttgtggcttgtatagtaattggtagtagtagttggggggatgaattggatggagaagggttgctgtttggtgggtggctaagttccacgatttgattttttttttgtttgtgcccgtttgctgcagatcgcgccgtgctgaagatcacggaggaggagttctcgagtccgcctatggatgtaagtgttcccccttatcccttcgcgatgctttcttttcttttttttttcggggtatgaatggttgattttctgttgcgtaaagctgtggtggtcaaaacatgtagtatttgggttgcttgatttgacagtgagtttgggggtagggtagatgatggccatgaattgtgtataactaaagtttccagatgacaaaaacaaaaagaaaagagtgatttaggttgtttgacaggagaaaagttgtttgttactatcaccgaatttgctttaagcatgccaannnnnnnnnnnnnnnnnnnncaagttatgggttgaaattgcggttggatgtgtatgagttgcactgtatgtttacgtaattacatgtgacccggttccaaattcgatcctggttgttctgatctagctgcctgttttattggcaacttgactctaaattcgataaattaggccttggggtgtctttgcgttgcataatttatgcttttgattatgcaggtgatgatgcaattgctcctggggttggccttatgcatgtgggcaggtcttgctgttccagcgaagttcctttcagtgctccctcactctgaggagaataggtaaacctgtttggagctaatttgttttcctt

SEQ ID NO: 18487 - DNA, 1086 bp, Oryza sativa
tgtgatacttggtagaccataagttggaaacaagaaaaatcttatttgtttattatgcaggaccttccaaacatagttacatggtatatgcattagaacaaaattattgcggcagaattatgttgctgaaacttattaattttgtgattgtgtaaagttggagcagtcataacacttgataggtaatgaatagaataacatatactgaataactatttgttgatgttcgtgcaatgcaaatcagaggacctgtacaaataaatatgtgaaatatttttggtgttattgtcccatgtcttctagtgataaattaatcctcaaagtttgtttatcttgtacttgatctccctccttttcagggcattagagtgttcctttttattcacaaatccttcaaatctaccataccatacctgaaattcacttattagcacctgaatttggaataatgtggatgatttatgggaattagatcttcctttttttccttttttttctagacctcttttgattcgctcccataatgcataatcttctttagtatcttgaagctttgagagcctgcaccagagctttttgtctgctcttatccaatagttgatggcttgatccacaataataccctgctattctgtactacatcatttctctctaatctgtgttaatgtcaactgcaggattgtttcactcccggctaacctggacttcatgatcttcaaccaccgcggaagggcgctaccttcagacccagacttgaagctgaagacatgattgaacatttacagtttctgttatttaccacagtaggatgatccatccagttattttttttgtgtcactcattgttgagggggagaaacatttccaagaacttaacgtctactatgtgtaactcaagtttttgtgtcacctgaattctatatctgtataccactcaatcttgtgccagtccatgtgaattaccagttattcattcactagcttgtgagagatattgcgatgcatggctctccatgtacacacatcacaattgtagtgttgtggagttcgcaaaaacacatccatttcagcactcaccagtcacca

SEQ ID NO: 18488 - DNA, 679 bp, Oryza sativa
gccctttacaatgatgtgaatggtaatttcttagcttgttgtgagatggttgcagaatttgacttggtaatgcaagaccaccttaggcacattcaaaacaaagagctgcaatatcattatcttagtcataaaattcaaaatgagttgagttctcttatggcttctagcattacaagctccatcataaagattgttaaagcgagcaaatatttctcggttatccttgactgtaccccagatgtgagtcaccaagaacaaatgagtttgttggttcgatgtgttcatatgtctgatgggaaaataaaagttggggagtactttattggtttcttgaaggtggatgacacatctggctcgggtcttttcaatgtattagttgactccatcaagtcatttggcttaatgttgatgatattagaggtcaaggttacgacgatggctctaatatgaaaggaaaacataagggggtacaaaagcgtttgcttgatataaatccaagagctttgtatatgccatgtgcttgctatggtcttaatctcactctttgtgatatggctaaatcatgcagaaaagctatttcattttttggaattgtgcagaggatatatgtattattttcaagttctaccaaaagatggaatgttttgcttgaccatgttaaagatttgactgcgaaatc

SEQ ID NO: 18489 - DNA, 2541 bp, Oryza sativa
aagtaaaggagcacacttctgaacatggaagcaacaaattttcaggattcatttggagttgtctcaagagaaaaataaagactcatttggagaatgggaatattcacatgttcgcagcggcggagccacctcgcgggctggttgggcagccaaccgggctccatgcaaacgtttccactatccttttgtcagcaaaacatgtaaaaaaattatcaatctctagcaaacgctcgttggccctgtttgatttagattattgagcgaggaattaccacagattatttagtcaattataaaagtaaattaaatattttaaaaaatgaacttaacaaataataaaaacaatgcctttggcttccggactcagatgatgccgttggctccgccactgcatgtttgcatatataattgaaatcgaagtagtatttcttattaaattcattagagaactccaatgtgtacttaggccttatttagttggggaattttttttgtttggttatcacatcggatattcacacatttgaagtattaaacgtagtctaataacaaaataaattacagattccgctaataaactgcgagacgaatttattaagtctaattaatctgtcattggcaaatgtttactgtagcacaacattatcaaatcattgcttaattaggcttaaaagattcgtctcacattttatacgcaaactgtgtaattggtttttttccatatttaatactttatgcatgtgtctaaacattcgatatgatggatgaaaagtttttgttttggaactaaacaaggccttaatagctgagagaaaaacaaatatacctaggaacaagcacatgtagtagatgttaatatttttttcccttgataaaattttcaaggaagctagttggttccttccctcggacagacagctaaagctggactggcactgcaaccaaaaccaaaccaaaaaaaaaaatcctcctatgtttacagttactaggaccagttattacagcttaaacctctaacttatcttacttctccaaaaaaaaaacaaagaaatgtatctttcacacaaaaagaattgaagccatgctgcattgctattacttgctgcgtgtcatcccactcagccgacctcgacaactccctcttgtgcttttgcttttcttttactcctcaagccttcccctgatcagttcttgatctgcactttttacattttcttttagctgcaaaagtttcaaactttctttttttttcccttttgtaccatggatttctcatttctctatactaaaaatgttagtagttgtggtgtccattctcacgtcacacctctactactgacatgtgggccctataatctatgctattacatcacctttcaatgcatgacccgtttcactattggttcttcccaaattttaaaatcacctacttattcaataaggaaaatcataatattacttaaactacataaatgcttattaattgattcaataaggtagaaattcaatttgttttccgttgcaacgcacgggctctaggctagtctttttaagaggtcactagactgatgacagtgaagctgcctcttctccactccactgcctatatatctgctgccctctatctaagtccattgccctctgagtctctgaaatcctgaagcttcttcttcttcttccttcctcctcttgctctcttgctcttcctatgctagcactctccatgctcttcttgcccttgtagcattggctccttggtttccatccatggatccacgctaaatgcattgcgaggctgcaaattggtagcattcccttccccgttgcatgtgctgcaactatgtaagcaggagtgtctgatttgacacgcctgaatacagcttctcagatcttcagttttgttgtttgtctgagaaaaggagagagagagaggcctcttttgggtccaagaagagaaaaatggaggagagcttcgtgcccctccgtggcatcaagaacgacctccatgggaggctccagtgctacaagcaggattggaccggaggattccgcgccggtatcaggtaaataaataaataaataaatcttatcttacattgtgttcttgatgaggagtaggattcctgtccggccatggtcccaagatcttgaaaagttactgtaaaagagggagaatatttttcgttgtttaagcactaggttcttgccccaagatcttgaaatgaagcaaatatttgttgtatgttttgtgtttaggatccttgcgccgaccacctacatattcttcgcttcggccataccggtgatatcgttcggagagcaattggagaggaacactggtaaatggagcagcaaaaaatagattgtttcttgtgtttgattttggttactggtaatgacatcaatgagcagaaaacattttaaaaaaagaataagaagcttattttgggtggtaatggttgtgtgcagatggtgttctgacagcagttcagacattggcatccactgcactttgtggcataatccacgggctgcaggaat

SEQ ID NO: 18490 - DNA, 640 bp, Oryza sativa
ccatgtgcattgattctaccttacagcatatagaaggtatggtgagttactttcagagctatagaaataatgggtttgctgatagtctggttgcagccacagaaattgcacttgaaatgggagtagagccatccttcccagtagagcgtcagtctcaaaggaagaaacaatttgatgaaactgagtacaatgaagctattttgcaagctgagaaggattttgaagtcaattattttttagttatggttgatatggcaattagttcattgaaaagcagatttcaagaactccagtcattcaatggaatattcggatttctaatgaattcaacatccttgaagtcattggatgcagctgatctaaaagaccaatgcactaaatttgcacaaactttctctttggatggttcctcggatgttgatataaatgacctaatttctgaattaggtgttatacagtttactttgccagataggccaatgtctgctatggagatttttgaatttgtcacagaagcggattgttatcctaatatttccatcgcttatcggatcctattcactatgcctgttactgtggcctcagctgaaataaccttttcaaagttgaaattattgaagaattatttgaggtctgtaat

SEQ ID NO: 18491 - DNA, 1082 bp, Oryza sativa
tgacaggtgggcccgtggttcatcggccccagatgtcagtgacaaaggcacgtacctttgaaggtagaggagcctcctgatcccccctcccacccgcacgccctcgccgccatgtcgtccgccaccgccgccgccaccgccaccatcgccgccgccgccgcgaagctcgccgccacccccgcccccgccccctcccggcgccgcctcacgctccgcgggaaccccaccgcgcgccgctgcgtcgccgcgatggccgtgtccacccccaggtcggccgccgccgccgcgttcctcgagcgccgcgagtcggagcgcgccctccacttcgtcaagtaccagggccttgggaacgacttcatcatggtgcgacgccttactagcgcttccatttcacttttcttagaaccgatttgttgcttcccttcaatttttttaatcccctttgtaatcagtcgcttcgtctgcacgaattagagcagtctctgctgctttagacgcggtgatttctgtatttttttgatttagtcttggattttttttcttcaggtggacaatagggattcggccgtgccgaaggtgacgccggaggaggcggcgaagctgtgcgacaggaacttcggcgtcggcgccgacggtgtgatcttcgtcatgccgggggtcaatggcgcggactacaccatgaggatcttcaactcggacggcagtgagccggaggtgagcaatccattgcatttctgcagtgcgtgataggaaatgtattcgggtgttggtgttttgtgatatccgtagtgattcgtcaatcataaatgcaatgtggatgatatggactaatctaatgttagcatgatcctcattaggtaggatagtggaaagaaagcgcaaaagctttgcacgttctcaacttctcataaagtttcttgtgtccctgaattgttaggcggggatacttagcctgaaaattaactgtgcaagtgtgtactagctgcttatagctctccatgtagattaggccttgtactagtttaatccacactcagaataggtcatagggaacttaagtgaaatctgctggtactctatac

SEQ ID NO: 18492 - DNA, 665 bp, Oryza sativa
ccaagctaaatcaaccaattagggagagaatctgttatgctggtcaaagcctcaaaggcatgtgcagaaactgaagagcacatggaagctaatggggatgtccccgaattctggctccagcggttctgatgttttgtcattggtgcaactgaatgttcttgtccttaagtcaaaagaattgaagtgcacaacaatatgaatgcctacttgcaaattggacagtatctgaattacttttttgttagccgaattcattccagacagttgacacttgcacatgtaagctcacatttctgttttcgatgcaggggcttgttgacgagttccgcatccctgagagggagaacagaaaggcattagagtttgtttcatcatggaggttcgccaacggaatgtttgctatcgtcttgtcgtttggccttttgctcactgcactgcggagcaggaaggctcgatcatggcgctatggaacaggtatgtgtatggaactgttgctaaccctgcataactgcagatgctatgagaacttatttactccaatctctatattttgtgttgcttatgaatcttcagcacttcagttggtccagttctgaatccctcatgacacatgaattctacctaggttggctccgtggcttcatcgccgactatggtgtcccact

SEQ ID NO: 18493 - DNA, 6597 bp, Oryza sativa
gcaattaaaatcatctctttgctaggtcattacacctcttaatagtacggcgaaactaaaattaaactagcaaatttgatcgccctacacctcgatcaattctaaattaaagcgctagttttaccgtcttctttccctttgctttgcgccgtcaattttaatccatcgataatcatccatgcgcgcatatgacgtggacctaacttaaaatgtatagctcaaagacaacggttagtccacaattagtgcttgtcattaattatcaaaattaacaccgggggcctagatgcttcaatctccccctttttggtaattgatgacaaacaccacaaatatatataatcaaacatagagcacatggacatatattgtattgacaagcaaaagctccccctaaacatatgcataacaatcacaaatagcaaatatgaagccaatgcacaattcaatttcacatttcaacatatcacaaacacaagagcaatatctcaatgtgaacttcaagaaatattcattcatgagcataagatggtcacaaatatatcaatgtcacaccaaccatccatcatagcacaagttcacattaagaccacataaagggctcacaaataaatataggctattataagaccacgaagggtccaaatgacatagagaacaacaaaacgaaaaaggaacacacaatatagagtaatagcccatacccataccaaatatagcccaatcctccttaacctattaaatatgaggtgactaacctcactactactagacccaacccacaaaacataaaacacgctattctcccccttttgacatcaagcaccaaaaaggtcttcactcttgtggaggaaaaggaggacgcgccgaagtggaaggatgagaagcatcacggcggcgatgatagacaaaagcttgggtactctccaaggtttggacgcgagaatccaatacacccaccctagtatacaatcttcccaccgaagtattcaagttgccaacatcggtgcgcaagccacgaacatcctcatgcaatgcttcatgcccggtggataagtgttgaatgctttcacttagggtattaatagccccaaggaccgggttgaagaagtcatttggttgcattccaaagtaggcatattgaggatggaataaagtacttggatcatacccttgaggaggagggggggctgcacttgagcttgcaccttgatcaaaagttggttggctcacacgaggagctctaggggaggagagttggagacgaggcttgtactccttatgttcttttaaattgtgaccaatttgtcccaacttgctttgaatcaacctcattatgtagggagcataatagattccttgtccaatagtcccctttgagatggtaatctccttcatcataaagttgataacatcaaaccgacgaccatccataatggcatcaataacatgccaagcaactccgcgtatgtcatcattgttgccgcatcttgggaggatggtggcccttactatgcggttgatcacacttgggagagcccttaaacccgccacctttccatatgtgtgccttcccccttcttcataaaactgagaaaagtgatcaatggggaagggattgtgggtgtgctcatcatgaaggtcatccccgttgttgaagcgaatgtgcaagagctccttgaattcacggcggttgatagagcatcggagggtccccgacatccacttcattgcatcacaatcgccggacacccatacggtggcatagaattgccggatgagatcttcatcaaaaggttgcttcatggtgacaattctatcaatcccaacggtccggaacatctcttgcacattctcaaactccggtgtctcaccaatgtgcctccaagagatccatttgtgttcggtgaaggctttcttggcatacacttgtacatacacggacttttggaaccgtgtatgaaatcttggatcattacaatcgttaggcctccgaaattgatcatgatgatggaggatagcgtattgttgagcattcctcaaattaagcacaaattggatggaggaatcgaaaggactcccatcatcacttgcctcatcatcttcaccatttccactctcattgtcatcaccatcatcacttacttccatctcatcaccctcaacattttccatattgtcctcatcactttgaacatactcatctccgcttgattcctcattctcactaacgggatcgggcgtgggcgcacgacgaccatgccgagtgcggggaggcatagctgaaaaacaaggagcaaaggatggatgagcaacaattttagaaaccacatagtgaagtgggaggaagggcgagtgctgcctgtcaggggcggtcagaccgagagccacggccggtcagaccgacggctcaaggccggtcagaccgccggccctcggccggtcagaccgcgtccggtcagaccgccactgacacgagcacacccaaatccttccacaatccacacaaatgattctaaaaattgctagaacagtgttgcacaagattggaactagaacatcaaggtgtaggtctattgaagcaatggggaaactacccttaaccctaaagattgaaatagaccgatttgagagcaatgcacaagaggaagagggatttaccggttaaaggagttgaatcacaccaagaaactaccctctattggtgcaaatcgatgaacacctcttccttcacctagggttccatgccatggatcacaaactcaataagaactcaaatcaatctatggaatagagagaggaagaggaggagattcacttacggtgtaaccggagtgattttgacggttgaaccggatggatttggtggagggaggtggctagggtttgggagaggagagaggaggagttttttcgagttggagaagagaagagatgagatgggatgaggaggggtcgggtagaaggaggaggaggaagaaaggacaaagtcctgggcccaccatccctggccggtcagaccggctatacgcggccggtcagaccgccaggatgcagccggtcagaccggtccctagaggccggtcagaccgccgccaccaggccggtcagaccgcgcatatagcgccggtcagaccgcctggccccccagccgactgtgcacagcccttgcacagttcggctacccccacacaataaaattcaacaaaaatttgatttttggagcaattttgaaatgtgtgagttgaaatattgccaaccattcataatatttgaaatttatgaagatttgcaacaaaactcacttgagtgctaggaggtgaccatttatggtctataggggtttttgggcgaatttgattttcaaacaacttttgaaatatttggattttgaatatgatttgaataccaaaaacatttcaaatcctcctctctaccaactttgttttgaaacttttctcagattccttctcaaactcattttggggtttaatctcattttggccaaaaacaagaatctagattcttcaaaagagagccaaaatagtatttttcattcaaaaatcatttttctagcaatgtgaggcttggaaaacatatagggacccttttgaaacattttccaagagatagttttcaaatttcattgattttgcaaaagttttgacttatgttgacttgggcattttaaaaacactactagcacttttagttgatttgcttacatataaaaggaagtagagcacatgcaagagtccaaaactcccccttaatgtgacatgctccattttcgcaatgaagaaccaaatggcaataagtccaaagcataagagcaaataggagcaaatatacaatatgcaaaagaagcaaccatggtgcaccatctcaagccacattagagaagtctatgacatttaactcattcctcaacttgtaaaagcgggtttcatcaagaggcttggtaaaaatgtcggctagttgatcctcggttcttatgtgactaatgactatgtcacacttggtaacatggtctcttaggaagtgatggcgaatgtcaatatgcttggttctagaatgttggaccgggttattggctatttttatggcactatcattgtcacataggagtggggttttggtgaaggatataccatagtccaacaaggtttgtttcatccaaagcaattgggcacaacaactacccgccgaaacatattccgcctcggcggtagagagggctacggagttttgtttcttggatgaccatgacacaagggatctaccaagcatttggcaactaccggatgtgctctttctatccactttgcaaccgacataattcgaatcggaatagccaacaagcttaaatttagcaccttttgggtaccacaaccaaatagtagaggaatgctttaaatatcttagaatccttttcacggccactaagtgacactccttaggaacggcttgaaaccgtgcacacatgcaaacactaaacatgatatccggcctagatgcggtaaggtaaagcaagctaccaatcatggaacgataaagctttaaatctaccggtttacctccctcatcaaggtcgagatgcccgttggttgccataggtgtcttgatgggcctcgcatcctccaagccaaacctcttgagtagatccttgatgtacttggtttggctcacgaacgtcccatccttgagttgcttgatttgaagtccaaggaagaagctcaactctccaatcatggacatctcaaattccctagacatcatatcaccaaattccttgcaaaatacctcattagtaaaaccgaatatgatgtcatcaacataaatttgacacacaaagaaatcatcaccaatgatttttgtgaaaagagtggtgtcaacttttccaattttgaaatcctttgacaaaagaaaatctctcaatctttcataccaagcctaggagcttgttttaaaccataaagagcttttgagagtttgtaaacatggttaggatttttaggatcttcaaaaccgggaggttgttcaacaaagacaagttaggcaatttcaccatttagaaaagcacttttcacatccatttgaaatagttttatatcaaagcatgatgcaaatgcaagaaggatgcgaatagcctcaagtcttgccacgggggcaaaagtttcaccaaagtccaaaccttcaacttgtgtgaaaccttgcgccaccaaccttgccttgtttctcaccaccaatccgttctcatcttgtttgttcctaaagatccattttgtccctatgacattgtggtctctaggtctttcaaccaaagtcaacaccttgtttcttgcaaagttgttgagctcttcatgcatagcattcatccaatccggatcacaaagagcttcatctacatgttttggctcaagacaagaaacaaacgagtaatgttcacaaattgaagcgacatgagatcgagtttgaacacccttactaatgtcacccaacacttggtcaattgggtgatccttggaaagagcggtgtgtattcttggaggcataggtggatcttgtgccttctcctcttccacttcaacttgagcttgacttgacgaggcggaagtagatggctcatcatccacttcaataggcttgacatctccaatagacatgttcttcatagctctcatcaagccttcatcacctacatcatccaaattctcgtgcccctcttgggagccattagtctcatcaaattgaacatcggcggtttcttccacaatacctttgttcttgttgtagacctggtatgccttgctatttgaggcataacctagaagaaacccttcatcacaccgactttcaaatttggttagtctaacaccctttcggtaaatataacacttgcaaccaaaaactcgaaaataggcgacatttggcttcctcacaacaattagctcataggaagtctttttcaagagacgatgcaaataaagcctattggttgcatggcaagcggtgtttatggcttccgcccaaaaggaatcggaaacaccatattcatctagcatagtccttgccatctcaatcaatgtacgatttttcctttccactacaccattttgttgaggtgagtaggtagcggaaagttcgtgtttgataccaagatcatcacaatagtcctcgatattggtattcttaaattcggaaccattgtcacttctaattttcacaagagtgcaactaaattcattttgggccctttttgcaaactttttgaaaagctcggcaacaatagacttatcatgcaaaaaaaacacccaagtatagcgagaataatcatcaacaatcacaagacaatgactattaccaccaatgctcttataggttgttggtccaaacaaatccatatgcaagagctccaatggtctagatgtggacatgatactcttagtaggatgagaacatgcaacttgcttgccggcttgacaagcactacaaagcttatctttctcaaacttcacatctttcaagcccacaactagatcacgttttgaaagtttgctcaattgattcatgccaacatgaggggctgcaggaatt

SEQ ID NO: 18494 - DNA, 8677 bp, Oryza sativa
atccactatcaagcacccaatggctcccaccggtgcggtagttcacctacaaaagaagatcaagctcttttaggtacccaaacttgtttgagtccttggaggttagagaccaaagctttgggcacccaaatggcattctttttaccaccgagtataggggaacccacatatctagcaacaatgctaccatcatgagccttactaagcatataatgagaatcaaacatacatgtcttaggaggcttaccttcggggcaatcactcaccaaatgcccaacctcacgacacttgtagcaatacttaccatttctcttgacaaaacgagtggcatggtgagaaggtttcttacccttctttggaatgaatccaagtccctccttgttaaggatgcaccgttgctcactcaaaattttgtcaagagtgttcttacccttgaagcatctctccaaactcttgttgagcttagccacttgctccttaagctcattgttctcaacaacaagtgaggcatcacaaatagaaacacacgagctagaactagagcaagggctaggcatatacataagatcatcacaagaggtagaaatactagatgatgcaacatgagcaatatggcaagtagcactatcatcaagcaaatcacaagatatgccaacatcaatgtgagctccatgttgagtagtggaaaggagattgtcatgagcttccttaagcttctcatgagaaatggtgagtctctcatgagagatctttagctactcatacaagacctccaaagaagcatgatccttctttagggccttgaacttgacaatatccttctcactataagcatagagctcctcaaacatactcacaagctcatcataggaaacatcatcacaatcatcatcactctcactatcactaagagatgttaccttagaggaaccctttgccatgagacaaattggagcgaagagtgatggagcctccttgatggcaacaacgaccatcttcttcttcttggagcttgcatcatcaccaccttcttcctcggacccggatgaggcggagctctcctcatttgagtcccattccccgatgaaagcctcaatcttcttcccttccttcttaagtttcttcatgagcttgtagcctccactcttcttcttggatgacttgtctccatcatcatccttggaagggcacttggaagcaaagtgtcccttctcactacactcaaaacacctcaagttggagagagtcttattgggtcttctatttcttctcctattggagttggagccccttcctctctcctttctccttcccaagagatcattgaaccttctagcaagaaggatcatctcttcctccaagtcctcattgacttcattcaccttgctcttgctcttgtcttcaacttcggcttggagagcaatgcacttcttggagggtgaggcttcctccatctccttcttcttcaacttgtacatgtcattggtgttgatcttccccaagaggcttgcgggtgtcattcttgacatgtcggagttgatgagcatggtgacaagggtctcatacttctccggtagggctctaagcatcttttgggcaacctcaagatcggtgtagtttgccccaagccccttgagatcattcacaatgacattgagcctcccatacatgtcattcacattctcatgaggcaacatggagaatgtctcatattggatcttgaggaagtgaagcttggcatccttgtactcacttgtaccctcatggatctccgccaacttgttccaaatctcatatgcggtctcaaggttgctgtcacgcccggaatttctatccaaaattccaaacgcttacatgtgtgtgaaccctcgtccaggaatcagccgaggcacacaataacaaattgataatagagtacaattattactctaattaataagcgaataaaatgtcattacagaggtagatagttcctctcaatcaataaaaatctaagcagcggaaaaaataagataaacgacgcagacgactccactccacaggcagcttgaccagggctacacctaatcctccacaccatcagcatcactatagaactcctcctctgatgaatgattgcaaggtgagtatatgacatactcagcaagccacgcagcaaatatgcaagtgcacaggataacaaaggatggcatagtagggtttcatttgcataaacagcatttaataaacatttcagaatttaataaaatagttaagtaataattaaacaatattaatccaacgctatacaacataccctgttgcataggcccaaccattctgaacaaccatcccggctgcacagttctatctccaaaccaggaatataccattccaaaccaggagctaatcaaattattactagttatagcatcttttattatgatgagaagtgtgagactaatcacgaaagacattgtttgacccgcccttaaccgcgggcacggctattcgaatagttttactctggccagaggtgtaccactgtacccacaagacacagccccacaacatgtcaccatgtgcctcaataccaccacggtacctcggaaaggagctgtgacagtacccctcgcacaacacaatccaccacagcgcacctttcctggatcataatcacccccttataaacaaggcatggactccccagcgacccccgtgggcttatctccgccacttctcagtctggtgctccgcaatgaaccatgctatacaaaaggtaaagctgttgcccacgctggcttgtggttggcacggttaatgtttcacaaccgaaactcgtgaaccggtccttaattgtcatgagcacgactctcaaaaccatgtgctcacaacccactattatcaagttttagttggcaagtaattaattaaccaatcacgattgaccatcgtgaactatcattaagccatcattaaataatagtgagtcataagttatcccaatagtgtgctaatgtttctaagcatggctaagcaatcatatctaatatctagctgaaccaatatataaagctcaactagtcaagttataataacccaaggtatcaaggaataaagtaatcaatgcaaacaggccataacaaaggaatagattcacaccacccagtgacattcgaaaataaatgcacagttgaaataaatagagaatttaaatataggatcaacatgctcaaaagattgtgtttaggatctgtgtgacttgccttgctggccttggaactcctcaaattcttctcctgcgaaaacggactctccggaaacgtcggaatctaaacagaaaagagcaaaaacaccaaaacaacacataaacaagcatgaacagtacatgtggatatttttaacatgtagatctcaattttagaaaaatttagagacttgaaccaactaaatccgagctaagatgaattagttatgaattttcaaagattaaatcggattaaatcaattatatgggttttaattgaattatgacgcaataatgaattatttttgaaaaggaaaaaggggtttattgcgtcagcggctagggtttgcggtggaccgggtgcacggcggcggctcacagaaacgaacggccgagatctttccatccaaaacggacggccgagatcgaccggtccacggccggaccacgagagacgacgacgataacgtcagcggtgacgtcaccaccggcggcggctcgggcgcgcaagctcgtcggcgaacgagggcgcgacggcacgaacggagggcaccagcatgtagagagcgacgcggcgaactcaccggtgaccaaaacggcggcggaagatcaacggacggcgacggcgtcgaggaaaaggcggcggagaagatcggcttgacgacgacggcggtgctccggcggtctacagcaacgatggaggggcggacgaggacggcgacgcgacggcgaccacgacggcggccttccagagcgacggcgacgactggagcgacggcgacgcacggctggagcggcggcgacgacggcggcgcaaggctacacggtgctagggcgctaccaacggcgagaggcgaaagcaagggtggcggcgggtagcggcgggcttgggggtccttttaaaggggcaaggaggcggcggcgaaggcccacggcgatcggcgacgcgaaggaaagtttagggttcggaggagagggatcgatccgaatcgaactcgaatccacggatttccaaacgaaattagccgacgattccaaaagagaaaaggtagaggagatctcgggaaacatttcccctcaattgatttcaccggagaaggaaaggcgcggccgaatttggaaggagacggcagcacggctcggctagggttcgggcggcggccggccggaggtagacgacaggccccccacctgtcagcgggcggacgcgcgcgcgcgagcggacggctcggctgcggactgggccggcttgggccagggagagagagagaaggttttgggccgactttcggcccaaagccaaaagagacttttaaaaacctttttcaatttaaattattcattaaatgcaattccatttattaaaaatacttccttagctcaaataaatcccagaaaaatctaggaattatagagttaagcaaagtatttaatgaaattttatctggccccattttatattggaatttattaattaaaactagatcttcttttcaaggcttttaaaatcatttctaataattccaattaaacaacaatttatatatttaggatttttagggtgtgacagttgctcactctatcgaactcctcttggctcaaagagttgaacaaggcattcatggcttgggcattgagttggaggttgcggtgatcaatctccgtcaagggtgtgccagtgatggcaaagcctacatccacaatactccaaatatggaagctcatagctttgaggtgagtagatattttaattttccagtggagtagtttgtgccattaaacatgggagccttccctacatggttcaccttgttcgacatcttctctctaggcggtgaagcccaatcaagagagaccaagctccgataccacttgtaggatcgagatgtcgactagagggggggtgaataggcgatttaaaactaaataacacctaatcaaatctaacctaagttgctaggcttggtgagggtgaactctaactaagcaactaagttatgttttgcaaatctagggtgatagtggctcaaatatatctctaggaaagtaaatcacgctcctatgtcgatgttttgcaatcctagggtgatatgatctcaagtgtgtctctagaaatgtaaattgcacaaatgtaaatgcgacaatcaaatgagacaatgagacaagagatttttcaccgaggttcggaaactcgccggtttcctactccccgttaaggcgagcccaactccaccgctcaaccacgaagccaccgcacgcccccttcgtcaaagggtgggcaaggcgggagccggcccacggagaggactacccaagcctcgatcactcggggtagttcttccttcactccgaaggtggtgaactccaaaccattcacaaaccggcgccgggcctcctccacaatcttctcggagaggtcaccgggcaactcctccacaagccgcctaggaggcggcaaccttcaagagtaacaagcaatgacccggtgtggagatgatcaagtgccacactagctctacaatggaagcaaatgcacttaactcttgcctaaacaaccctctaacacactagatggatgaacacaaagctcaagtgagtgtgagagaggtgcaaggagtgtatgcaattgaattgggtgccaagagagcccccttgctgctggtgggggagtatttatactcccacccaccaaaactagccgttgggggcgaaatcccccaactctgtgctctgccggtctgaccggaggtatgcggccggtcagactgtgctactctgcaacggctagaaaactagccgttgtagccctgtcagagggccccatcggcctggccggtcagaccgacatggggcggccggtcagaccggcctcggctcggtcagaccgccatcggctcggtctgaccgactacggctccgtcggctctgtatcggccatcccgagcagcatcatctcggcctccaggaggccggtctgaccgggaaagtgccgccggtcagaccgccactatgtagccggtctgaccggccagggcacgccggtcagaccgccacatagtggcggtctgaccgcccctggtcaggccgaacccagtgaatttgtgtaatgaaaaagagagcacaaatgaaaatgcaatgatctaatgtggcaattaaaatcatctctttgctaggtcattacccctcttaatagtacggcgaaactaaaattaaactagcaaatttgatcgccctacacctcgatcaattctaaattaaagcgctagttttaccgtcttctttccctttgctttgcgccgtcaattttaatccatcgataatcatccatgcgcgcgtatgacgtggacctaacttaaaatgtatagctcaaagacaacggttagtccacaattagtgcttgtcattaattaccaaaattaacaccgggggcctagatgcttcacccgtgagtagttagatgggttcagttttgaaattaagtgattgagtcatttatgtttaaataaggtataaaatatgcccatcctctactaaaataaatcggaaaagttggataatattgaatattgagttgaaatgcaaaaacaatggtgaactcactatatgggccttttgtaaaacctgtgttagttgatgccaatttttagaatggttatggtaaaatgtagagcttttttaaggaaaacacctagcaacaccacggtccacgactgcgaaccacaccctccagcgtgaaaccagtgtttgcaatttcgttttcggtgaaaattttggtcatttcggtagagattgtagtgagttggtactcaatttgtgacttttcatcttttcaaagtaaaatagtatacactcatttgtgaaattatttggtagtttacattgaaaggatttagcaataaggattacttccaaactcccactgatattattaaagtgccaaattcaagttttttgtatggcaaaacatatgatgccttgttttattgtctatatgctcttggagccatattgaacatttgaaccttcttttgttttcaaaacataacatatgttggtttgtaatctagctacaatgaaagccatatttatacacacatggattgttatcgacggtgactatttggtctcatttgctatcgatattggttattcggccttatggcttgtcccccagatctcaagtcctggcttctgggtgcaatcgatctccgtgagcatcatttgcttagtgccaaatgaaacaagaattcactgaaaacgcatccaaaaacctggcccattggattggatacttatatatatacttatatactcctgttcgtcctgctatccgtattcacatcttagtcacaaactctacagtatgcagtatcgtttatatataagcattctaagcctgaacaaattctttcatgtgtttccaatgagagctgcaaacttgttcaactatacgctcaccaacattttcaaccaccagcaactttgccacacctatgttccatatggatgctttatcagggactgattaaattaagagtaaagtctatcaccggtccctaaacttgtaccgttgtgtcatcccggtccctaaactcgcaaatcgactgttcaggttctcaaacttgttcgaccgtatcatcccgatccttaaacttgcagatcacttgtttaggtcctccaatgtcacgcccagaaattcccgaatagaattccaagcagaatgtgcataaaaatccccgtccaggaccagccggggtacacaaacgacaatgttgacattcagatccacgtcttacaaacatcataaaagtcttacagaaatgcagcggaaaacaaaagaaacaggagctaagccttgacttgaactgcagcgggaacaccactccacaggcatcctcgacggcacggacgaagcctactcctcggggaaaccttcatctgacacatacccgtcctctggggttgggaaaagtagagcaagactgagtactacccactgtactcagcaagtcataccggaatagaggtatgatgcagggaattacaaagaagagctagagtggttcatttgcataaatactggcatttataaacaggaatttaatgcgaaaacagttgtaataattaagcagtattaaacatccgctgtccaacgctaacccacgttgcgacaggcccaaccatccacctaaactatccaagttcaacaaattacactagggtgagactaatcacggtgaatctggttgaccgcccataaccgcgggcacggctattcgaatagttttactctgatcagaggtgtacaactgtacccacaagacacagccccacgacacgtttccgtgcgccgacatgccaccacgacatcccggaaagaggctgtgacaggaccattcgcataaccccctctaaccaagcacaccacacctcaggttcacccccactcct

SEQ ID NO: 18495 - DNA, 8456 bp, Oryza sativa
  unsure (1)..(8456): unsure at all n locations
ttcctgcagcccaggcatctgggcatagtattaaaggattaagggattatgacaagacagaataaagttcaattaaaggagccattcatacatgcatatgaagcagctgttttgtgtgagaccaaatattttacctcatcctgtgcgaagcctgaagcttccagttcagttagcagttcccttgccttctcaaagagaccacctttagaatacacctttaacaaagtggtgagtataacctgcaaatttaatttaatttacaaattagaatggcaacagtagcagaacattttcggtgaacaaccaaagagcaatatatgcaagttcagtaaagaaacaaccaatcaagataacatgtagttatagttgatatgtggagacttaagaggctttttaaaaaaaaaatttatcctggagcactacattccaccttaacccaagctatcgaaagctctattcaatacatcacgtgccaagcggcaagtaaacatggtaccacaactttgatggaatttgatgtgcaagctttctctacttagtgtgagaatgttctttccaaccatggcatttgtttagtgcttattgatggctatcatagggcagtatttgtttttcatatacatcgacaggcatcattcacagacattacgcggtgaagttagaaggcactaccgcactagtaccaaataaattatgcagctggagaaaccaacttttgcaccaaaacaccaacaccatatactatgcaagctacaacctgtatgtgctatctagcatttcaagtcatccatagcaacaaactatccaacctgtggtgtaggtatgcattatatctaatgagaaatcaattctactgccataaccaaaaagtgaaataacaagactggggtctcctgcaaatcataaaactcagcaacagagttaattaatactccctctgttctacattataagacgttttggcctctccattcttcgtctagattcactaacatccatatgcatttagacacatatgaagtacatatatgaatccatgcataaatctattagaaaacaaaatgtcttataatgtgaaacagaggaagtaaataacaagaataagaagcaaaccttgttcggtgttaaccctgaggacctcaaatctttcatcaacagatcagccttttcataattagcattttctgaatatgcattcaacagagagctataatggaatagattaggcttgtgtccttcgtccttcattttctgaaaatattcctcagccttctcgcagcagttatgtgacgcgcatatagccaggagagtgccatatattacactatccatctgaaaaccacgggaattcagctcattaactaattccatggccttagtgtaaccctgcttcaacttcatgcaccctgacagaagctagaagtgacaagagaaacaattgaaatgctacaccaaccaaagtaccaaactaaatgctaatcagagaaaaagaaaaggtcatagtcccatacggtactgtaggtgaacagatcgggtgatagaccttctcgtatcatctcatcataaagcttgaagctgctatcgaacctcccgttcttcaccaagcacccgaggaccgagttacaaacggagacatggatccttgtcgggttttctcggatagcaccgtacacttgcagcgctcgggcagggttgcggctcaacccaaggtacttgaagtaactgctgtaagacgcaatgttgagcatgtcgtgctcctgcatccacccgaagacctgaaacaaagttcagactactcatgcctcactagtcccatcaatctccactcgcctgattgaacttgacaaccactgaagactaccttagatagctcatcccagcgcctggtttcaccgtagtggcgcaggattatgttgcagtcctgtgtctgcagcacatcctcgaacctgtacagcatcaaaggtcagaattcgcagaactaacaactccaaatcgagcaacaataatcctaccccaacacctcagtttctcttgttcctccctctgaatccacgtttcgatatatccaattcgcgcgaattactactacgaagacgaaaatgtagaatgctccgatagagctacggagaagcatatagtgggcggcgcacctggtgagtgcggcgacggggtcgggggcggccttgacctccgcgacggcgctgcgccgaggcgacggccgcggtggcggcctcgaggcctgcggggcttccagcgcccggggggcggcgcgggcgcaggagatgttccgtcgggagcagcacgccgccgccgccgccgccgctggcgttggatgaggaggaggggagaggaagcggaggcggggagcggcagcgacgcggcggcctccatctcgccgccggcggggcgctgctgtgttcgcggcgcgacgcgtctcgtccgttgggaattgggatagggccccgaggcggagggaatcgggggattgttttccccttctgggcttgcttgtatttgggaagcgcgggactgggcttatggagggataccgggcccgatccacgtggaatatttccccggcccgaccttaataatattggtataaagacaacagtttttgctacagcatataagagtatttgccaatattttttctcccaaaaattcgatggatataaatatagtgcaatcgtaatgtaattacatcgtaacttgtatataactacaatatacaagttgaatgcaactttcaaaaattttgtgatatcatgctattttcgccaagcggaggtctaagagaccaaatcctctcgcttgtgtgcgtgctgtgacttttttcatctcctcttgcatgaatctttaagcaaatttaaagatttcaaaattacataaaagttatataccagttacgttgtaattatgtgtaagttataatataattacaactattattgtattgtatttacattttacaaatgtttagaagaaaatttatcaacaaatgtatagatattctaaaaaccccaaatgctgattttcacggagggcgagagctgggcgattttagggtttatggccggatccaatatgcttgatctgtgttgatccgctcgtgattggtttggtttgttttcttgagttgattaccgctacgtattgtatacgggagcggatctaattctgtttttgactgggacttgacctgtggtcttgggcctggtatcgacgttttcctgttgactctccggctgcaaaccctagtttgttgcaactcgtcttgacggtggtggtctgttttcttccacaaacttttctcttcctgacggtgggggcgactaaggggattccagtgaggtttctgcctgcccgaagccgtcgggaagtttagggttttggaggtacatactgcggcggctgttctgagtttggatcaatggcatcgaaggagaatagatccgaggctatggtttcgggggctgacgggataaaccaaggcgaaaacttggatccaattggtgagggcttggatgatcatcatggcaacctagatcagggtttgtcgagcgccatggtgcttttcaaaaagaagctaactgatggtgaagaggaagatgacgatgtcttggatgtggaccttggtgaagaggtggaggagatgaaatctaagtggctgatcattgctcgcttctactcaggacaaaggtacaatgtcaaaggcttgtttgaggagatgagtattgcttggaacctgacacaacagagaaagactcggttctttgggggataatagattcttggttgagtttgcttgcgaagctgactacaaccgagttgtgtatgggggcccttggaaacataagggtgatgctcttcttgttgtcccgtatgatggccttgctagaccttctgaaatctgtattgaatcgctccctctgtggttacggatatacgatcttcctgagattatgatgactactggtttcgctaggagtttgggtggaaagatcggggaggtactggaggtaggaggagctatacacgacttcctgcgggttaaagttgcttttccgctatcctctcctttaaaacctctgttgaggatttggattaaggataaaggtgttatgtcttttccagtgaagtatgaaaatgtgccttttttctgtttctcgtgtggacgaattggtcatgcagagcgggaatgcccggaggtgggatcgtctagcgctcaggtgcgctttgggaaggagcttcgagcttcaccgttaaagaggaaacttcagagttttgctccctcttcaatctctaccccaaaagctgccaaggtgctgaattttagtggtgcccaacgggagaaggttcttactgcctctagttcttctaaagcttctgtgcttagtaatccaaagttgaacagcggtggcgcgactatgttcttggttggggagaaagcggatcaggaagagaaggcggccagtgttgaggcagaagcctcgttgtatccattgccgaagggaatcaccgcagctctagaggaaggtgtctctcagatgaagatgcagttagacgatggtgagctgaacttggcagctcgggggccatgcagtagagagcgagtgtccatgagttcagattatgggctgtcgggggaggaaacaccgcaacatagtgccgggattgtctctggtgtggtgaaccaagatgtaaagtcccctggcgggcaatccaaaaagaagcaatgggtgccaactagggagactgatcgtgcagttaaagctaagagcctatccataggcagggatattggcaaaccaaggaagataactgtcagattatcagcagatgcagtagaagcgtacgaacgggaggccaaatcctagagatcgagttccgaacggtctggtggaaatcctcctacaggagtcccggctagtgttgacactgatatggtgatggataatggtgtgaagaaggaactgtatgcagattcgggaacagctacctggtgggcggctcacggcgagccccaccaggaacaatgaatgctctagcctggaactggtccgtcttgtgcggatgtacagcccgaggctggtgtttctctcagcaaccagacaagatcaggagagagttcagggtctcagatggaggctaggtttgaagaattgcctggccttgaaaggagaaggatcaggtggtggagtggcacttatctgggatgaaactttatctgttcatcttttgtctatgagctgcaggtatattgatgttttaataagtgaagcaaacagcggtttccaatggaggggcacctttgtgtatggggaaccaaggatgcaggaccgccaccttccaatgctccctagttggtgatgggtgatttcaacgaaacaatgtggtctttcgagcatttttcggcacgacagcgccctgagcctcagacgagggatttccgtgatgtgctgtcccagtgtgatttacacgatattggttttgtcggcctgccgtggacatacgataataagcaaaaaggggaccgaaatgttcgggtgcgactagatcgggcagtagcctctcctagttggtctgaccacttttcgggtgccaagttgacgcatttagtgtcttcgaggtccgaccactgtcctatactgcttcgggtggagagagagaaataccgacctgtcaaatgtttccgctatgaaatcatgtgggaacgagaggattctttgggggaggctattaagctggcctgggagcaggaaggtaccgctttgaatcttggggagtggagtgtcagggtttttggttctgtgtcgcaggagataaaggagatcaaagctaaggtggaggaactatcaagtttggatccaattaaccatgacggtgagattaggaagttgtatgcccgcttagatgagctgttgtatagggaagaaatgatgtggctccaacgatcgcgggtgtcttggttaaaggagggagaccgcaacacaaagttttttcaccgccaggcagcttggagagcgaagaagaataagatcgattgtcttaaagatgaggatagtagatatgtcgagaacaaaggagatatggaaaagttaacgagggatttctttcaaaagttatatgcaagagatgagggagtggatcctggtgagttagtggacttgtttgatgtccgggttgatgcaagtatgaacttggagctttgtaaacctttttcggatgaagaaatttcggatgcactcttccagattggacctctaaaggcgccgggcccggtggttttccggctagattctttcaacgcaattggggagttttgaagcaagaggttataggtgttgtccgtagttttttctccgaagtggtgatgccagttggtgtcaacaatacctccatcatcttgattccaaagatccctcaaccggagcagctgaaggatttttggccgatcagcttatgcaacgtcatatacaaagtggtttctaagtgcttggttaataggatgagaccctcttncntggtatcatctcaccaaaccagagtgcctttattccggatagaatgatcacggacaatgcgttgattgcttttgagtgcatccataacattcaacgggaatcgtcgatggggaaacaattttgtgcttataaacttgacctaagtaaggcctacgatcgtgtcgactgggaattcctaaggtgtgtccggattaaagtcggcttctgtgaaacctgggtgagatggataatgacctgtgttacaatggtgaagtattccgtctctctcaatggtaatctgctggaaccgttttcgccaacccggggcctacggcagggagacccattatcgccatacttgtttctttttgtagctgaaggcctctcgacgattctgaaccatgaagtggttgctgggcgacttgaggaactgaaagtttgtcgaagggcgccgggggtttcccatttactctttgctgatgatagcctgttgtttgtcaaagcatgcccgcagcaggttactgtggtcaaacaagctttgtcgttgtttcagcgctgcaccggatagcttctgagcccaacgaagtgctctttgctaacaagtgctcactgtcctagtgatgtgatcgaggaaatcaaactgatctttcaggttgaatctgctaccttcgagagtaattatttgggtctccctactctagaggggagaatgacggcagacaaatttaaaacaatcaaggaacgcttgatcaaaagactgaatagctgggcagaaaagttcatgtcgtcgggagcgaaggatattcttatcaagttcgtggcgcaggcaatacctacctatgtgatgggggttttcaaactttcggtgtcatcctgcgaagcttacactaaactggtgagagacttttggtggggtgacgaggaggataagaggaaggtacattggacagcctgggataatttggttctccctaagtgcatgggtggactcggatttagagatgtcagaattttcaatcaggcgctactggggagacaagcctggagattaattcagttcccggagagtctatgtgctcgcattctaaaggccaaatactttccaaactgcgatctgattgatgcagtgttcccagctgatacatcgcagacatggaaaggaattgaacatggaccgcaacttttaaaggaaggactgatctggcgcattgctgatggcaagagggtcaaattctggaaggaccgttggatcccaagggagtcctcttttagggtgtcaggtatgaaaagtcgatgtcggctccgatgggcatcacaattcatcatccctgaggggaattgttgggacgaacagctaatcaggcgggtctgtcatccttttgatgccgatgaaatgttaaagattaagttgccccaatttcctactgatgattttctggcatggcactttgagaagtatggaatgtacacagttaggagtggataccgtgctgctctgatgaagcaaatcaatacggactgtgtctcttttagctcggctaactctggtaaaaggctactctggcgagccttatgactgctcctgtaccaccaaagatcagaatttttgcttggagactagcccgtaattgtctggcaactcannnnnnnnnnnnnnnnnnnnnnnnggtgagggatggtaaatgcagcctgtgtggtgtggaagatgaggatggttttcatgccgttgtttcttgtactcgatctacagccctgcgtactgagcttcgctgtgtctgaaatttgccggatgagcaacagtttgaaatgatggtccagactggcttctgattctgcttgatagactaagccctgaagagcgagcaaagctcctccttgtcctgtggagctcctggttcttaaggaatgacagcttgtttggttcaggttcatcgactgtccatggctctg

SEQ ID NO: 18496 - DNA, 2546 bp, Oryza sativa
gagattatgatcggacgagacgtaatcagggttgcatttaccgcggtaaaccgcgcggttaccgcggttaccgcgcttaccgcgggggtacggtaaggggtaaaccgcggtaaccgcgtcaaattcaaataaatttgaaaaataatttgaatttttgataaattttgtacggtttgtcgcggtttgtcacggttaccgcggttaccgtgcggtaaccgtgcttaccgccggggcgcggtaaccgcggccccggcggtaaatgaaaccctggacgtaatatgttgagatggatggagtaattgcaaagggccctgccaggatgccagaaattcaggttcgcacaacttgagcatgaagctgagggcctgtttacctcaatttttacaccatcaagtattaaacatagttttaaaaaataactaattacacagattgcgactattttgtgagacaaatcttttaaacctaattgctccataatttgacaatgtggtgctacagtaatcatgtgctaatgacagattaattaggcttaataaattcatctcgcagtttactgaccgatactgtaattagtttttttattagtgcgcgaacaccacatgcaacaccctatataatatccgatgtgacacgccaaaattttacacccctagatctaaacactccttgaagtaggatcatgttttgatggtgcaggatgtgcaaatgagactgacggtgccagtagttgatgaatcagaccatatggatgccgttgaggatggggataggaattgcacccctgaagcactctggtgtcattgacaagcaacacaaagggcaaaaggtgacctaagggaaataagccgaagaaaaattctagatatccaaaaagtcttaactcaaggcagaaagatttctggggctctgctggtaatagagtggttaatcctgtcacagagaagagattgctcaaatgatggatgctacattaaccaaaataattccattcaaagatgaaacctgtgaatctccattgtttagcagtaaactagaagtagatgaactctaagctataccgggagttaatgaaaagtgcaaacctattacatgtatagatacaactagccatattctccacactacaaggccttgtagttatacatgtagctcctcaaggtgttgatatcttgcattgactccagcatagagtggtccacatagaggctcaatgcagaagcactgcccaacaatatagataaaacgaacaatgttattaacaagaaatgatcctcttggtctgtgaaaaacagatagaaggaagcaagaaagcatacatcaaagggccaaacgggagccatgctacatcccatcgaattctcggtaacctgtagcacaagagtaaaaccaatcaaccaatcaaattacaagttctagccgttgatggttggttagtactgtttatgtggtcatgcataaaagaccattatcataaaatggtaataacaatgcacaaagcaaatagttactagtagataatgtgatacctcaagaggtagtatgtccagaagagggctactagtatgctgacatagaatgaataccacatccacttcttccaggagtgaagtaatcctttaattgagaataaacatgctagggcagctatccaatctgcaatattcaaggtaaggtattaatcatatcacaagggaagtaattttgatttagcaggacaaattttatgcctgtaagttccacattcttttatttgttttggtataaagtaaaacaagaattacagagggaatgagtttagatgatgattaaccaacaggatcaataaatgcatcttgtgtaatactatcatgctataagtgacatgttccctaaaactccgagtagaaaatgtttgcagactgctaagtcattggaaaagaaaatagtatgataaaacaaacaagagcaaattgtagtttgcgcattgcctttgttgcaatttggaccaccccaaacttatcttttcagcacatcaacgacctcgagcgttttggctccaacgtgccaatgaactctcacccatgcacaaggcatatttttgccataggagtggttagacatgagaagagaagagagttggggtggtccaaagtgcaaaaaaatatagcaaaggcaaacttgcatttgaagttgctaacttgagcaaataagaaagacacagctggctcagtgccatcagctatttcaatccaagtaacatgtagacatttcattatctgtacttgtatctaaaacttccaccctctctctctattttttttttacttttgtaacagagagaacctctggttcatttattgtgtgcaatgcaaatatgatgtaagcataattacctgcaactacgaccatcggtgatgacaaatcttccatgaaataagcatgataccgctgtacattagagaagcatgtgtcaaacaacatgacagaagcacagcgcaatgcaatcgctagacagtcattacaaagaaaatcattaatacatggtatagcagatagcaccagtt

SEQ ID NO: 18497 - DNA, 2919 bp, Oryza sativa
aattggcaatcctcaaggaaacaattttgtaactaatccaacgcaaccgaactacggcatgtgtgctaccatatgccaattccgaatcttatgccaatcaatatcaagcaataacaatgagctcaaccaagtgatgtctaagcaaagcgccatgaaatggggaatgggggtgacggacagtaagtaaaccaaccagttcccacggggccgccgcatggtgaaagccggagtagacgaggaaggccgcgtagccgaggaggaacccggcgaagacgcgctgcacaacacaacacaaagggaacaacaggccatggccgggtccgggcgtgagcagggaggaccaccaaaccgaatcgaatcgacgaaacaaaaccctaagccgaacgagatcggggatcggcagtgggcgcgcaccctccaccggcggctctgctgcgcctgcttctgctccagcgaccggaccatctcctcctggtctgcgcgcagtccacgaacgggggtgatgacaacgagagagggttggggaaggagaacggcgcgcgcgtgagatggtgcacaccttggatgtccatcgggatgaggtcgtcgccgtcttccgcgccgtcgccgccgccgccgccgcggcgcttccaccacctcctcgtcgccgccgtcgtcgtcgtcgtcatccgctccgatcctgggttggaggtccgaggtttctgatttggaatgtgatttttgtgaagttggcgtttccttctcttggaagagatattgtccggtcgacaattcaggtcgactttggctcaaacgaattcatatcaattttagaggattttaattctatagaaatttttctaatataattttttaaatcctataaaatttctatggaatacctcttatcgtgcaagttttaggggaaatttaacatcaggtaaaattcatggaaagaatcaagtgatttttttatctctcatcaaattcctttgtttttcctatggtaattctctgttttacacatgtatttctatctgaatccgtttttcacttgtattcctatctgatcctaccctttttttatttctttgatttttttattcctgtgattcaaaatagccctcaatatacacaccgtggcaaacagtaatggtctattctcctttttttcccctcttttaataattgattaatggaaaatagctgcttctaatgcatgttttgttgtgttcacaatatagaccaccaagacagtttgtcatgcacatattttatttttttcccagtgtactactaatgcactccatcaatagaaaaatagagttttatttttatttttccgattacacggaacaagcacacgcacacatatcacatacccacgagtatccttgatcccaaatcctattaaaaacacatctgcatgtgtataatattgtccctaatatttatgagcactctgatttaaccagaatcctactggaagcccacctacgtaatattcatgggccctccttgatctcacaaataagagtatgttcggataatccccttcacaaggtgtaaaattatttccaattcaatcccctccaattcctcgctctttggattatccagacaagacaagcctttaagggggcagaaattgagatatgcaaacgcatagacaacccaacataccgccgtaactttccattaatattgagtttgtttcagctcactgctctcaacaaaaaactcatccgctgccttactgcccaatcaggcacatataaaggcaaaattggaaaaagaattgcctcactgtaatgtcgattaatacacatgccctttttcccattcggtgatgtttgcttcaagaattaacgctcaagaggggttgaaagggcaagactttcgaaatacttcatggcgcatccccttcgtgtatctctccctcttcaaatagatcatcataagcaacaagaacacgaatcctgtctgctaatggtttgcgttcagctttgttattatcaggtacatgtggtgacttctccgcgtcaattaaccgctcaggatcatccgatacttccttttcaccatgtggttcaatatcctcgtcaattagcgcacttccctgtgagcttgcatcttcatttctgcttgtttgcggcctgccttgtttgtacctgaattgcttctgaaaggagaaagcaggtaaatcaattaattagtaattaaacagtggtagtggtacaaagacgtaaacttgtgatgaattattaacagctcataatacaaaaaataccatcaataacaatttacgtaaaggaggtttagaaatgactcatgatcaacatagttggcttggataatataagtttgatggttatatttattttacgtaaaggatagtaatgaaagcactaaaagcatccaaatggaaggaatgttaagaaaaacaagcatgttcatgacagtgtcatacctcaagctcccttcccttcgccataatttccttatatgcctttggctcccgtgacttcaagatgttccacaggattccaccaccggtgcggaagcgacttccatcagcaacaatctggcctccacacttctggatggcctcaacctggaacccaatggctttaataataatagataacaacttcagaaaagtaaaactaagaatattacatactattcaccacaactgtgatttaacatcacctacaccaatttatccataactcgaatgatttttgggcaatctagacatttcatgtttttcttacatacaatctgaattatataacatatacataactatgaacagaaacttaactgcaactggatttgccaccaatcaagtacgcagattgcaaatattattcagactcttctgagaaacgccaaacttctcaagtacacttaacaaactaatccatgtaactgcaa

SEQ ID NO: 18498 - DNA, 1220 bp, Oryza sativa
ccccccatgacagtaagaagcaaatgcaattctctcagcaagagataatcataagagaagccaaaactcatgtatcttagcaagcctagccctcttaaaactccagttttttatagccctcttacaatttttaaaacaagggatagacgttttctcgcacaaaatgcaagtatcagtctgaatctattttatatcaactaaattaaaacagaaaactgcagtagtagggggcataattgagttaacgtcagtaggaagtctctttctcgcacaaaaaaattcacattaactatcatagatacaattgtggcacaagtcgatttgggtttactgctcccgacgattgtggacaagccaaagttaaaagagctcataagcatcaacccaaactaaaccctaggttagcagaaaaacgagggtttatacctgttaatgtcggcgatcttgggcggcccgtcgggcttccccttgttcttcgtcctcgcggatttcttcctcttcttcttcttcttgttcttgttcttccccgcctgccccacgccgccatcgccttctcctcctcctcctcctcctccggtggcggcggcagtgggggcggtgatggctacaggatcctcctgcgcctgcgcctcctatacggcgtcgtccgcgtccgccatctcgacgtcatcgccgtcgtagtctagggcttcctcgtcgagcaccgcgtccaggacgctgtcccctccctccatgccggcgcgggatcctccaccaccaccaccaccacgatggggcgccccgctagggcacgaggtgacccacacacgctctcggtgaccgtctcctcccgtcctctcctcgccgccgggcgtagggcgaacaacgatggcgatgaaggagagcgcagcggaagcggcggcgatggatggaggggggaggaggcgcagcgcagagtatggaggctttgctccacctttggttaggccttgtgggcctgctactgggctgctcgaccctgatatggactatggagcaggataccgacttcaagatttaagctggttccaactccctactcttgttttccacacacacgcttttcaaactaacggtgcgttttttataaaaagtttttatacgaaagttgctttaaaaaatcatattatctatttttgaaaaaaattaacaaatacttaattaatcacgtgctaatggaccgcttcgtttttcatgcgcgg

SEQ ID NO: 18499 - DNA, 1893 bp, Oryza sativa
cttcgacaccattctccttctggaagttctccaaaatacagcaaagggtcctctcagtggcagtcaatgttgagttcaacatatgaacgaattgcttggattgctcatcattctgcaatttgaacatcaaatcagtggcaataacagatgacttttaagataatttgatctaccagcatccaagtgaaaagatacctttttctggccataacctataccaagtctccttgcttgaaaatctgtgcaatttgagcaggacactaattccctataggtttttgatgcagggaaccatgcttctaaatcatacttcttagctgcagcatcattaagagcaccagacacaatggagacaagttggtacggtaggccaatctgtataatagacaatgaagaaatgattagacatcaaaagacagttccgcatgtaacaaggtgcttaagatgtgtgaagcttccgatgtctacctccttgtagaaatcttctgaattttttatcatttcttcatgcatctcccaggattcattgtcatttggacttgtaacacagaattgctcaatcttttcgaattggtggactctgaagataccagccgtgtcccttccatgtgaaccagcttctttccggaagcaggtggaatatccagcatatctaaattggcaaaactatcatcaaactgctagcgcacatcaaccaaaccaaactacctaaatttagacattacccacctaattggcattcagcaggataaattcgatcacctagatgatacgcacacagcggttgctcggatgtagcgatgagatacttttcctctccatcgcctgttagctgtcaaatgcaactatttgttatgaacttgttacattaaagaaaaaaaactgacctcataccactgaaattacacttgatcagactgaatgtatcatttccggactgcttaactataattactgcaaattcgtgaacatagaacagcaaaagaatatataaaacataatttaattcatgaaaacattagaaaccacaaccacgattctcaataccaatgatgtataaaaccagagtttcatttgacttgccttgtaaagctcttcgtcaaattgggccaactgggcacattttcccatggtttcctttctcatgaaaaaaggagtttgcattggcttgaagcctcgctttctcagaaaagcgagtccaaaatttatcaatgccaagttcagtaggacaccttcatcctttaaatagtaaccccttccacctgctacatcagcacctgcaaaaattggataggcagtaagtaacctataaatttgagagaccaggaaaaaatggcaacagtgggattctgtgaatagatcaaagatcatttttaattttaatcaaagagtgagcaattatccatatttctaaatgttggtattctactattctcccatccttggagaggtatatacctccctattgttctagtgacaaaaaaaaataaattgattaaactgattagaagataaattcatgattggtaatgacaaagcatttctgattcttgggaagagtacatagaggtatatataccacatattgttaattactccctccatcccagtttagagggcacatattacttttttgttaacatcccaaaacacaggacatgctggggctttcagccaaaagtgcccggctaatttgcatgcatgcatgcgagcgaggaggtattggtcgaattagttgcgtgtgcaatctgaccccggttaaattgacctattggtttcatgcatgaggaaaggaagtgcttgaactatctacatttaataggggtagatcaggaagaaaataaactgcatgcaagcttcttggtcttagcaaaatactaggctgcaggaatt

SEQ ID NO: 18500 - DNA, 1523 bp, Oryza sativa
tccccatgtccgtacaattaaattgttagcctacaaagaaagaatcaatctctatatctagatatataatttcagaggaattcagggcatctgtttcgaatttctacaattggacatagaaaaaccacaatcgatgaacctagcatatctcaatcaacgcaatgttgttcgtgttactaagccatactaaaatggaatagcaaaaactttttaatccacacaactatagggtttgcgctgaacagctgttctactgtctctgcattataaacaagtgccgggaaacctgcaaatctaacaaacttaacagaccaaaaactgtgctaatgatcaatagtcacgaaatctaagcattccacttttcaacacacctcgtcatcgctgacagggacggattcatgcacaatgtttccaatcgtcacgagcttggcatcgagcgtgcccttggcctcctgcacctccgtctccttggcagccaacctcttcttaatctcttccgtgctctgaatcagagccgacgcgtcctcctttttctgcacagcggcatgctcaccgtctcacacgcaaataaaaaaaaaccgcaatgtggccacgaaaatggatcggatcgagaagaacgtacagccttgagcttgccgatttccttgctggttttgttgagctcctgcggattttgtcgagctcgaattgccctgcggcgaacaagcataactagtggtcagggaagggacggcggattcgcaaggggttcgatcccgcccgggtgagtgagaagccccctctctcttactctggcgccactggtcgtcgagggcgatgacctcgtcgacgagctcgacggaggcggagcggttgctctgcgacctgcggatcagctccgggtcgccgcccttctccgtgcggaagaggttgatgtcgagcatcttcgaaggcgtgcggcggcggcggcggcggcgagcagagagggaagggtagacgaggagggttttgcagcttgtgcggctttctagggctgcacacggttttgacttttacgaggcggaggcgctcggagacggcggcgcgaggcgatggcgacggcgcgagggggaggaggcgggagagggatagggagcggcgcggggctagggtttgggtggggattttctttttctttttttaataccggctagaggaaaatgaagaaaaataattccacgtccattcatagggtatgtttacttcacactaaaattagtttggttgaaattaaaacgatgtgacggaaaagttagaagtttatgtgtagaaaaattttaatgtgatagaaaagcggaagtttgaagaaaaaatttggaactaaacttggccatagaatactactcccttcgcactttttcttcaaactttcaacttttccatcatatcaaaactttcctacacacataaacttcaacttttttcttcaaactttcaattttagtcaaactttcaattttggcgtgaaactaaacacaccctaaatacctatgatttggcctcaa

SEQ ID NO: 18501 - DNA, 958 bp, Oryza sativa
tgtgcataggatatgttgccatctccgtaacccttatctatagtgtactctagtcttttttttttacctcaccccttaatctccataaaaaaacacccgacattgctatatttcgagacgtttttatacctcaccccttaatctctgaagtagctatattttgagacggatagagtagttggcaattattttttaatttgagagtttatatgcccaaatgtatgttagaagtgcttaggtatgtttggataaaatatatttttgaaatttcataacaactttggatggagataaactttacataaaaggttgtacggctcgatgagagctacaactacaaaggttgatgccattttcatctgaaatcacttattagaatgtcaagttctcaaactattaactattgagagtctagtatagtatgccagcaagaagtgtcttacacagtgagacgataaggatattacatatggagagagggtatactggatttgaatcccatgcaccatgcgtatttcacaagattgcgtattcacctaaacgactacgaattcaatcttgcaagcaccaatttctccgtgtttactctttctttacctcgtgaaaacaggcaatcacacgccctgcttctgtctacagcatggttacccaggtagtcaggttacgacggtagacactcgcatttcgttaccgccttgcaaagtgaattcacgttcaaactgaacaaaattagcaagtatcacattaccattgaactgaacgcaatatggacatgaagtacagacagttaagactacggtaaaattgcacaagccatcaacttttgacgatgtagtcagtatcgacaggtacacgagttctgcactcagaagtcaagctactactggtctccaagagctggattgttttattagtagagctgaaggtcatcacagctgatagcagggctgcaggaatt

SEQ ID NO: 18502 - DNA, 2884 bp, Oryza sativa
aatctcgcggtttacgtccaagtccaacagatcactagctacactgaatatctggactctgaacatgaacagggtataaaacggaagatgatagaacctcacgcatcatgtaaaatagcagcaatgcatttatcatattatatatgtagctacaaactacatatagcaagctataagtatgtacagcaatgatggcaggtaatattgccatatcaattttcctgctatggtatgtacaccagagaacgagaacaatttagatgatttgggatggtggagcatctgaaataatgcacagttcttcagacttcacctacggttcaagcactactgcccccaatcgatcatcaaactacaggggcaagagaaaaagataacttgggtatattgcaggagctgagaatatttgctaagttttcttcacctatgatttaagcactaaaacccctatgggtggaactccaggggttggagggaatgctggtgcaagcctgcgcagcaacctttgccatcgcttcagcagagatgccagcattgcagatgtttgcaaaggaacgcatatgcttcattccatactgcgctagcgagccgcattgtgcttcgaaagtgcgtacctgaagaaaatgcagacccatattaggtgtgctggtacaaaatagattatcacatactaactgctgaaaatgcgagatagcacctatatattcactagttaagagctgaaataggtatgaaactgaagcaactgtctagagcatccaaaacgtgaaactgaacagtttatatgacaagccgaaagtcaaataaaggcttaccatagacttgagacaactccagtcataacaagaggttcgccagttgcacgaacagcctttagaacccttgggccttcctcagagccaaagagaaggtttccgatcagctcaacactgttgtcaacatgagatctgtgtgccatcatttcaagcaattgcttccgagcttcgtttttctcaggagaactctcaggcaatttgcggtactgcacacagtataaaaggaaatcaatcagctggtttattcatggaatgacaaaacacatactgcaacaacaatcaaggtcagtagattcctcatgatatgcagaccttctgccagaagtaaaccaggtcagcatcccgctgattaacagcccttgagaacgatggcaacgagttatcttccacaaatgtagcattgtcgttagccggattggaacccatgtacatgaacacatgatgggcattcagctctaaagaaccgtattccatcacatgtgacccagagtaatatgtgtgctgcacagatgtcctttccttgacctgctcagccattgagctacattaggcacatggtaacacgactgcgagttcaaaggaattaaggtctgaaatacttacgagattgtactgctgcttgagtgattcagttctcaggttgtggacatcgctgtcaatgttcatagtaacaaaatattagcatagaaagaagcggctaaaggttcaaacaagaagttgtttggatagaacttcaaaaattaatgtaaaacatatggtcttcatggctggatccatctcaaatgtatgcacagctggtggcatactcctattagacagtggagcagaacaaacaaatcaagcctcaaatttccaaggctatcagattcatggtaaacaggtgaaatccttgtattttggctacagcctacatgacaacagtttcaaataggcctaggtaggagcattgcttccattctactaaaaaaacctcagtcaatcttcagcagtagaacgtgtggacagttttaaggtgcgccacacctgatattaacatctggtcaagctgacaagctcacagagtggcctgtggattctaatatttgctccatgttatttctattagctttcataagtcagatagggattcagcaacagtcacatgcttttcctattctttaaaaagaagctcacaacataccccactacatgttatgcaacatcataagcaaatcagcatattgtgcccagcatgtgcacacaggagtaaacaaacacatgcatatcgttagtgtcttaaattaacacaacaggtagccaagtagtgtcatactaattagaaaatcatttcaaaagaaacgcatccgtacagaatctgaaagtactaggtgatgtgggtgcagccaaaactggttccacatgagtgaaaactggtaggataaggataggattgtatcataccataatggtagaaaagacatagagataacagaaatgaagtacctgtcttccatccaagcaacgctgtacaagtcccctaggcatgtgtcgtactccggaggtgggctcgggtactccccagggcagtatgttccccagctgctctcatcagcgtttgatgcagtggtggcataaacattgatgccatttggcaatagaccctcaaagatgcttccagattcacaggcttcaaggtaaaagacctgcaaaggagataacagattcatcaaatcaattctacaactacaagcagcagcaattatatagtgcagaatagccaaataactaatctgataccaggcttttgtacgtcccagcagcatgcttcttcttcagaacatctacaagatcatcaccgtagaggtatggataggttggcatccctgaaattttggaaaaagtcaaaacaataagaccatttcttgtttcacaagcatgaatatagcgatatctgatcctattggtttcatataattgcaggcaagtactcaccaaggacaccaggacccccatggtcactgtaaaaaatgaaaatatgatcgttggggccactgtccaggactttgccactcccacctttgacagcagtt

SEQ ID NO: 18503 - DNA, 4246 bp, Oryza sativa
tttgttgtcattttaatatattttaataataaattgagaatatatatatatatatatatatatatatatatatatatatatatatatatatatattattgtatgcgagaaaatataatgatactaatcacgtaatctgcgagagccaccatgctagtttcttatacgttaggagggaggggtaccaagaaaactctaaacccgtgctcacctctctcatcaattctcttcattggtagcgcctcatgctaagcttaattttgataattatgttaattaaaaaaataaatttcgggtagcgtgtcacgcatagccagtcatcagtgtgcaacgcacctagtagtaagttctggactgtggggggtgtagatggaacgaccgattgattggctgactagctaagctagctgtccctgtgagtcatcatctgttacaactgattaattttgttactacgtgtacgtatgcaaccgcataatacaaatatattactactagtaggtcgtagaaactagccacgaaatacacacctgcaagctccgcaccaaacgtacgtatacctacctagctactttgccaatgttataacagctagccgtggcggacttgcacctattcttaatttatttttgtactaaagcagatgtatttaatcaacctgtaatagtagtacgttggaggaaagatgcaaacaacatactcttttcattttaaaatataaatatcgacatcgtcctgtcatttccgccggcgccggagctatttctcccgtcgccgatgttgtccaatcttcgccagcccgcgcactacagcgggtgagtatccaagcaccatatacccacatatgcatgcacgggtttgcactaaaacgggctagagttcgccatgcactagcatgccaaagctcaccgccgacactgatttcggttatcactgtacacgagaccaccaccattagcttcgcaatcctccactctacaaatcctctttggccgcacctcacgaaacccccactctacaaatcctcttttggccgcacctcacgaaaccccgttcaccgctggcgccgatgacaagcttgccgaccaccacttcctctgctccttctcacgccgagtcattgccatgtaggtctaagggcattcctgacatttcacatgatttctctctcctcttcaatcggaaattatttagtcagcacggtgtccactggcaaaataccatgattatgaagtgtccccccaaaaaaaagttagtattttgcgttgtcttagggttaaaaccatataatttcagcgtcctgtagcaaaatttgtcttctagtagtagagtcaaagttttcatctagggtccgtttatcatagatttcacaattcttagtttagatggttaatttgtcgatgatagccgtgttatagttttcacttttttctttaaaaaaagattaaccattttattgtaaatgttattgtaaaggctggcaaaataccacgattatagattgttttctcccaaaagttagtttttgcgttatcttagagctaaaaccacataattttagtgtcatgtagtaaaatttgccttatagtacaatcaaagttttcaactgggtatgtttatcatagatttcacaattcttagactgcatggtttggcaatgatagacgtgttatagttttcacttttttctttaaaaaagataaatcattttattgtaaatgttattgtaaagactggcaaaatacaacgattatgaagtgttttctctaaaaagttactttttatgttgtcttaaggctaaaaccacataatttcagtgttctgtagcaaaatttgtcttatagtagattcaaagttttcatttagggtccgtttatcatagatttcacaatttttagtatgtatggtttgtcaatgatagccatgttatagttttcacttttttcttaaaaaagattaactattttattgtaaagtttttaggtctgatcttacatatgaattagattatctctattcttctctcgaaatttcacaaactggaactggaagtacatccaagataatggcctcagtgatagtttcctgttcatcatggccatccactcaagtatagggatgaaaccggagcggatagtttccgtccgctccggataaaaacgaatacggatacctctcggatcggataattctcggatagttcggatacggatacgaatacggatattttctctcggatacgaatacgaatatggtatcagggtttccgtcggatacggataataattcggatatccggtgaacagtgctattcggatatccgcagaagccacaagacataccccatttctttataactctatgaccttcaatatacctttttagattttaatagtagttcatctcttaacactagtccacattattaatattatttaaaattttaaaaatatttataaattatactatattttatataaaatgatctaattatatatgttgatatttgtttctattagaagttgaattggttttcgtgttccgagaaaaatttgtttccgtattcgtgtccgatcatattcgattcttattcgtattcgagatagtccgtatttgtttccgtattcgagccatccgtattcgtttccgtatccggcaaaaaatatgaaaacgaatatggtatgagcattatccgtccgtatccgctccgttttcatccctactcaagtacccttgtaaaacagagagggcaaatcagaaatcctccattcctccccactcccactccccaccatgacatgtgggccagggtagctggcaggtaggtcccatctatccgtggagagagtcctcagtgcgctcggctgggctgaaatttctaccaagtcctcttcgcgcaatgaatgaatgaacgaaggaattaagggtgaatctttgagattactcctccccttttggatggggatcgaattagataggagaatctcaactctcgcagctctcacaaacgtcacccgcgacatcactccccgaaaccaacccatcctttttggcgacggcgactcgcatgggggttccttgcacccgtacgtgcaaccatcgcgtggatcacttggttttgcttggccggcacgaccgtattaatcacgttcctagcctcactaggaacttgggaaagtaggatcgagtaccaagttctgtgtgcagtgtctggatcaactatcaacgttttgaaaagctggcgtattaattcatacgtatcccatgatgcacacctgttaccagtcggggacgcacagatatatataatgaaacttgggctaaaaaatgttattgctgtgaaaagttaacagttaaatttaaagtagctagagtaaactacatggctagtccttaaatttgtcacgagatattttagtacttgaactatttaatccatggtttacaaatttaacaatgtgaggtacaaagtgcaattgatagagccaaagcgttggcatggccatccaccctggcagaaccttttcatttagcccattcactatataaaatcgatcatttagttgtataggccacatcagtgtcacacaaccatggtgcgccaccgataaggcactggatctcccaccagacaatctttgttatagttcaaatttaacttgaggttgtctataccttaaaacttggaggatcatagggatgaagagaccggtcgacacgttgacgccataggtaagaggggtcgagacaacttaaagcagtggtgtagccagctaggtgataccgtggtctatggaccacctaaaaatttgaaattatagtatatatgttagttaatataataaaaattgtatagtggaccaccctttaaattgacatattacatatagatgaaccacctttactttaaatcttagctacgctactgtcttaaaagaccggtcgtatatttactccttaaaatattctcatatagtcattttattttgataatgaacgttttttttaactccggttcggctcatgcatatgctatagagttggtttgcgcttgaaataatcataactgttaagcaagagaaacctagaggatgtacgtattagtaataagatgtttttgttagatggatctccctccccttgagcccaacggctcaagggggccttgacccgcgccctgatcgggggcgcccagcccaatggctggtgggcccccgtcacactgtgccatataaagaggggtggag

SEQ ID NO: 18504 - DNA, 4223 bp, Oryza sativa
tgtaaatagaaccacccgactagatctaaacctaggtgatccaatagacaaccctatcaatggtatcagagccatcctagcgtttagtttggttcggggatagacatccacagagaagaaagaaatccaaagagaaaagcaaacgatccaacggatcaaaaagatcgaaaccctaaccctaatcttacctcgtcgccggccgtcgatgacgccggccacggaggggggaggggcaaagaggcaccgccgaggagccactcgacggccgcgcgcgcacccgcgggtgcacgcgcgcgccggtgagggggcccgcggcggcgccgccatctccgtttttcggccgccgctctctctcacacggtgggggctagagacggtggagggagcggagaagagaaaaggaagagggcgcaagggccgctggcggcggcgacgccgctccgctcggccactccgcccggcggcgcgctagagaaaaagtgggcgcgcggcagcgcgaggtcgccggccatggcgcggcggcgcaagggtcgccggcgtagatgacgccactcggcgcggccgcacccgcccgcaagagagaagaggctagggtttcggccggccggcggctggggtcgggttttttttttgtccctccgatctcagcgcccggccgtccgatcgaaaccctagcgatcggacggccgacggcggccgggccgaaagcggcccaagtggggagcgcgcggcggcggctttcccggcccaggcccaggttgcggcctgggggaggggagggggcgctcgcccgcgcgcaaggtggccatggaccgaccggcaaaggccggaaaagttcaatttaggtccctcggggccgaaagaaaaagaaaagaagagtttaataataggtcctctcagaagctttttcaattatgtataattattgtgattatttctaagcaatttgaaccaacgtgaaaattgtttagagaatagataaatgtgagaaatgcttctgaacatgtattttgtatattttcatgcaaattacaatagaattttgaattgtttttgcatgttttagctctgtttaaatttgaaccaacgggagaattttacagagagtaaataacagagtttttgttattgtttatacgaattgtacatagatcttccgctgcaaatagatgaaattgatgaaaattagtgtttctaaaattaaatttcgaaccaacgggagattttaattttaggaacattaattatgtgctatgatgttgtaatttttctgaccaacgttgataattgcaatgttatagttatggctttatgtgtcatgtctattttctgcccaacggtgatgtagacttaatacataataattttaatgttaattttgttctcacaatacatgattatctcaggtggctactccttgatgggttacattaaagatattccgaccctgaaaggagataactacgaagaatggaaaagagaactcgaccttgcctttatcttgggagaggtggactgggtgttgactaccccatgtcctatagaacctgctgaaattttcagaggtgaaaaagagtcagatgctaaatggcaaaagagagagagggacaatgcttgcctcatcatgtcgtatgacatagagcatgcgaaatggtcttcagccaacaagaattgtttggctgcggtaaagaacacgattgagccaaccatattgggctcaatcccagagtatgacactgtctctaaatacctcgaaagtataaagagccagtttactggttcttcaaagttttatgcgacacagctgataaagcagcttgttacagagaggtaccatggaggtggtgtaaaagaccacattcttaggatgagcaacatggcttccaaattgaagcaaaaagatttgggcatctcagatgactttctggtccatctggttttgtcctcattgccaaagaactttgacaaccttgttgtcaactacaaaataagtacagagaattggaatattgaagagctcatctctaattgtgtgcaagaggaggaaagacacaaagagaccaatggtgactccattaaccttgtcaaagataacaaggaaaagagccacaggtcaccctcctcaaaagaaaaacagcctcagcatctgcctcagaaacaacagtttacagttgagacaagatcagtgtctacactgtaagaagacaagacattccaagaaagatcatcctgacttcctgacagtgatcatggcaaagaaaggtgagaacattattacatttgtaaagaatctcattatgattggttattctagatccacatggtggatttattctggagcaactattcatgtgtgtaattgtttaaagggattccattcaatgaggactacgcaaagaagtgaaagatctattagagttgccaatggagttgaagcaaaagttgaagctgttggagattttcgcctagaactcgcgaatggcttcacacttttacttccagatgtttttatgtccattctttgcaaagaaacttgataataagtgtatccaaattggattctgatagatatgaaatggcaaatgtgaactatggtataataatgaatgtattggtcttgtgttgcaagatcagctttatttgttatctctttctgagaatgtgaatgttgtgtcctcgttgacaaaagaaaagaaaagcgaacttctgatgtctcatcgaaattatggcactgttgtttatgccatatttcgagggggagaattgagagactggttaagaatgtagttcttcctccattggagttctcagttttagaacgatgcatacaatgtatagaatgcatcggtgcccaaaacaccgtatgagctatggatcctccgtgtgtggggaagtcctgcaaaggataaagtatttaacccaaaacagtaggctgccattttattggctattctgaaagatcaaagggtcatcgtttctactgtccaaacagttatacaaagtttgtagaaacgagacacgccgtcttcttggaagacgaaatgattagggggagctcggtaattcgagaaattgatcttgaggagaggcgggtgtctgtacccgctccgtcgactcaggaacctttcttctctctacctgctaatgttgtgccagcaatgcatgccgttgcggtaccaacacctgttgttatctctcctgtggcaacaatgaatgaaagtgaggaacctgttctacaggattcaacagaaattattgccacatcagaggaggagctgcaacagcctcaaacagataatgtgccagaataggaggcccctagaaggcctgaaagagtcgcatatggaggatgatcccatctcatatgaagaggccatgagaagccatgaaagatgaaatgaaatcaatgaaattaaatgatgtctgggatttagaagaaattcctaaaggagccaaaacagtaggctgtaaatgggtctacaaaaccaaatatgactccagagggaatatagaaaagtttaaagtgtgacttgtggcaagagttttcacgcaaagagaaggcattgattacaatgagacttttctccagtctcttgtaaagattcctttatgattataatggcactagtggcacattatgatttggaattacatcagatggatgtaaaaacggaatttctaaatggtgatttgaagaaaaaaagtatacatggcacaaccgaaaggtttcgtcatgaaatgaaacgaaaatatgggatgccgtataaagagatccatttatgggttaaagcaaagcttcgagacaatgctacttaaagtttgatggaacaataaagaaatttgggttttcaagagaatgtagaggacaactgtattgattcaaagttaagaatgggagactcattttcctaattctgtatgtagatgacgttctactggctagtagtgatgtcaatctactgcaggaaataaagaaattcttgtcctcaaactttgacatgaaagacctcggtgaggcttcatatgttttgggcgtagagattcaccgaaatagaacaaagtatgcattgggattttctcaaaaggcattgtcggtgatatgggaccgggagtatcatgaccagaggcttgaggcagacacaatcgcccacgtggcctggcaccttcggggacgtcgggcccgagggtgaggtgtccgccctcctcctgatttcccccgaggg

SEQ ID NO: 18505 - DNA, 710 bp, Oryza sativa
aattcctgcagcccacgggagataaattacgggaattcatacttctttaaggtatcttaacagaaaaacaccaataagttccattgcggtcttcatattactgcctagaagtttactagagttccttttgcagccaattagaataagtgacttgaagaaggtggatccaataagagcgtgtgaatatttcaacaattgcttcaaggatccatcagcttttactgttgtaatagttggaaacatagacccatctatctcagttccactgattctgcagtacttggtatgttctgtgccttctattattgttcagaggtgacgaataacagttgtaatgctggttgagtctactttgtagggtggaatacctaacgtagggaatgcagttctgccacttactcgtgatgatctaaaaggattgccattcaagtttccggagactattattaggtttgctactgccccttttgcactagtttgcctgcattcgttttatgtccttcatgtgtatgcaggactaagaaaccatacagttttcttttttagatataaagttgggtgtgtgccgtatgggttttacccttctttaatgcaatgatacgcagctctcccgcatgttcgataaaaaaagttgccttatgatctattatagtcttactataaagtgtgtcatttttccagagaagttgttcgcagccctatggttgaag

SEQ ID NO: 18506 - DNA, 1609 bp, Oryza sativa
tggtggatttagcagagacgcaaaggttagacattcatttatcatgccatttgcttcaatttagtctttacccatggctcttcctcacctcaccattttgagatccgtctttcctgcagattttggctggcatggctggcgcaatagtgttagcggtcagtttgtggagatactcacgtagcacattgagatcatagcacgtctatcacgctctcgactgttttagtaagatccaaaaatggatctgtcaagacaatcatctgcttgactccaggtacatgagctgacgacaagattttggtttcctcctgggatgctgcttcctatctgagagtggatgtggtgattgtccgtcacagaagaaagtatacagaaattggtagctaacagattcattgccgcatgcgtgcgctaagcctgtaacacaacaccatacgattcttttgtcgcagcatacgtgccccgtaacagccactgatgtatattgacacctcccatttcatttgatcctctagactgcaagtaggaaacggcaggttgcatgctattagctgaagtagtagcggttttgtttcttggtgagctttggatgtgtgtttgtgggaaaacccagaatgataaaagaatataggagtaaggatgcagacatttgtatgcactgtatttgttaccttcacccctattctttccgtgttctgttccatgtgctctttgagtccaaagttagatttctgctttattttttttctttctgttgttgatacgatggatgataatggacttatcctgatgaatagtactccatgatttggatcgaaaaggggagacgtggcgatcgaagcaggcgcagggcctttttaccccaccgtcccacgagcagcaccgaccaaacgtgtgatttggcacccttgcgagtttttttttctttttttttggatactcctagtatatatgggcgagagatttctcaagggaagaggagaagatgtgacgagacattgaagaatccctctagaacactcgtcacgatgccgaaaaaggcgttacacggatagactagaccaagagaaacaggagagagatgcgataaaaaccagaggcaaagcaaaggaaacaacaggccgctgctatatatccgcctcctgctaatccgcgactagggagtgaagagcgaatcaaacaccaccaccatcgccagcgtcattcagatttcagagggagggagggagggagagagaaaggaaggggaagtgggggagaaggaggggagaggatggcgtgcctgcacgaccacagctgcgaggatcacaactgcgccgccgactggtcgctcttcaaccacatcgacgtccccaaggtccctctctctctctgcccctcgctcgcctggttgatcagatggattggcccccgtatcactcacttcgtttgatgttcctctttgaaattgctgttgatgttgattccctattagttcatctatatatccgcgtttaatcgtgcggatgaaaaacaaaagacgaaatctagagatggcatgttagggcaatgggtttgattttttttgtgtgtttttttgatggtgtttgcccttatactgctgcatcat

SEQ ID NO: 18507 - DNA, 1568 bp, Oryza sativa
atatatctgtgttttccccactgtttttcttactccaatcaattggtgctttgtgtacaagctcgaaaggaacacacaaccacatcctgaactattttcgtacaatcatcttctgaatgcaggactgcagtagtgtttagaccaaaactgtttgatgtttcattagtaagaacatgtagcatatggacttttagttttcatcctttgtttgtgttattgttctcagctctcactacaaggtatagcttgtgcatgttgaattgattgatatacccagcagccattaagttaaaaagatgtctgtgaaggaaatagacatccatcttgttggttagtgttattgtactcagctctcactccaggcctgttggttagtgttattgtactcagctctcactccaggctagatcttgtgcatgttgaattgatagatattcccagcagtcatttatcagtctgtttgcgcttcctttggattatttttgcacatccttctatcaattgtttgtgcgaaagcttcaatgctctttaaacatgcttgcgccaactgcaagccagcttttgcacaccatgaattgtatatatgctgtgaaagggtagtcctcaataggtaaactggatgctatagacccatccaaaacattttcccccttccattaggatattatcctggaaaaaacaagtagtgctcggtccgaattagaaaaagcagagataacgatcattcaatatgcttgtcagtgcttcttgtgctctacttttgcagaaagttcatgtccagatacatttagttttgttgatacatctatttttgctctccatagcttgctgtgtagacttgtgtatgaggtaagacttgggtttttaccccttctattctgtttataatgcctatccagaatttataaatctgtgtaatcctttgtaccctttggttgtaggtttacatcagacgtcaagatcaagagcatctctgttgttggtggtgcagatggaacaagcccttctagaatgagagcgttagtctcagagctctatcttttctgttacttgactcatctatttgtccctctaacagaatgtaatggtacaaaatttattaagaataccttgacatatgttacaggtttatcaaccgagaaggcattgacttcaatgatgctcaaaatatgcaacctgtgcaggtgtggtttttaattttcttctcgtcttatccatgccataataagaagatatcagctgtaatttgaggtggtatttgtttgattaggaatgggagctggcagagaatttgcagggagttcttgagtaccaaacaaggtttttccatttcccgtttgttctggtctagtatgctggtcttgctaacattcatgaatcgttcagtcaaattgtaattttcaagctaaaaaagtgtgtttctgaatattgttccattaggcgggcaaaatttagtgggtatacgcaatactctggtgctaggcactctgaaattcattatatgctttcattgatggtaatgtgaaccgatactagtagagttattttgcactgacggtagtgaaatt

SEQ ID NO: 18508 - DNA, 691 bp, Oryza sativa
agggagtagtatcttttttcatcactgatgcaggcattactgatttcgattaagaaatggaacatgacaacattatatgcagctaataaacaatcttcacgcatctgacggctgcacattgggggtgcaaactgataggcaataattcagcaggaatgcaagaatcgggtctatctatacatttgtttttttttttcgaggaaaacggggagctttattaattaaagattaggagggatacagtctttggctaagctctccttaacacactcaggcgcacagatacgccacaccgaagattgcttcaggcgcctagccaactggctaaggcaatgagcaacttcgttagctcccctattaatcctattaaacttaaaagcaggaagaagtggaagaatcgacttgatttcctggaagacctgccacaaaggcgatctgttcttagctcccgacgtaaggctagccaccacattcgcacaatctgattctaggatcaccggcatctgaatccagtctgctgctagccgtagcccatccctgcacgcttgagcttcagcttcctcaggcgactgacagcttcggatcccattccatgaagtcaggaggacatcacccacatgatcacggatgacaattccagtacctgcttctccgatttgctgcacgaaagctccatcaacattaattttag

SEQ ID NO: 18509 - DNA, 1684 bp, Oryza sativa
attcctgcagcccgataatcggttgggacggccggagcaccatccccggggccttgatagcatcaaaggccgcgggggaaagaacgttgagagccgctcctccatctatgaggacacgccccaacttcacattgcagatggtgggggaaaccaccatcgcaatctgccctcctgggcaacgcacggtgggtggtcggtctggtcaaaggtgagggccacctccgaccaccgcgcccgacgcgtcacctcatgagtaggggccgcggcgagaagctctcgcctcatggccttgaaactccggcgagaaacgtgagcacacgctcccccgtcgacagtggcaatggtggccccaggttcttggaaacctaggtcatcatcaccgtcatcgatgtcaacggcgggggccttctgtttggcctcacttcgccgtttaccggagggaactgccgcggacttgccctcacggcgttcctgcctcctgtcctcctcccacttcctcgttcgctcagccaagtttttgactgcgcgacagtccgcgagatcgtggagggaggtgttgtggacggagcaccacttgctggctgggcgctccctgctgggagtaccagcctctttctttttgttgctcgcaggcctcccctttcgggtggcccgcggagcgccctcgacggcgaggacgtgaccctcgtcgccggaatggaccgaccttttcttcctcctcctgtcacgccgccctgtctgagcggcggatccgggggcggccgaagctgccacaccggaaccggaggggttccaggtccaggcctcctccttacgagccactcggtccgcgagctgaaaaagctctgcggtagtctggggctctttggaggcaatcttttcgagcatgcggttgtgccgcacaccccccctgaacgcgtagatcaccgcgtgtgcagggatgcaaggtatagtattgcggacttggcagaaacgctgaatgtacgagcgaagggattcatcatcccctcgctgtactgcgtgcaagtccgcttcttcacctgggcgtggataggtgccttgaaagttcatggtgaactgctggcacagatcctcccaggagtggaccgacgcgggtggcaggttcattagccaaccccgcgcctgtcccttcagggccatgggaaagaaattcgccatgaccctgtcgtctcccccagcggcctcgatcccggtcgtatagacctggagaaactcggtggggttgacgctcccatcatacttctcggtgatggtgggccggaaccttgggggccaacggacattccgaagactcgccacaaaggctctacagccaacaccaccaaccgggggcacggagggctggtcctcacgtccatgtcgaggtgacactctggacgaagaggcgccctccgttgcgcggggagtacgccggctattacgccgacgctcgatgtcgaggcgggcatccggctctccatgctgatcctcccgagtcggaggtgccgacgagggagtggcagccgaatggcgtgcaacagccgccgctcgccgcgccctccgtcttgacgacgcggaaccggtagtggcggcgccggaggtcttggtggtggcggaccgtccaccagcacccaggcgctgctgtaccgtcatgaccaagttggccacgtcgtccagccatcgc

SEQ ID NO: 18510 - DNA, 2059 bp, Oryza sativa
gtgagtggaaagttcacgagaatggaagaagcacaagacacgggcgatgtatacaggttcgggccgctgagaagcgtaataccctactcctgtgttttggtggatctgtgtatgaagaagctacaaagagctggagagccagagagctcttactctagaaaccctcttctcccttttttcctctcctgggatctactctccagatccttttctctttcagtcctccccagagtcgtccccagagtcgtccccctttctaagtgggcaaggtcctccttttatatctcaaggggataccacatgcaccatctctctcttttgtgtggggacttatcctatcttttctccaacttgacttgccttctcttcataaatggacggagatttgtatggttaccgtccgaatgaccttctgatgggacggcccatacctacctccacttccgccggaagcaggtgcgacgtgggaacatggctgtctgctgacgacatgaccagcgtcagaccggtcacaaatcggtcattcttgtccaccacgtgtcagtttagcaatctgcatgttcgcccttcttcatacaatatcttgcttgtaatggttaggatgaagcctggcatatatctgaccgggtccaacgtgccacctccaggagctaacacgccggctccggctagggacgagtgcttggaggctctcatcctgacgggatggggcgaggcgtgcgtcagaccgccagtcgccacctaacccatgatctgatcggtctgtgactggtcacagaccggataaaagagcgcgctgcattgcgctgcatgcagcgtgacacgcttgaccagaccgcaataaatgcggttaggtgagccctaccgtgttcacccaacctatgtacatagtgcaaaccccacaaggggtcggggcacctcggccctcggggccggggcaggagcaacccgaccccccctcggggaaatcaggaggagggcggacacctcaccctcgggcccgacgtccccgaaggtgccaggccacgtgggcgattccatctgcctcaagcctccgggcgcaatactcccggtcccatatcaccgacaggcggatttggggggagaagcggtgccggtagggaggagaaggggcgcggggatggcgaggagaaacgacggatttattattattattattattattattattattttgggggggagcggcgcgggaatgaggagtgacgggttttttttttttttcatagaggataagcacgaaggggtaagtaaaaaaatttaactctaatttcgttcggctaggagttctggcttagtagagtactgtgggtcacgtgcactgtagggtgcgtagctttcgggccaatttcgtcgcataaatagaccataggcacgctatgcgtgtcttgcactgctcgtgccctaaggctcctgctttctgtttcacttcacttttcttggtttgctttcttcgtctttttcctaatctgtgggactccgtgaggagaaactcggcaggactgctttcaaggggaaaaaaaagcaacgatacaatccatcctattttttgaacctggtgaaacagtgagtgcaagcgtgtggcgcgacatcattttccattatactccctccgtccaaaaaaaaaaaaaacaaaccctgggtttccgtgtccaactttgactgtccgtcttatatgaaatttttttataattcgtatttttattgttgttagatgataaaacatgattaatactttgtgcgtgacttgtctttttaattttttttcataattttttcaaataagacggacggtcaaacgttgggcacggaaaccagggtttgtctttttttgacgaaggaagtactgtttagggctcctttaatttggaacaaaagattttgataatacaggaataaaaggaacataagattaaaatgttccgtagtactaaatcctgcatgaattgcaaacacctgaatttgataggcgatactatgtttgaatagctcacagaaaaataacacgcgaattcggaagaatcagggctgcaggaat

SEQ ID NO: 18511 - DNA, 939 bp, Oryza sativa
cccataaagaaggggttggttgattcttgccagatttagagcctagagcgggggagaagtgggctcacactttgtagctcattcatacacaaatccacaaaaacacaggagtagggtattacgcttcgcagcggcccgaacctgtatacatcgccatgtctcatgtgtcttgccggcgagtaatctttccacatacagagagagcttgagatctcaccctaagcccccggccgaaccggcaaaggggggcctgcgcggtctcccggtgaggagccacgagctccgtcaggcatatatatagaaaaggtgttgaagaaattcaatatgtacatatgcagtgctacacctgctcctatagtcaaaggcgaaaagtatggggcatcacaatgtcctagaaatcagtatgagctcaatgaaataaaaataaagccatatgcgtcaactgtaggaagcctacagtacgctcaagtgtgcacacgacctgacttggcatttgttaccgggttatttggcagattgcaaagtaatccaggcctagaacactggaattagtaaagattatttgcaaagaacaaaagccttatgctgtcttacagaaaatcagaatcgctccacatagtggggtattcgaattctgactttgcaaaagataatacaaagttaacatcgggatacatgtttaccctggcagtaggagctatttcatggaaaagctcaaaacagactaccactgcagggtctaccatgtatgccgagtttatagcatgccatgaggctacggggcaggtgaactggctaatgaagttcatacccggttttaaaggtggttgatagtattgagaaaccactaaagttatactgcgataaagaacccacagtaatgtactctcacaacaattagtcaagtggtgctgccaaacacattgacataaagtacta

SEQ ID NO: 18512 - DNA, 2232 bp, Oryza sativa
cccccgccccggggaggaggctgcgccggggcgtcgggttccggtcgctgaagatggtcagcgtctccatggacgagccgctccccgcggagcccgtcggcgtcgcgtacggccgcctcgccaacggcctcgcctactacgtccgctccaaccccaagccccgcatgcgcgccgccctctccctcgccgtcaaggtcgggtcagtactccctcgctcgctgcccccaacgatttcgcgagtttgctttctgatttcgcgtcgtgtgcgggcttgacgcacgcgcgcgcgcgcgcgcaggtcggtggtggaggaggaggacgagcgcggggtggcgcacatcgtcgagcacctcgccttcagcgccacgtcgcgctacaccaaccacgacatcgtcaagttcctcgagagcatcggggccgagttcggcgcctgccagaacgcgctcacctcctccgacgagaccatctacgagctgcttgtccccgtcgacaaacccggcctgctctcccaggccatatcagtcctggccgagttcagctctgaggtgagaatgtgcttcccgcttgttcacggcaatggctgtgccgtttgttcatggtttgacactggtgcgactgatgcttggtaatggtggtgaaaggttcgtgtgtcggcggaggatttggagaaagagaggggtgctgtattggaggagtataggggtggacgtaatgctactgggaggatgcaggattcccattgggcattgttgttcgaaggctccaaggtattggtcaaagtcctcgtataattgttacatcaatctcctatatgcatgaaaaaaagttatgttatgtaacttatgttcaagtctagctcaagtaatttactcctcttatgctcggttttattggtggggtaataagttgtggcttatatcttcctatcagtgttgttgtatttggaactgcaagtatctaaatggtattgcttgttaatgtcctttgtctcagtatgcagaacgcctgcctataggtactgagaaggtgatacggactgttcctcatgagactgttaggcacttttaccataagtggtaccatctaagcaacatggctgtctttgctgtaggggacttcccagatacacaggtttgtatttgctctaacttagcatgctcaaatcacaatctatctgtatgttgactttcttttgtgcatcattatttactgcaggctgttgttgaaatgataaaggagcactttggccagaaagccccaccttcatgtcctccaccagttataccagattttccagtaccatcgcatgttgaacctcggttttcatgctttgtggaatctgaagctgcaggggttggtactttatagtgcttcaaatgtgttgaatatattttgctagtgactgaatgttttcattaatacacttcttttttctgtttctcctataccccaaaacagtcagctgttgttgttagctgcaagatgcctgctgatagaattaaaacggtgacggattatcgggattctctggcagagtcaatgtttcattgtgctttgaaccaaaggctgttcaaaatatctcgcaggaatgatcctccatacttctcttgctcttcagctgcagatgctcttgtacgaccagtgaaggcatatattatgacatccagttgtcgcgaaaggggaacagtcgaggctcttgagtctatgctgcttgaggtactttaaaactttggtctctgaaggaaaaatgagaaaacgattttctagtcaatactcgtactacatttatgcaaaggtcaggttcctcaaggttacatttatttaaggagaaacatgactttgttatagcataatgacagcagatctagagtgccaccagttgattcaatgtagtacaatgaaatgtgaaattccatcacaacaatatgcaagtgcatcactcttacttgattcacatatatcttggtgtactcaatgattagcgcatcttgcgaaagcatacattttgttattgttgggaaacaaccattttctcaatcttgagatttattgggatttcaattccaagagattcagacaagttttccttttcctgtgaaagaaaaggttgctagggttcggctccatggattttctgaacgtgagatatccattgcacgtgctttaatgatgtcagatatcgagtctgcatatttggaacgtgatcagatgcagtcaacaacccttcgggat

SEQ ID NO: 18513 - DNA, 1953 bp, Oryza sativa
attcctgcagcccgccttctataaccttctctccgccgccgccgacgaccagccaccgaatcgaagtgatggccgccgggggatgtaaggccctcgccatcctcgccgtcctggcggtcgccgccatctccgccgtctccgcggccgacgcgccggcgcccagccccacctccccgccggcgcggccgcgacgcccctcgccgcggcgctcgtcgcctccgccgccgccttcctcttcgccgccatccgccactgagccccgtcccgtctctccgtcgatgggagatccggctagtgccgccttcgcctagatctactatttttctatttatcaccattattattattgttattattactgccatcgctagctagcgaaatttgttggttattattattattattattattattattcgtgtctcattttgctccagatctgccgctactagtactagctagtgcttgatctgtgttcattttgtgtgggtgtgtgcttgtagatactctcatctgagtgttcttccgctactgattactagtagtatattattactgcttcaatttcattctcagttctatcttttctgcaattagtttttttcttcttttttttttcgttttattaagtactccgtacgaatctgtgttgcgatttccgaaatttactgatgcgctctgagtgagacgagatgctcatcgtcgagatgcagttggcgaagccgccatttgtgatgagcgaatcgtcagatctacgctgtttttttagcattgtgcttattttattttatcggcaagtgcattctggaagatagtgcgcgtcttcttttctgtggaatgttgtttggggggccaattctttatttgccactgcaaatctttcaggattattgttagatttggacagtgatacccctggaacatgcgtgttggcgtgggggattaggagattttagttaggttaatatataatttaacactagaactagtagtttatcgtttccatttctgcttgttcaaatagaacatctggtgtgatactgaccaatgaccagctatatatataatgccggcacatcgatttgatcagggatttgattagtgcaaaaattctgaaggcaaagtcgaaactccaattgatgatttagacattagaccttgtgctgcagaatgaatggaatccattaatgttttgggtagagaatttgctgacttctgttgcttcactacaagctctgcctttaaaatatgggctctgctttcacaatattggcgcatgatacgttcctaaatgtaagaggagtgatctcttatttttttttaatggagggagtaatataaaaaataaaaataaaatggagtggtaagagtaaacaagaaacaaaaactagcgagtaaacaaagaacaatgatactcaattgatatgattgttgctcatgaggtgccatggattttcttctcatttggaccgactgaccggtagtttggacggacttgttgagtttgactgggccggacctgccctgcatctgcatgccccattgccccgctgtctcctcttttcatctctcgcacagtaactatgtcgccttgcatcgttgaaaagaaaacaacgttgtccttgtgctccaaggagtgcattctatggatactgagatttggagtgtgtttgcaatcccatgttaccaacccctctccctcgttttccgcgcgcacgctttttaaactgctaaacagtactttttttgcaaaaaagtttctatacgaaagttgctttaaaaaatcaaattaatctatttttttaaaaaaatcagcaaatacttaattaatcacgcgctaatggaccactctgttttccgtgatcactgttcttccggatgggaaccgcttctaacgaacacagcatgaagtggaaacggacagagcaagaaaggagaggaagcaaacacact

SEQ ID NO: 18514 - DNA, 18908 bp, Oryza sativa
  unsure (1)..(18908): unsure at all n locations
aattcctgcagccccaaaatcgccctcccaccccaccaattcttgttcttgcctcccgcgtctatatttggtcattcttgcgttcgcatcctcgctcccatgttcgaatcgtcgctcctgtccagctccgtgtgtgaggcgcgctcccttattgatgcgccaacacggattgggggagaaccggcgcggtggatggacgagaagaagtggtgtggattggggaagaagcggtgcggcggctttagagggagaaacggcttggcggaggagaagcggttggggatggggaggagaagcggcggtgacggagctcgtggctcctcaccgggagaccgtgcaggcccccctttgccagttcggccgggggcttagggtgagatctcaagctctctctgtatgtggaaagatcgcgtgccaggaagaaacgcgagacacggacgatgtatacaggttcgggccgctgggaagcgtaataccctactcctgtgtttttggtggatctgtgtaagaacaagttacaaaatatcaaccagccctctcctctcccgggaaaatcccgttctctctctttgtgggcatggtcctccttttatatcttaaggggataccacatgtaccctttcctttccaaactggacttttcttctctttatgtaaatggacggagatttgcacggttgccctccgaacgtccttctgaagggacggcacatacctacctccacttctgccgggggcaggcgcgtcgtgggaacgtggctgtgcgctgacgacatgagcagtgtcagaccggtcacaaatcggtcattcttgtccaccgcgtgtcagcttagcaacgtgcatgtttgcccttcttcacacaacatcttgcctgtaatggttaggatgaagcctggcatatatcgatcggggctaacgtgccatctctgggatgtaacacgctagctccagctggggacgagtgcctagaggctctcgtcttgacgggacggggcgaggcgtgcgtcagaccgccagtcgccacctaaccgttgatctgaccggtctgtgactggtcacagaccggataaaagagcgcgctgcattgcgctgcatgcagcgtgacacgcttgaccagaccgcaataaatgcggttaggtgagccctaccgtgttcacccaacctatgtacatagtgcaaaccccacaaggggtcggggcacctcggccctcggggccggggcaggagcaacccgaccccccctcggggaaatcaggaggagggcggacacctcaccctcgggcccgacgtccccgaaggtgccaggccacgtgggcgattccatctgcctcaagcctccgggcgcaatactcccggtcccatatcaccgacagtagcccccggcgttatgtcagggcgatcatccttctcaagggaagcggtcgggcatgacgccactcataaagcctggtgacaggtgggaccggtctccgtgattgggcagaaacccaacggtctcaaaccacgcatatcggtaacggtgtcttggccgtcagtcatgggcggtctcttcaagactgccacatcacttgagcagcgctcgaatctgggcgtgcagattcgtttcgtctggagatatggtaacgtcgcttcggtcggcgagcgtaattaacgcgcacacgatacgatctatctcgactgccacaaccgcatatccacctcatgcgccgcaagcgggcgaatggaattagtggaagcgtgggcgcgagaaacgagggagcgagatagcgagtaacgagggagcgagatagtgggcacgagaaacgaggagccgggctcagcgatgggaagggtataaagccatcgaggaaaggacttgctcccttcctttcgccactattcccctttccttcgccgtttgcgccctaaactctctctttgctgcgcctcaccttcgccacacacgctcgttctcaaccctctctttctccgacgacatggcacggggctccgctctgctcgacggtagcgtactaccgccttcccgcattgtgggcgagaggcaggctgggctgccgcgccgcttcatgccggaatccgccaccggccgggagatagtgatgctgggcgaggcgcgcccagcaccagattacccggggcggtccatcttcttcctccccctcgcaatggccgggttggttcctcctttttcttctttctttatggatgttctggagttctacgatctccagatggcgcacctcacccccaacgcagtgatgactttggccatcttcgcgcacctgtgcgagatgttcattggggtgcgcccatctcttcggctgttccggtggttcttcaccgtgcagtcggtgtcgccgccgtcggtggtcggtggttgctacttccagccgcgggggccggtgttgaaccgctacatcccctgcgccctccgcaagaagtgggacgattggaagagcgactggttctacaccccccttgccaacgaagcgcgcctccgactcccaagccagcccccggcgccggtctccagctggcgggcgccagtagatctgggggatgactatgacgccgtcctcgaccgcctggcgggcctgcgatctcaggggctcacaggggccatggtgtacggcgactacctccgtcgccggattgcgccgcttcagcggcgcgcccggagcgcatgggagtacaccgggtccgaggactacatgaggacccaccggggagtcagatgggattgggctcccgatgacttcaagatcgtggtccaaagggtgctgaatctcagctccgtggaggcgtctcttattcctcaaggactcctccccctctgctgcgatccagaccgcgcctccattctgaccatcatgatgggggtcggggcctcagaggaggtggctcctaagggccacgacggcgccggcgggagccgccaggaagaatcaaccccaggagggggccgtgcttctgggccccgcgacgggggctcggggagcaaccgccctgccgccgcccgggggaagaggaaacagggaggaacacctcccccatctcctccccgagggggcggggcggtgcgtgccagcagcaggcgcccggagggggccgcgccgacgtcacagcccgagacggagcgcaagaagaagcggctccgcaagacgggggagacggaaccatcccggggaaacctgatttcccctccaaggtggtcgttcaaccgaccccctcgcaggttcgtttcacgcctttcacaaccatcttccctttatcccaatcagcaagttttctcttatccatcttgtttgtcttccggttttttcttctgcttcagcgatgtcccgtcgcgttcctcccgccatcccaagtccggccaatccgaggccaaagatccggcggccgcagaggaacggaggcgagaatctgaccggcgagaggccgcagatcgccttcgggaagctgaagaggccgcccgggaggccgctcgggttcggcaggcggaggataccgctcgggaggaggccgcccgggctcgccaagccgaagaagctgctcgggaggaggccgcccgggctcgtcaggctgaagaagccactcgggaggaaaccgcccgggctcgccaggctgaggcgatggcgtcttccgaggcggttcacgacaagaccgccggcgcgtcgctcgggcccactccctcgggtgacgctcaggcgacaacctccggggcggctcgcgacaaggccgcgggcgcatcgcctgggcccgctccctcgggcgacgcccaggaccaaacgggtccgggggacatccccgagctcagtgcgtcttctggcgggccgagccgcgtcgcattttctccaaggcggctcttctcctcgtcttctgccgccccgctgagtgccgagccccttctgcaagccttggccgccgcaaacaccgcggtgctagatggattcagcgcccaggtggaggccttgcgagcggaacgagcggagctcgaggccgcatgggcgcgcgtcgaggaggggcggcgctcggtggacgccatgtggaggtggccgtaaggctcaccgccgccacatctcggagcttgaagcccgcaaggcggcgctggcggagatcgcccgagaggtggaggaggagcgagaggccgccctcatcgccaccaccgcgatgattgaggcgcaggactccctccgccttcaacacgggagctgggaggcggagctaaagaaaaagctcgacgccgcccagggggtccttgacgccgccgctgcccgagagcagcgagcaacggaggctgaagcggcatcccgacggcgggaagaggcccttgaagcccgtgccatggcgctggaagatcatgccggcgccgtggagatcagcttggcggaccgcgaggccgccgccgctatccgggaggcgacgctggcggcgcacgaggccgcctgcgccgaagaggagtccgcgctccggctccgcgaggacgcgcttgctgagcgggagcgagctcttgaggagtccgaggccgcgacacaacggctggcggacagcctgtccctccgcgaggcagcgcaggaggagcaggcgcgccgcaatctggaatgcatccgcgccgagagagccgcgctggagcagcgggctgctaacctcgaggcgcgagaaaaggagctggacgcgagggagcgcagcggcggggcggctacgggcaaaagcgacttagtcgcccgcctcgcagctgccgaacacaccgtcgcggacatgcagcgcgccctggactcatccaccggggaagcggaggccctccgcttgtcggtgagatagggcccggcatgctttgggatgcagtctcccggctggatcgcgccggtcgggaagcgggcttcttgaaaggccagacaatttcgcgctctaccaatctggaaggcctcgccccgcccttaggaggatggcctgggctgtccaacaactccccgaggagctcgagaagaccatcaagtcatcctcgagggacctcgcccaaggagcggtggaactcgtgttagcgagttaccaggccagggaccccggcttctccccatggatggcgctggaggagttccctcccgggaccgaggacgatgcgcgcgcgcgggtccgggatgccgccaaccacatcgtccaaagcttcgaggggtcggcccctcggctcgcgttcgcccccagctccgacgaggagggcgacgccagcggtgaggacgacggtggcgacgaggccggcgacccgggcgcattggaatgagcccccaggcccccgccaatctccaattttttctttttctttcttctttttgtatagatcaacttaatctgcaatcaaaaatgatgaaaaatttctatgttaactttattttgctatgcatatgagttgaggatgatttgtgccgtggtccttttgcattttagcttgatttaagggctcgtgctcaagtcccgatcctcaaatggctcgggtcggggctagtgcctggggagatccacatgtcgagactggccaggccgggaacatggtgaccgagggttatgggtgacccgattgtgggtttttgccgattcccccccggagttcaccacgccccggggcacggctcggttctgggccccgcttggcgattttagctgaccgaaccgagcccccgagggcaaggttgagcacgagtgaccttatttcaagttaagattcttcagaaggaaaaacggcacagacacaacctttagaaaattgaaactgcttttattgaaatgctgaaataagaaaagtaaggctgtgcatgtgtggtagcccccggctaaccctgcacacccgaggggggtgcggggttagcccgagcccgaccccccccctcaggggtagaagcgacgaaggtgttcgatgttccacgggtttggcagctcagtgccgtcgcccgtggccagccgtacggagcccggccgggggacgccgatcactcgatacggaccctcccacattggtgagagcttgctcagtccagcacgcgtttggacgcggcgtaggacgaggtcgtcgacgcagagtgatcgggcccggacgtggcgctgatggtagcgccgcaggctctgctggtagcgcgcggctcggagggccgcgcgccgccttcgctcttccaagtagtcgaggtcatctctacgaagctgatcttgatcagcctcgcagtacatggtggcccgaggagacctcagggtgagctcggatgggagaactgcttctgcgccgtagacgaggaagaaaggcgtttccccggtcgctcggcttggtgtggttcggtttgcccagagcaccgctggtaactcctcgatccatgaatcgccgtgcttcttgagaatattgaaggtcttggttttaaggcctttgaggatttctgcattggcgcgctccacttggccattgcttttggggtgggcaggtgaggcgaagcagagcttgatgcccatgtcttcgcagtagtcgccgaagagttcactagtgaattgggtgccattatccgtaataatacggttaggcactccaaaacgggccgtgatgcccttaatgaatttaagagcagagtgcttatcgatcttgacaaccggataagcctcgggccacttagtgaacttgtcgatcgcaacatacagatactcaaacccgcccggggcccgtttgaacggtcccaggatatcaagcccccagacagcaaatggccatgacagtggtatgatctgcagagcctgggccggctgattgatttgcttggcgtggaactgacacgctctgcatcgccggaccagatcgactgcatcattgagagctgtcggccaataaaatccttgacgaaaggccttgccaaccagggtgcgcgaggcggaatgggctccgcactcgccctcatggatgtcagcaagaagctcaacgccttgttcctgaggaatgcacttcaggaggattccgttagccgcgcgccgatagagggtcccttctaccagcacgtagcgtttggaaatgcgttgtacgcgttcactcccttcgcggtcctcaggtagagtcttatctgtgaggtatgtttggatctcagagatccaagcaatcaatctaagggagcttggagcgctcccttcgggtcccgaggcctggactccgacgggcctcgggggccggtcaggcgcatccgtctcccctaaggggtcgggtcgcgccgacggctgggtaagcctttcttcaaaggcgcccggtggggtctgggctcgcgaggacgcgagccgtgagagttcgtcagctatcatgttatcccgtctgggcacatgccgaagctctatcccgtcaaaatggcgctccatacgccgcacttggcgtacataggcgtccatttgcgggtcagagcaccggtactccttacagacctggttaacgaccagctgggaatcgcctaacaccaggagacggcggatccccagtccggctgccaccctgagtccggcaaggagtccctcgtactctgccatattattggtcgctcgaaagtcgaggcggaccagatatctaaggacgtctccggtcggggaggtcaacgtgacccccgcaccggcaccctggagggacagagaaccatcgaactgcatcacccagtgggtggtgtgaggcagctgcgaggggttcgtgctggcctcggggattgagacggtctctggagccggggtccactctgccacaaaatcggcgagggcctggctcttgatagcgtggcgtggttcaaagtgcagatcgaactcagaaagctcgattgcccattttaccacccgtcctgtaccctctcgattatgcaagatttgaccgagggggtaagacgtaaccacagtgaccctatgtgcctgaaaataatggcgcagtttcctcgaggccatcagaatagcgtaaagcatcttctgggcctgagggtatcgggtcttagcgtcccggagggcctcactaacaaagtagacaggccgctgcacccttcggtggggccgatcctctctgctaggggccgtatccccggggcgttcttcgttcaagtggcctttcggggcgcacttgtcttctgtgccgatgacctcggggtcggaggatgaaaggggcggccttccctcggtggcctcggggccgtcctgggggtcgggggctcctggcatcgtcggacaagcgggcaaagggccaactccggtcgtcaggggcctctggcctccgttcggctcgggggcctcttctccctgctctttcccgggtcgagtcagcacagggttagcctcggggtcaaagggcgttaagtgcggccttcccgcagtggccttggggccctcctgagggtcgggggcacctagcaccgtctgacaagcgggcggagggccgactccggtcgtcgggggccttaggccaccgttcgactcgggggcctctcctccctgcctgctcccgggcctagtcggcacagagtgggggtgcgcagaatgaggattgtcctcatcgcgctccacaaccaacgctgcactaactacttggggggtcgccgctaagtaaagtagcaggggctcatttggctccggggcgactagaaccgggggagagctgagatatgcctttaactgagtgagggcatgttcagcttcctccgtccaagtaaacggccccgagcgcttgaggagcttaaacaagggtagcgccttctctcccagccttgatatgaaacgacttagggcggccatgcaaccggtgacgcattgcacatccctaagtttgctgggggggcgcatccgctcgatagctcgaatcttctcggggttggcctcaatgcctcgggcagagaccaagaacccgagaagcttgcccgcaggtacaccaaacacacacttatcggggttcagctttatgcgggcggagcggaggttctcaaaagtttccgctagatctgaaagtaaagtttcttggttgcgcgtttttacaaccaagtcatcgacatacgcctcaacattacgtcctatttggctacccaaagaaattcgagtagtacgctgaaaagtaggacctgcattctttaacccgaagggcattgatgtataacaataggttcctacgggggtaatgaacgcagttttttcctcatcctccctagccatgcgaatctgatggtaaccagagtatgcatctagaaaacacaaaaggtcgctccccgcagtggagtcgacgatctgatctatgcgaggcaaggggtaaggatccttaggacatgccttgttaaggtcggtgtagtcgatgcacatccgaagcttgccgttcgccttgggaacgaccaccgggttcgccagccactccggatggatgacttcacggatgaatccggcctccagaagtctcgccacctcctcgcggatgaaggcttgacgttccggggccttccgccgcactttctgccggaccggccttgcgcccggccgcacggcgagacggtgctcaatcaccttcctggggaccccgggcatgtccgctggtctccatgcgaagacgtcagcgtttgcccgcaggaaggagacgagcgcgtcttcctatttgccatccagaagaccaccgatccgtgtggtcttggatgggccgtcgcccaaggcaacctccttgaccgggacctcgtcgcatgtggcaatccgctgcctcggggcgatgggggcggaggtgccaaggctctcgtcaccaccctcgggcttggtcgcagcagcgaggtggtccgcgcgctgctccatgcaagcgagcgtgactttaaggtcgccacggacagagatggggccaccggggcccggcatcttcatctggaggtaggcgtagtggaccgccgccatgaacttcaccaacgcgggtctccccaggaccgcgttgtagggcagactgaggtccgccacatcgaagttcacccgctccgtgcggaagttggctgatccaccaaaggtgaccggtaggtcgatgtgacctaatggccatgtgtgccccggcgtcacaccgataatcggttgggacggccggagcaccatccccggggccttgatagcatcaaaggccgcgggggaaagaatgttgagagccgctcctccatctatgaggacacgtcccaactcgacgttgcagatggtgggggaaaccaccatcgcaacctgccctccccgggcaatgcacggtgggtggtcggtctggtcgaaagtgagagcgacctccgaccaccgcgcccgacgcatcgcctcatgggtaggggccatggccagaagctctcgcttcatagccttgaagctccggcgagagacgtgagcacatgctcctccatcgacggtggcaatggtggccccaggttcttggaaacctaggtcatcatcaccatcatcaatgtcaacagcgggggccttctgcttagcctcacttcgccgtttgccggaaggaaccgccggggacttgccctcacggcgttcctgcctcctgtcctcctcccacttcctcgttcgctcagccaaatttttgactgcgcgacagtccacgagatcgtggagggaggtgttgtggacggagcaccacctgccggcggggcgctccttgctgggagtaccagcctctttctttttgtcgctcgcaggcctcccctttcgggtggcccgcggagcgccctcgacggcgaggacatgaccctcgtcgccggaacggtccgacctcttcttcctcctcctgtcacgccgccctgtctgagcggcggatccgggggcggccgaagctgccactccggaaccggaggagttccatgtccacgcttcctccttacgagccactcggtccgcgagctgaaaaagctccgcggtagtctggggctctttggaagcgatcttttcgagcatgcggttgtgccgcacgccccccctgaacgcgtagatcaccgcgtgtgcagggatgcatggtatagtattgcggacttggcaaaaccgctgaatgtacgagcgaagcgactcatcatcgcctcgctgtactgcatgcaagtccgcttcttcgcctgggcgcggatatgtgccttggaagttcatggtgaactgttggcacaaatcttcccaggagtggaccgacgcgggtggcaggttcattagccaaccccgcgcctgtccttttagggccatgggaaagaagttcgccatgaccctgtcgtcacccccagcggcctcgatcccggtcgtatagacctggagaaactcggtggggttgacgctcccatcgtacttctcggtgatggtgggccggaaccttgggggccaacggacattccgaagactcgccacaaaggctctacagccaacaccaccagccggaggcacggagggctggtcctcacgtccatgtcgaggtgacactctggacgaggaggcaccctccgttgcacggggggtacgccggctactacgccggcgctcgatgttgaggcgggcatccggctccccatgctgatcctcccgagtcgaaggtgtcgacgagggagtagcaaccgaatgacgtgcagccgccgccgctcgccgcgccctccgccttgacgacacggagccggtggtagcggcgccggaggtcttggtggtggcggaccgtccaccagcacccaggcgctgctgtgccgtcatgaccaagttggccacgtcttccagccatcgttgggctggagactccgggtcatggacgacaggcgggtgtcgtaggagcgcgccagcagcctgaagcgcaccctgaggcgtgctgccgtcgccgtagacgaggaggcgacgctccccatctcgccgttctcctgcatcacctgcgactggtgatgccacggatttgtcgaccctctcaagcgcctccccctgcttagggctttggcgcggaggaggtgggggagtacgagctcgacggcgtggattcggctccccgtcgtcgccgctcacacttggagagaggtcgtgcgcttttccttgctcggccattaggctgaacaagaaaaagttggcgcacacggaagagtctgagagctcagaaaacacacgctgagccccctacctggcgcgccagatgacggagctcgtggctcctcaccgggagaccgcgcaggcccccctttgccggttcggccgggggcttagggtgagatctcaagctctctctgtatgtggaaagattactcgccggcaagacacatgagacatggcgatgtatacaggttcgggccgctgcgaagcgtaataccctactcctgtgtttttgtggatttgtgtatgaatgagctacaaagtgtgagcccacttctcccccgctctaggctctaaatctggcaagaatcaaccaaccccttctttatgggcaaggtcctccttttatacttcaaggggataccacatgcccccttctctttctaaactggacttttcttctctttatggacggagattggtgtggttgctgtccgaatgacactccgatgggacagcccacacctacctccactcccggcggagacaggcgcaacgtgggatcgtggctgcccgttgctgacgtgatcagtgccagaccggtcattcttgtccaccacgtgtcagtttaacaacatgcatgtttgcccttctttgtgtaacaccttgcctgtaatggttaggatgaagcctggtatatatcgatcggggttaacgtgccatctctgggatgtaacacgctagctccagctggggacgagtgcttagaagctcacaccttgacgtgatggggcaaggcgtgcgtcagaccgcctgtcgccacctaacttgcgatttgaccggtctgtgactggtcacagaccggataatcgagtgcactgcactgcactccgtgcggcgtgacacgcttagccgatgcgcaataaatgcggttaggtgagcccggctgtgctcacccaacctacgtacatagtgcaaacccctcagggggtcggggcacctcggccctcggggtcggggcaagcgcaccccgaccccccctcgggggaaatcaggaggagggcggacacctcaccctcgggcccgacgtccccgaaggtgccaggccacgtgggcgattgtgtctgcctcaagcctctggtcatgatactcccggtcccatatcaccgacagtagcccccggcgttatgccagagcaatttcccttcccaaggggagcggtcaggtgtgacgccacccctaaagcctggtgacaggtgggaccggtctccatagttgggcaaaatacccaacggtctcaatccatgcatattggtattggtaactttggttgtccataatgggtggtctattcaagaccgccacatcacttgagcagcgcgcgaatctgggtgagcagatttgtctcgcttggagatacggtaacgccgcttcggttggcgagcgtaattaacgcgcgcacgatacaatccgtttcgattgccacaaccgcatatccacttcatgcgccgtaagcgggcgaatgggattagtggaagcgtgggcacgggaaacgagggagcgagatagcgagatacgagggagcgaggtagtgggcgcgagaaacgaggagccaggcccagcgatggcaagggtataaaagcatcgaggaaaggatttgctcccttcctttcgccattgttcctcttgccttcgccgcctgagctctaactctttctctgctacgccctactttcgccacacgcgctcgttcccaatcatctcttcctccaccgccatggcacggggctctgctctgctcgacggcagtgtactgccgccttcccgcatcgtgaacgagaggcacgccggactgccgcgccgcttcatgccggagtccgccaccggtcgggagatagtgatgctgggcgaggggcgcccggcaccagactacccggggtggtccatcttcttcctccccttcgcaatggctgggctggtcccgccattttctcatttcttcatggatgtcctggagttctacgatctccagatggcgcacctcacccccaatgcggtgatgacattggccatcttcgcacacctgtgcgagatgttcattggggtgcgcccctctcttcagctgttccagtggttcttcaccgtgcagtcggtgtcaccgccgtcggtggttggcggctgctacttccagccgcgggggccggtgttgaaccgctacatcccctgcgtcctccgcaagaagtgggacgactggaagagcgactggttctacacccccctcgccgacgaagcgcgcctccgacttccaagccagcccccggcgcaggtctccagctggcgggcgccggtagatctgggggaggagtacgacgccgtcctcgaccgcctggcgggcctgcgatcccaagggctcaccggggccatggtgtacggcgattacctccgtcgccggattgcgccgctccaacggcgcgcccggagcgcctgggagtacactgggcctgaagactacatgcggacccaccagggagccagatgggattgggctcccgaggacttcaagatcgtagtccaaagggtgctgaatcttagctccgcggaggcgtctcgccttcctcaggagatcctccccctctgcagcgatcccgaccgcgtctccattctaaccattatgatgggggtcggggcctcagaggagagagcccctaagggccacgacggcgcgggcgagcgccgccgaggggaacaacctgccccaggagggggtcgtgcttctgggccccgcgtcgggggctcggggagcagccgccctgccgacgcccgggggaagaggaagctgggaggaacacctcccccatctcctccccgagggggcggggcggcgcgtgccagcagtcggcgcccggagggggccgcgccgacatcgcagcccgagggggtgcgcaagaagaagcggctccgcaagacgggggagacggaaccatgccggggaaacctgatttcccctccaaggtggtcattcaaccgaccccctcgcaggttcgtctcactctcattgcaaccatctttctccaaaaagaagttttttcttgctcactttgttcgtcttctggcttttccttctgcttcagcgatgtcccgtcgcattcctcccgccaccccaagtccggccagtccgaggccgaagatccagtggccgcagaggagcggaggcgagagtctgaccggcgtgaagccgcagcccgccttcgggaagctgaagaggccgcccgggaggccgcccgggttcgccaagcggaggaagctgctcgggaggaggccgcccgggctcgccaagccgaagaagctgcccgggaggaggccacccgggctcgccaggctgaggcgacagctgctgctggcgcgtcgcttgggcctactccctcgggcggccctcaggcgacatcctccgaggcggctcgcgacgaggccgcgggcgcatcgcctgggcctacctcaccgggcgacgcccaggatcaaacgggcccgggggacatccccgagcccagcgcatcctccggggggccaagccgcgttgccttttctccaaggcggctcttctcctcatcttctgtcgccccgctgagcgccgagccccttctgcaggccctggccgccgcaaacaccgcagtgctggatgggttcaacacccaagtggaggccctgcgtgcagaacgagcggagctcgaggccgcatgggcgcgtgttgaggaggggcggcgctcggtggacgccatggtggaggtgggccgtaaggctcaccgccgccacatctcggagcttgaagcccgcaaggcggcgctggcggagatcgcccgagaggtggaggaggagcgagaggccgcccttgtcgccaccaccgcgatgattgaggcgcaggactccctccgccttcaacacgggagctgggaggcggagctgaagaacaagctcgacgccgcccaaggggttcttgactccgccgctgcccgagcgcggcgggtaacagagactgaagcggcgtctcggcggcgcgaggaggcccttgagtcccgtgccatggcgctggaagaacacgccggcaccgtggagaggggcttgacggaccgcgaggccgccgctgctctccgggaggcgacgctggcggcgcacgaggccgcctgcgccgaggaggagtgcgcgctccgcctccgcgaggacgcactcgcggagcgggagcgagctctcgaggaggctgaggccacggccaaacggctggcggacagcctgtcccttcgcgaggcggcgcaggaggagcaggcgcgccgcaatcttgaatgcgtccgcgccgagagagccgcactggagcagcgggctgctgacctcgaggcgcgggaaaaggagctggacgcgagggcgcctatcggcggggcggctgcgggcgaaagcgacttagccgctcgcctcgcggtgccgaacacaccgtcgctgacatcagcgcgcgctgattcttccatcggggaggccgaggccctccgcttggcgggcgagatggggccaacagttnggatcggtctcccgcatggatcgcgccggtcggcaagcgggcctctggaaaggccagacgaggacgcgccctagcaacctggaaggcctcgctccgcacctcaacaggatggcctgggtcctcgaacgactccccgaggagctcgagaagaccatcaagtcatcctcgagggacctcgcccggggggcggtcgaactcgtgctagcgagttaccaggcccgggaccccgatttctctccctggatggcgctggaggagttccctcccgggaccgaggacgacgcgcgcgcgcgcgtccgggatgctgccgaccatatcgtcgacggcttcgaggggtcggcccctctgctcgcgttcgcccccagctccgacgaggagggcgacgccagcgatgaggatgacggcggcgacgaggccggcgacccgggcgcattggaatgagcccccaggcccccgccaatcttcttttctttttctttcttctaaggccttcatgcctcttttttgtataaattaacttaatctgcaatcagaaatgacgaaaaaaaaatttttgtgttagttttattttgctatacatacacgatgaggatgatctgtgccatggtcctttcgcgccttagcttgaaataagggctcgtgcccaagtcccggtcctcgaatggctcgggtcggggctagtgcctggggagatccgcatgtcgagactggccaggccgggaacgtggtgaccgaggggtatgggtgacccgattgtgggtttttgccggttcccccccggagttcaccacgccccggggcacggctcggttctgggccccgtttggcgattttagctgaccgaaccgagcccccgagggcaaggttgagcacgagtgaccttatttcaagttaagattcttcagaaggaaaaacggcacagacacaacctctaggaaattgaaacttcttttattgaaatgctgaaataagaaaagtaaagctgtgcatgtgtggtagcccccggccaaccctgcacacccgaggggggtgcggggttggcccgagccaaaacctgacacccgcccccccccttcaggggtagaagcgacgaaggtgttcgatgttccacgggttcggcagttcagtgccgtcgcccgtggccagccgtacggagcccggccgggggacgccgatcactcgatacggaccctcccacattggtgagagcttgcacagtccagcacgcgtttggacgcggcgtaggacgaggtcgtcgacgcagagtgatcgggcccggacgtggcgctgatggtagcgccgcaggctctgctggtagccgcagctcggagggccgcgcgccgccttcgttcttccaagtagtcgaggtcatctctacgaagctgatcttgatcagcctcgcagtacatggtggcccgaggagacctcagggtgagctcagatgggagaaccgcttctgcgccgtagacgaggaagaaaggcgtttccccggtcgctcggcttggtgtggttcggttcgcccagagcaccgctggcaactcctcgatcgcatgaatcgccgtgcttcttgagaatgttgaaggtcttggttttgaggcctttaaggatttctgcattggcgcgctccacttggccattgcttctggggtgggcaggtgaggcgaagcagagcttgatgcccatgtcttcgcagtagtcgccgaagagttcactagtgaattgggtgccattatccgtaataatacggttaggtactccaaaacgggccgtgatgcccttaatgaatttaagagcagagtgcttatcgatcttgacaaccggataagcctcgggccacttagtgaacttgtcgatcgcaacatacagatactcaaacccgcccggggcccgtttgaacggtcccaggatatcaagcccccagacagcaaatggccatgacagtggtatgatctgcagggcctgggccggctgatggatttgcttggcgtgaaactgacacgctctgcatcgccggaccagatcgactgcgtcattgagagctgtcggccaataaaatccttgacgaaaggccttgccaaccagggtacgcgaggcggaatgggctccgcactcgccctcatggatatcagcaagaagctcaacgccttgttcctgaggaatgcacttcaggaggattccgttagccgcgcgccgatagagggtcccttctaccaacacgtagcgtttggaaatgcgttgtacgcgttcactcccttcgcggtcctcaggtagagtcttatctgtgaggtatgtttggatctcagagatccaaggggctgcaggaatt

SEQ ID NO: 18515 - DNA, 712 bp, Oryza sativa
aattcctgcagccctacagtgaaaaatagatgataataaagttaaacggaaggaaaaccatggaaagggttacttgtccattagtctttcctaagagggagttggttcagctgagagatgttgacattagttacagttgagcctatgttaattaagtatattctttccttgtgcctccaaattgtggtggaccaatcctgccttttcttattcacaacaagttgccaaaagacgtcaagatggacgaaaatttgggcattctgtccttttcaatgatgtactagctgctagtgaaatctttggtgccaaaatcttatcgtcacactgtaacatttctttagaaaggtaaccgaagaaattatagctagcatcaataattctcctgaagaatgaacatgcacggttaccttcgggaccccagcatagacatcgccaccctggggatggttgatgatgacaccaggcctcggattctccgggttgtgcgcgatgtcatcgtacatgaagacgatgatgttctcgtccttgagcccgcccctcttcatgatctggtaggcatggcagacatccgcctgcaagtttcaaaaccccaagaaacacaggacatatgttactcaagtatcaaccatgcccaatttcaagaaccatcatgctattgccagcagtaaattaccagtaattacagcaatagtaaactcaaatcatgcagaaa

SEQ ID NO: 18516 - DNA, 675 bp, Oryza sativa
caatacggactgtgtctcttttagctcggctaactctggtaaaaggctactctggcgagccttatgaactgctcctgtaccaccaaagatcagaatttttgcttggagactagcccgtaattgtctggcaactcagctgaaccggttgaagaggaagatggtgagggatggtaaatgcagcctgtgtggtgtggaagatgaggatggttttcatgccgttgtttcttgtactcgatctacagccctgcgtactgagcttcgctgtgtctgaaatttgccggatgagcaacagttgtgaaatgatggtccagactggcttctgattctgcttgatagactaagccctgaagagcgagcaaagctcctccttgtcctgtggagctcctggttcttaaggaatgacagcttgtttggttcaggttcatcgactgtccatggctctgtcttgttcttgcagagcctgtgggaatccattagtaccacaaaggtcaatcctgttactgatataaaagggaaaggcccccagatgggtactaaatctgctactacggttgcccggagtagtcccagtgatttggtgcgctgggaagcaccgccgcaaggatgggctaaaattaatgttgatggagctttcgtgcagcaaatcggagaagcaggtactggaattgtcatccg

SEQ ID NO: 18517 - DNA, 693 bp, Oryza sativa
  unsure (1)..(693): unsure at all n locations
ttcctgcagcccgaacctgtggtccgcccgcatcaagctgaaccccgataagtgtgtgtttggtgtacctgcgggcaagcttctcgggttcttggtctctgcccgaggcattgaggtcaaccccgagaagattcgagctatcgagcggatgcgcccccccagcaaacttagggatgtgcaatgcgtcaccggttgcatggccgccctaagtcgtttcatatcaaggctgggagagaaggcgctacccttgtttaagctcctcaagcgctcggggccgtttacttggacggaggaagctgaacatgccctcactcagttaaaggcatatctcagctctcccccggttctagtcgccccggagccaaatgagcccctgctactttacttagcggcgaccccccaagtattagtgcagcgttggttgtggagcgcgatgaagacaatcctcatttcgtgcacccccattctgtgctaacttggcccgggagcgagcggggaggagaggcccccgagtcagacggtggcctacggcccctgacgaccggagtcagccctctgcccgcttgtcagacggtgctaggtgcccccgaccctcaggagggcccccaagccactgcgggaaggccgcacttaacgccctttgaccccgaggctaaccctgtgctgactcgacccgggaaagagcanggagaa

SEQ ID NO: 18518 - DNA, 688 bp, Oryza sativa
tcttcaaaccatgtgcttctcaccataccgtacattcttagagccccattgctttgcactaataagccaaagcaaaagccaaaatttgatttttcaaacttaattttgaagttgattttaagatattttaaacatagtttctttttcagatggcttttaagtcgatatgaacacatatataaaagttttacctacaaattaatttttgttccctaataagccattttagcttattaagaaatatgggcaaacgatgaggacctaatcctacaatataaatatatgcatatagacatgcaggaaatgccatgtttttaagcaaaaaagagcacctaatgaaaatttcccttggccttgaggagaaactaatatatttccaggatgaggatcgccatgaacaaaaccatgtacaaaaatcatttcgccaaacagttcaattaatgctttagctacctgaatgataagcatagaaaggtaccaaaaacagagaaaaatcaattagctagtcagtgaataaaattttaatatcaagtataacaagcaaaattagaataaattaatatccttctttgttcagaacttcagattctgcaatctccttaggtaatacataaacaagtaccaattatacttccgacaagaatacacttgtacaatctgtgttatataaaaatatgtggaccaaata

SEQ ID NO: 18519 - DNA, 1738 bp, Oryza sativa
aatgtatacatgcttgatgatggaatgagatggaaagaacttccacctatgccaaagccagattcacatatagagtttgctttgggtgaatgttaacaattctcattattgctgggggaaccactgaaaagcacccaataaccaaaaaaaaggttttagttggtgaagtgtttctgttcaacttgaacacactggtacacacctttccttgctccttattttagataaaacacttaaaagtgataagaaatgatggattatgacatgaaaggtatgaaacattacctatcaactgcctgttgtttgtttcatctcgcagtggtcgcgcagatggctccccgcggggccgaaccctaaccccggctgctagggcccctccagatcactagaggttgtggacgacgacctgtacagtatacaatcaggtgattgatcgatccacctgattgttaatgatttcgtgtaagcagttgtaaacttgaaaattttgttacttttttaagaaaataattggtggtgtcaactagcaatgcagtcggttttcaatttttcttctgtatttaccagggagcaagctgttagctgttttgtgaatcacttctaatttactgtttattaatgcttgttctgtgatatatggatgctggatgcgctgagaatggaatggtacttggtacttgtcgttgtgagtgtgcgcccattgggaatgaaccctgtgctctattgggacaattttttacaaaaccgcccgcttcctcatcagtaatttcgcgaataaccccccgagcttccttaccttctcttgcatctggactcatgccgctcgtcgtccccaaaggaagcttcatctccatctccgtccggcaagacgatggtagctccaaatcaatgctatctgccaatcgactactgcttgctagacggaggccctatatagcacatacataaagctgcaatatactaatttatacgcgaataatccttaatacatcgagtatcatggattcaacatcagcagctctgaaaattgagattcttgtagcataactgatccctcccaagtcccaggtccctcaaactcgctgagagtgaatcactatattacaatcagaaaactcagttcaatctgccaatgtctgagaaccaaaaaaaatcagaaaatccaacaaaacaatttctcagagaaattgggggttctaccaagagagacacaaagctagcaagaaagattgagtcctgcctttgtgcaggtttagtcaaaaacattgaagtcccccgcaagagtgacggatttttttatggttggatttgaggactcaaggtgcatggacaggaggaaaatggataaaacggaacttgactcgtcgactagcctctccactccgtctccagtctccatggagcatggttttcgggggattagatccgccgtcgcccactggttgagagacgaggtttcggggacgattaggagcgccagcagcctcagggggttatttgcgaaatcaccagtgaaaaagcaggcggttttgtgaaaaaaatttccccattggttctaaaccttccgattaagatcctagggtgggtgcacagtcactgagtgcatgagtgccttaagatgtaccagagagcttaaccattcaaaagcaaagcaaagcaaacataaagcacttcaaaacagcacttcaaaacagagtgcaactagtctcttcttaggccagaggttctcataatatat

SEQ ID NO: 18520 - DNA, 3674 bp, Oryza sativa
agaacatcttggcactacggtatcatattcctactcaaaatatcttcccatccggactcaaaagattttccacactacttctggatattcacactactaatcttttcaggcagtcttaatcacttgattcgtacccctcatgatgtggcacatagtcatcatcactttcatctggaacaaaatcatcatccgaagaatgagactcctcttcatctggaacatagtcatcatcttcggtagaccgatactcatcatcatcgacaaatccataaagggctggaagaaccacctcgtcccctacctccacagccacctcaagaacctcctcccctacctctacagcagcttcaccgtccaactgcccctcccctcctacagcagcttcaccatccaagtgcccctcccctccatctgctggctcaggcaagagaagagcagcccactgttcagggtctagatcatgtccttcaggaccggcaatggctgcaaagtgttgggcccgagcatctatggctagttcttcgagagcttcaccatgagcaaggcctgacagaatgctagccctaacggtggctctaacgtttggtaggaatttgtactgcaggaaatgatatattaccccatcttcttccataagcaccggcggcaagacgacacggcgtctgaatcgaatcccaccattgatctcgaaagtaggcaatgcaatgccattaggcaagacaagcgattgcacattgttctctggtgtcctggtcaaatcgtcatcagtatagaaacgccaaccagttgcatcagctccattgttgatcatcatcacatttagcacctaggaagataaaaaagcaaaatttaaaaggaatcctaggcatctgccatgtgatattttgataaaaaaaatcatccaacaggctgaaaaaaaataccgaacagacagcaaaaagaaattaaattcatcatgcacaacatcaaaaatcaggtcaagtatgattaccgcatcatcatgcacaacatcaaaaatcaggtcaagtatgattaccgcatcagagactacgatattttcaaactctttgtggtcctcggagtccaatgggggatcagcaactgcatatcttgctccgttcattagtttggcacatacttcagtagcaaaagagaacctagaacccgcatttgccatagaatattccaaagcgccagcagaatcaaagcaatgaaataatactccacgccactgcataaaaaatgaaaaaaggaaagatgagccggatacacgttatatcacccagatacaagcacaactaagtactattcacagattagctatcactatgatgacaaggaattcagacatcacaaaataactgtgaacaaaaagacattcaatctgtacctcatcattggcagcaccagccatcatgaagtcgcgtactggccttggaagtaaaaacctgttagcaaacaacatgtgcaattaaacccaagaataagtggagcaagaacaatctatgaactggatacgaaaccctagcagaacaaaaaagtatataggattttgtatttttgggatctacatagaaaaatatatcctaagctaccacagaagggagatacagataaaaataaagtggaaaacatgaaatcaacttcaagaagcagcatgaatcatagtggatcccgtgagctcaaggaacaaatacaaacgaatctagcggccataaagcgatcaaacaataggcatctggaattcaaataaatttctataaactcatgcattcgcattcgttgcaagcgaatgataactgatatcatacaaagcagatatacgacaggaatatgaacacgttgcatatgaataaatgaggagaggagatcaagggggatcatggcatactaacaaattgcatatcagaaaactaagaatagaagattaacaaattggagaccagaaaactaaaaaatagatagggaatcatgtctatgaacagatcacaattgcacataggaaaactaagaatagacagggaaccatggctatgaacggaacgcaattgtagatcacaaaacaagaatagatatgaacatgtcgcaattgcagatcacaaaacaagaatagagaatcatggctatgaacggatcgcggcacacatcgatgttagggaatcatggatatgaacagatcgcagcatcagaggagaaaacgaggatcacggcacacatcgatgctagggaatcatggatatgaacagatcgcagcatcagaaatcagaagagaaaacgagaagagaaggggagggatcgagatgcacttacagtacttgcggcggcgaagtcaggttgaaaaagtggagaagtgggtatttatatagaaagattgtgagctagggcatcgtgcttatccgtcggatcctcgacggacggacagatttctctcgtggagattatgggaagtgggccacggatccagcccactaggagctcgtcggccgtgtgtgtgggccgaacggttcagaaacagaaagttcagttgaggtccctcatcttgtcacccatagatttataaaatcatccttaaaccaaaatacgaaatcttataaaacgggattaaatttccttcggcagtatacatgcccggtttggctgacgtggatatttgacctgatccactcgtgctgattgggcacttgcatgataaaaataaaaagtaggtcccacgtgtcatacttagggcccctttgaatcacaggaatgaaaaaacgaaggaatattaaaacataggattctgatagaaatacgagtgtaaaacagaggattgtaaaacataggaaaaatataaaaatgaccgtttgattgagccgtaggaaaaatacaggaatttgaaaagagagataaaaactcaaaggattcttaccatgaggtagaacctcatgctaaatttcctccaaaacttgcatagaaagagacatttcataggaatttcatgggattacataggattcattcctctaattcaaaggccgatatagaaaaaatttctataggaatgaaatcctttaaaattcctatgaattttctttgaatcaaaaggaagccttactctattccattcctctcgctctcttccgtttctctttccatctctcgagcgagagacgggcgaccgcaaagggacaacaggcgcgggtggtctaggcgtttggcagcgagggccctcgtcggcgggcttggcggcgctgcgtcgtcgaggttgttgggacgtctccggagcccgaggtcggtgtagcatcgagggacggaggtcgccacgtttggtcggtccagcatattctttgcttgaagagaagaactgttaatgcaaattagatatcccaaaacaaacaaacccacaataaataagatacgtaataaaaaaaataccgattctatttagctctacaatacaaacactgaatgaatcaaaatgccagtgagcacatggacacgcacacgccaggcatcaatgaaaacagacatcacaggtttcatctcagttgagcgtaacatccatgaatgtctctctttttgtcttcgaagaaaaaagaaaaaataacaacagtaataaactctctttttaggcttcatagtttaactgcttttgctgaatgaatatagatttaattggcagaggctgcaggaat

SEQ ID NO: 18521 - DNA, 5413 bp, Oryza sativa
aaatatttcagggtgctttacaactgtcgcggccttcgatggatacgagtacatttgatcttttaacagtgactgccacggctcaaccaacaactaactgctgccgaatctaattcaagttggcccattagctgcttctgcggtggtgaggtcagctgctttagattgaactttgcgagcactgtgtacctctcgatcactccaaccatacatataatctgtccagaaatcaaacaagtccatcagaatctgaagtgaaaccaacttagcaaagcttcaaagcgtaaccagatgtgcaattcaaacaacgtaatgtactagagttcacacttcaaattttgaaaaggaaaaatgcaggaataaaaattagatgagataatcatatcgaatggagtagcaaactgaaaaggagatgcaactagaatgaaccaagagtatgctcttagattcactgagattgggagtcatttactttgcagctggtacatcaatcatgagccatggaatgggttggcaggcacgatatttatgacaaacaagtactacctccgtttcacaatgtaagtcattctagcatttctcacattcatattgatgttaatgaatctagacatatatatctatctagattcattcacatcaatatgaatgtgggaaatactagaatgacttacattgtgaaacgaagtagtcatgaacttgaatgggatggcaaatcatttagaagaacaatacaagaacatcagtttggatcatgacatgtacatgtgttttcactcacaatgtaccaatgtcatggacttggcagagttaaacaaaaggtggaaagcaaaagcatcataaacaacgtttttataagtccattttgtttatccaatgtcggtgccatcaggatgccaaaatggaatcaagccgaaaagatgatgggccctaaattatataatcatgtttataaccctaggtgatcatatctgtcttatctaatgctccattattagaataaatttgcaggtgtgcctggcttctagtacatagagagatcatggagcagtatatgttccttcactcctgaactatataatgccaactaatcattatggcataatttgcaggcatggctgctgcctagatagagatcatggagaagttacttctctcctgaacaataaaatgccaactaatcattatggcacatttcccagactagttaaaaactgctccagtaactgcatgatccttttcagccggtttcagtattggttaacttaaccacagagcagtacgcaaaagaacatgtcatcatattttattaaattgagcagtcaacaagaacttctgagttgcaaagtagagcgtcttcagcttgttcaaaaagtggttaggataacaataaagaaagaaaaaggacctcaatcaatgtaagatgcttcccctgtctattgggcattgaaaacactacaactacaagagtgtattattacttattaaatgcgatcaaggggggtattcttctgcaaaatctgtgtgactaaaaatagctttcagtacaattacatgaaatgtgacagcaactaattcaaaagcttcatgaaagcggttcttacagcattaaattctgaagttacaaagctttaaccgcccatgtgcttgagtcatggatcaggccttggagctatataaattgtttgccagaaatcaaactctaaattccaaacatgttgtattcatttgaataaacaactgttccaataggttctgggtgaaaatgataggatatatgattagtttaataacaaaacattatgtggattatggaccattacactagaaatccacaaacaatcaaaatgcattaaagatcaacgaaaatttaccttctcaatctgcacaataataatcctgtttggactgttaaggtcaaccttgtgaggttgaggaacagatttggatactgcattgataattttcatcctattgattcttgtattcgaccttgcttcataaaacacaccaaaactgcaaagattaaaatatccaagtaaagaagcataattttagcaaaataacatggggaaaactcaattcacattttcttagtactacagtcagctcttgcaacttcctgtatttacttggcaatcgtggtgtatgtcgcatatatttttgtattgggtggataaggggcataaaatattgtttggtcacctctactccctctgttcccaaatataaacatttctaggtttttagcagagattaaggttaaggagaaaagactatggtgccctcctaactgagaataggagggtggttggggtaagattggaagaaatttgactgagtggtggttggtgggaatagtactctaggaatgctttatatttgtatacaccagtaccatattccaaggctcattatgtttgaacttcaaatggagaacaatgtaatgaaattaggaaaccaaacttatagggaaattaaattgaagcatatgagcccacagacaaatcaatgtaccatactcaaaaaggaaaatagatcgaatgtacataccagtcaacctacacagcaatagaaaaggacgttgacccatttggcacaaacaccattgtctgagattttcattagtagcccaattcctatcaatatgccaaatcaaggccaaaagcatgaatgcatcaagagtttagtggtagaaaaaactatatgtagttctttccaccacactttataatttaggtgtgagctgagctaagataattaaaataatacaggcaagtggtgctatttgtagtattatcaaaagtcagtaaagcaaagtgtcaacaggcgagaaatattcacccagggagaagaaaaccatatgttgaataaccaggcctttgcagtggtgttctaccaaggtagcaatggtacattagcaacgaagttatcggtatagctagcccaataaggcagtcatagaaatattttcccatttaaatcagctattgcaatatagaaaacttgcattagctttttttttctccctaaccaggattattggcaattgctctggcatcccaactaataaatcatgctataattctaccactaaactatatgtaattacatctaccatatgatttgcaagaaaacagggcgatggattttgcctggtgttgccaatgctgaagcttgtcagtgtgggtatcctggtcaaatgtcagctgctgattttgctccccattgccaccgattttggtccccattgtcgctaattcaaaatccttgacaccagtgcagcccaaaacagagcaagttctgtgggagtgaacacacattagttttggttcctggaggtttaagttcccttaaaagacagtacatgttctggattttttattcagtaatatgtgtttcagcattaacaccttaatctattctccccccatacatgctactaaaaagtgcaattattagtggtgacatatcctgtaaagatgtagaagtatatgcgatcacaatacccaagtcaccaggcaataatgcctcagagctagggagaccaacctgcatgcactgctttgaattgtgtccaaacaacccacaaacaaagcaaggcttcttccgccttttcattggatagctcacaactacatgatcctccctcctcagcaaggtatctcccaggatcaaaatatcttggtatgccctgatcatgagcagaagcaactaactattatcttgtgcagcttgtacatatatacaaggaaattcactttgaacttacagtactgtcaaataaaggggcatcaggcccatcttcagtgagcactgactctacggtgctggtttttgcctcctgaataatccattcccaacaaagaaacatctgacgtcaattccaactcacaaacataaatcagttccctatatgtaaggtttccataccataataaattcacaattagttcaatacgcatattttctaagagataacaacataagacattatttttaacttggattctacagaactgaaagagcctttccattaaaaaaaacattgcattgtctttcagccattttcaaagacagatattactcagtatagctcacaatccaagtcgattctggctgcgtttgtttaaataaggcctccgattttcttagtcatccatgaatcacagatttgcttgctgaactaaatgcataaatagtacatgaacaagatcaagggaaaagacctactcgtacctactcctcgatggcggccggttcagcctcgggtgcctccttccgcgctgcttctgctcctcctcctccttgcgcccggcctccacgggcacggcgcaaccgggcccgccggaatcgcgcggtaggcggcggcctagcggtggtctagtcacggccatggaaaagagaggagtgacggacgacggactgccgtgcgaggtcggggagaagggcggtcggatcttggagtgttctgcgacgagggcgagtcctgcgatcggctgcagcggctgaacggagcggcgacgacgacggaggtgatcgggatcggcgacgagccgcggcgctagggttagagcgggggaggggcggagcagtgtcagcgcgtcctctcgatgatggtgaggagttcagtgttttgtgtacattttctttgtgcatttaagaaagaaatgaacggcttcgttttatattaaaaaaatagaaacattatattagcatagataaacaaagaacaatagcagttagtatacccacgttactacattcgtcccaaaatataacaatcgaatataggatgtgacataaacaaataattatagtgacaaaataggtagaaaaattcaactcaactgtgcggtcaaatttatcagttggttttataactcttaatcactatctgacacttgatgtgtatggagtgcttgggcgagccggccaagcccgatgaacacagcggcgctgcccgggtacagcgtgatggcctggtcgtactgtcgcagcgcactcgccgtaattgtccttgtaccgctcgttcccagccccgggtcacctcctcctgaagactcactccctttgctgcattgatggggcaggtcaactcgccggagaccttgagtagctgccgtggtacggactagctcccaccacaaaaaagaagcagctcttccacgactctgtcaccattgactctatttattattatggtaaatcattgtatcaagatgtcaatcttagatcttattccagttcgatacatccacctacgattggtaagggggtcgacgattccatagcttctcgaatagtgagattcagttttaagggaggaaggaaattaaaaggaaggagagttgggaaccaatggcaaaaaaagtagagagaattctttatatgccactgaaaattggtctga

SEQ ID NO: 18522 - DNA, 2860 bp, Oryza sativa
ggaagcgacggcaacggcgtgctcaggcgctcgccctccccctcttcccaccaccctctcctcctcggccgcgcctcctgccaacgtccccacctcgcgcagattgggggaagtggattcggcagggaggcatgcccacatggaggtcgtcgacgcggaggagctcgcggccctcgacggcaacgcctacagtgcggagtttgccggcgcggggagcagcaggcggcgactgccgtcctccccgcctcgcacagccctccgcctgctccgctcttccctcctcgccgaaccgatggcgccggctgtcgtcccctacctcacggacggcagggcaccgggaaggactgatcgtgccgatccgacctctccgacgggaagggaggggccatatggctgggctgcagtcgattcgtgggaacgacggcgaggccggaggtagtgctatcgagcgggtggacggtcgccgcggctaccgcagctcgcgtcatcggcggatccggtgccgttgaccaccctccccccagcctcgctccacctgtcggcgtcgttactcccggcgctcttcctccgtccgcgccctcctcctccactgtcgagtttggttgttggtgccggcctcgccgtccttctgagccggccggcgcgttggttgggcgttgcgggcgagacgatgcgttcgtctgacatgctgcgcactgcctcgctgtccacaccatcggccccggtctcacgttgctcaatcctcgtcctggatggacgctctcggggtcactgcccccgttgtttgggtctgcgcggtggtcgtcaccattttttttcgggctgcgcgtggtcctcaccgaagctcctggaacacgtcgtcgactcaagtgccttgccttcacccaccaccaatgcagtttggtttcagcctgagccttctcttctttttctttcgttttttctatgtttctatatcattcactctttgagctgtcactggacagtaatggtttgtgtattcttctcgctgccaaaaagtcactgacgatttgcattctgcattgaagaaccaaagcaggaaagtgtgtgcatcatttctacattactgctactgaagatttagataaccattacagtatgttactgcactgctgcttttaagtgaattcattccggtgaaagaagatgtggattccttttagttgttacaggattctgcttttaaagaactgcttgctgctacaggattaccgtttcagtgctgtgtatatttatctggttttacttgctgcagatcttgaggttgaagatgatagttgaggaatactggttgccaatcctgtcactgctgtatggctcttcctcaacctgcgttggtggaagaatgcagttttggatgcatgaagtaaccaattgttaccttaataagtattgtggtttgatgaagaaaatttactcacagctcacccccttttttttttctcttggcttttattcttgtggtgatgtttttactggatgctcgtcagtgaggcatgtggtttccgaatttgttggcagaaatatagttttgctccttgatgttcaacttttaatcatctattaatattgtcaaaatgaatctgtctatcttattaggcaaaaggataaggtaatgacacattttttgtttcaattttccaaataagtatcaagttgttgatgtttaaagaactcttgttcggtattttgacaaatcatgaataattccagtccttgcattagtgaacgattctgaagctacgccaaaaggatctctaattggcgagaagatcccaaccaactttcctattgaccttcttgagtgtattgttccattgcatttgtatgtaatactgcagaattttggacagaaaatcatgtagcatgttggcaccttggaatacacgacaaatgagcaggagcagtcagcagacattttgttattgctttcatttgtgacctctttctttatcaagaagaagacaaatcagttactctgtccagtcgtatttggagtctgaaaatatggacaccgatccttgaatgccgttgctgtagatgaccatacaacataatgtaactcactgtttttttttcaagttgtgtaatgcaattcactgtatggtagtatattacaagttgtgtacatgacataattacacgtctacttgtgcaattaagagtaattaaagagaaactctcttaacaagattccgattatttatataatgtttgtgatcatggtattaacctttttaggtccacatagaatgcttttgctgttaaccagcccaataatgtttacaagttttttcacttgaagttcatcgctacttgaataataagttatgtatataatatgttgtgagattacctgtttaggttaaatgaaatgaaggaaaacttctaatcagtagcaactaatttgtgtttgatagaatctctggcagcttaaaccacctttgttttggggtctggctaaaccgtatggtcaaactgaccttaattacgtatacttttacctatgtaagtgttagggtgcgcggcgtggcgccgcgctcacatttctagtccatcaataacacccctacccgtaccaattttctccgtgttttggaatttttttcggctcctcgggaagggttaagcgtgatttgcaattttgtaaaaggctccttgtgtttgcacagaatatcgcatatgtcctctgaccgcctgacattccattgtgtttcttacgtataacccctcgtattctagaaaaatataacgcgaagaagagaaaattccatttctaaggctagcgctgtaaacacgaaaaccatagggggttttctacaaaacataccctccccat

SEQ ID NO: 18523 - DNA, 12200 bp, Oryza sativa
ccctcctcgccggcggatccgtcctccgctggcggccgcgtgcaccggccgtcgtccaccgtgcggatggcgctgcgggaggacgggccatccgtggccatcgtgggcgcaacgagcgttgtcggccaggacttcctccgcgtgccgtccgcccgcccccagtcgctgccgtcgtcgtccaccctccatccgccgccgcctacctcgtccgccctccccccgctctcctctacggcgagacgtccgcgctgctcgacgcgtggcgcctcctccgcaccgcagactggcgcgcctgcgcggccgccgtcaccgtccgccgcgccgccgctgggcgcgcgccgcgcaccgtcgaccagtgcaagaatcgcttggattacctcaagaagcgcctcaaggccgagcgctccaggtccaaggggaccccggccccgccgccaccgcctccctcggtcgaccgcctccgtgcgctcctccgcctcgccccctccattctccctggattcactccccggggcggcgccataccaaaggtgggagaggatgccccgttcctggccgtcggtgctgaagcggccgaggacggcggtggcgttgctaccgttgagctcctccacggggcatcagcacggagacggaaggacatcgtgcacggaggtggcggcggcgctggataggctcgccggaacatacgagcgggtggaggtggcgaagcaggaggtgacgcggctggaggagcgacgcctggaggccatgcccgacctcgagatcgagcgcatgcggattctcgtccgcgtcgccatctccgcctccgccgtggccgacgccgccactgccacggcggcgtcctctaattggtatatgccgtgagtcatttcattccgtatttttcgtgtgtgtgcatctgtacattgtgcagcagctcgttgggtggtcataacaagcaaccatgtttgaagattcgtgattctggttggaatttaagcacaacatggctggaaaatttgcacttcgctgataccaaaagcttatcatgataatgtaataatcaaatttggtcagacaataatccatcatattaacaggcaatgctgatatttctgaaactactcacgtgcaaaaactgctttcttgtgatgctctgctcaatctgattttagtagaatcccaattgcaatgttcatgtccaatgagcatgaagtgtactgtcaatcaatgatcttttgatcaccttgatggacttgtcatttgttattcacgatgccattgctgctttgtactcctacaatctgtggaggacacaatcccctgatacttttgtttgtcatctgtttcttgccagaggaactaggacagtagactggccatggtagccatccagattccagtctacttttttcaagagacaattgtagtgtggagaaggcaattgacgtgatgccccggccaaaatttacatcggtttagattacagggaaaggttagccagatataagacaatacatggtgagattttttttttctttttagttcactgatagcaggttagcagcaatgcaagatgagagacttgatttcctgaactgaacatatcatctgatttagagtcagttaatggttagctattgctgtaatcccctcttgtattgaatacaacagcatgccccaaagcataagcaagccgctctgaaaagggcaaactgcaagcgttctgcaatgcctccaaaaccagaatctgcatatccaaatggtgcccagaccaagccaccagttaggttgacaactggtgcactcctctgaccataactgaactcgagtagatgatatcatgatattgctgattaaaaacagtggcactctcaattgtggctaggaacaataaaggtacttatactagcatagaaacttatgtaaatatattgatttttgagtaaatcatcaataaaaaaaactcctactgataccatttttgttggcggcaacgatgagcaaggttggcggatgggagcaggaccactggatgtgtttcgtgtggactccggccccacgctcgccctcccttctgcactttcctctcctcctctcctctctggcggcagaaacagctcaggatggcgcggctcgaggcgacgacagtagagcggtggggctgcacgcgtctacaagttatgaaatggccgtatctttttttaaggaaagcaagaaaggtccattcaaagaaacaaaatatcattttcatgctaattagagtttatgtttttggggagtttaattagtattttcaatagcaatgttaaatcatagttggatgtgcaacatgtaggcgaggtatcgtgagtcttgtggtagatacatatatatttaagggttaatttaatacatgccattaaaaatttgccggtttcaaaatataccactaacattcatatatttggaaatataccattataattttacacattcaaaagataccacaacttactccttggatacatttccaaaaaaaaaaaaaagaaccaaactaccccttttcccctcttcttccttcttcccctttctccttcctcctatcttccttctcagcggcggtgagtggcggagcgagtggtgcgtcggtggagcaagtggcatggcggcagagcaagaagcaacgggaagagagaggtagaagataagggtattctcgtccaatacatgcgaaatacatatcttagtgacaccattgagattacaaacaagtagcagtggcatcgttacaaatacgcaaatagtaatggtatatttttaaaccaacaaaatcttaatggcatagatctaattaaccctatatttaaccgtaatgctttgcttataaagctattataaaaccatatttattgatttgtaatctgagttagtaattggtttccatgccaattcatcccctcacaaacaataagttgggtttgatactcttggttcaggcttacaatggttgtggctgcgcgtgtcgtgtcacggcgcattgacattactgagagatcaatgagtaaatgatagttgttgccgttccacattgagcaaggtggtgttttttttttccagttaagaattggaaagaatgctccatttaagcaagattatgctcttttagtttgagaattggaaagaatgtgatctttggttcacatttaattatgctacgtagccttcactaagctcatgcaaaacattgtcgtgcgcggcgtggcgccgcgcatatccttctagtatctataatagatgtgtagcatactgttaaagatggggcaacaaaggtccgtcaaacagccaagaagaaggcatcaaaggtccatgcactaattggacgattaatccagggaagaaggcatcaaaggtccatacactaattggacgattgatccagggactttcaatagagaacacatcgactctgttcggcggcatcgctgccgcagcagttttgaactgctgcagccgcagccgctgctgtaaaatgccccctccgaacacacccatagtttatttgctcctctagatattctggaggaaaagacctcagcggaaacaagagcccatcaagcctacaaaaagggtacaaaatgaattgcaacagccaatatacaaacaaaaccaatatgttcagaactaaaagaaaaggatgtgtatgctaacacaaaataaatgtatcacattgaacagttaaacatattcaaaaccttcccacagctgtcatttttatcataagtaaaaattctattgcatgaccaggtcatcacatgaacacagcaccctgaggaagatgtgtcaacaattaacctacaactgccttttatcataagtaaaaattagccaggtgaacacagcaccctgagaaagatgtgtcaacaattaacctacaactgccttttatcataagtaaaaattaaccaggtgaacacagcaccctgagaaatatgtgtcaacaattaacctacaacttccgaacaaaaggtggacaccacaagagatcttactgaaattgaatacctgactttacgctctatatctttttacccaatatacatacaaaagatataaattttatatcatctttattagtgactcttgttgggtttcatctctagcctaccaaaacttgtttgggacatataggcttttattttcatcatggttgtaattatgcgcttttgcaccacaaaagagtggacgacatgatttttgtgattaacacaaccatgcgattgttaattttaaactattagtaattgtgatgcacaaagctataaagtgcacaataatcatacatctagcaaataacaaagctaaatgcagaaggatatttctaaatttctcaagacaataaactatatacataatgctaggttgtaattgcataggaaataccagcataaacccatcttgatgctgaaaaatttgacatcttaagccaatattgttgctatagcatcagtacatcacagttacagttcatccaaaccaaacaccgtctaacagcactagttactaatgttaactgagtttggaaccaaacagcacaaacttgtatgacacctgaatactactccatccatttcatattataagttattaatgttaactgagtttggaaccaaacagcacaaaattgtatgatgcctgaatactactccctccgtttcacattataagttactaatgttaactgagtttggaaccaaacagcacaaaattgtatgacgcctgaatactactccctccgtctcagtcaaacttatttatgtttggccaagtttatagaaaatatattaacattttcaatacaaaacaaacatattatcaaaatatattcaatgttaaatttaatgaaactaatttgatattgtagatgttgctaattttttatataaacttagtcaaacctagagagttttgactaagaaaaggtcaaaacgacttgtaatatgaaatggagggagtacgtaacaagcaaaagtatgacaattgattatatgagaaaaaagagacagtgacacataacttaccccaaaccgcagttcttgcttcaccaaccaaataggctgtcttttactgcaatacatgattcctttattcctacaggacgagaaggattcatgttcatcaactcctcgaaaaaatctctgggagctaaacaaatatgcagagttgagggctcgacttaccaatatctgcgattgcagcaagtaaagatatgatggataagtgtatggggactcggtggtggtttatggaaaatgtctccgtcactagctggagcccaggtaccagtacctaggtcatattgctcaaaacgaaatatatctagtgaactaggatcgacctgcaaactatgcatgcaaatgatagagttagacaaatcggagggaaggatcttactcccctccttgttatttgagagtgagacacagagacaacgttcatcaaggaacaaggcgtggtctccaatggtcgttactggctcaatccttccactgacaaggtcagcaagtctgtatactagcagctttgaacgagaaacaccattataggcaaccagcaagagctctgaaccacattcagcaaagttgagcaggtatagaaatttgtccattgggcattcagcaatcttcactggcaatggcagatgaagcaatcccttgtcgttatcttggcatggtggattaaactggtagatgtataccttatgtatgtcgtaagatgagagctgcaaagcatagagtttgccttggaaagatacgggtttgacaaaaggtttgagcgtccaggcagagagagtccaccgttggtcaccgggagtggcgtaggctacgcggtgcaggatttcaagggccagcatgacggtgatggtgccagtggaggtgacggtaacagatgcgcaaactttcattagtctgctgtgcttgcttcgctggctgcggtcgcggctctcggattccatctgtggcaggagggaagccagcggcgggaggtcggcgacatcgccggtgaaggggtggaggaggcggatggctgtgtcgtggtcgcggtgcaggagcaggaggccgtcgaccgagtcgatgatgacgtggtcgcgtaggagcggtagatggacacggaccaaggcggcggtggagaggttgaagaagcggacgtagccgcggaggtcgggatggccggggtagaggccgtggccctccggtagcatcatccaccgccgcgggtggaaacgccggtcggtgacgccgcggccgagtgggcggacggtgcttgcgctccagtgagagcagacggcgcggaaccggacgtagtcccgcatgtcgtcgccggcaagcacccgccccccgatcagccccaccagatcctggtcaagcgaagcccaatccggcgacatcttgccggcgtcgctggggatgggcgtcaggcggcggcgcttgctgctccgaatcataggcggcggcaaaaactgcaatcaacgataacggcggatcgaacacgattaacgaaacccccctctctgttgttctctagcagatactcctatcctatatagagagtttggatcagatctaaacggaagaaatatcggttcggaaaacacttacgagacagactctccaaatatccgtccgctgtcgaatcgcatcagaattagtctcccggcctggaactaccagccgccccaaactccatcgatctacacggaatcaatctaaaatggattgctagggtaaacgcaaagggatgaggaggagaggggatggatatatcagccgccatcgccccccgtcttcagagaggttggggaagaggatacttcacagcctgggcctacttgggccgtgtggctcaccgacatgggaagcccctatcagttcactttgggtccctctatttgtcaccccgtccgaatttgaattttgtccctccatcgcaaaatcgagtacgacgatttttttttcccttcaacctatgaaaccgtttaaataagggccctaggcagtattgtgcttggttttgtctaaggtggcgcctacatggctcatgttgactaggttgtccaacgtgtcattgtcgtggcgcttacgtggcaattagatccgcaaaaaataacaaaacctgtggggcccacaagtcagttgcacacacaatttataaataatattgggcccatgtggacccacacgtcgtcctcactatcctctactctctatccccccctctctctccctcttctcactctccaaccggcggagcggggtgggtagtggccgaagtgggcgacagcggtggagcggcagccggagtgggtgacaggcggggcagagcggcggcggacggagcaaagaggtggagtggggcaaagcagaggggcggagtggcgacgaccggagtaggccggcggagcggagcggaccgtcgtcttcaaccacgtcactcaccacgtccagctcgaatggtgaggccgaggcctcctcgtcggcgtcaatcgtgctgctgctgacggcgtcgtcgtcgctcgtggcagacggctcaccacgcggacctcacacaccaaccgcaccgcgcacatctatcgcactcgccggtgaccgctcgagcaggccggagcgaggcgagcggatctatgtcgtcgcggccatcgaccttgccggggagaggagcgacggagccgggcgggagaggagacgcgagcgcaggagcagacgattcgatggcgacgacaacgacattgaagccagtgtgcgcacatgaagcactccagctactcaacagtgcggccgactcgagttacttcactctggtcatcggccgctccaccccgttcgtagcccgcttcagtcgccgcccactccgtcggagagcaagaggagggggaagagaggatagagagaagagagcagtgatgatggcacgtaggtccacatgggcccaccattttttattatttgtgtgtgcaactgacacgtggggcccacaagttttattattttttgctgatctaaatgccacgcaagcaccacgtcaatgacacgttggacaaagacctaatcaaaaagagccacgtatgcgccactttagccaaaaccgaacacaatactgccgagagaccttacttaaacggtttcgtaagttggaagacccgttgtacccggttttgcgaccaagggacgaaaatcggactgggcgacaaatagagggacccaaagtgaatttattcctaggtggaataagtccacttggataggtgaagcatctaagcccccggtgttaattttggtaattaatgacaagcgctaattgtggactaaccgttgtctttgagctatacattttaagttaggtccacgtcatatgtgcgcatggatgattatcgatggattaaaattgacggcgcaaagcaaagggaaagaagacggtaaaactagcgctttaatttagaattgatcgaggtgtagggcgatcaaatttgctagtttatttttagtttcgccgtactattaagaggggtaatgacctagcaaaaagatgattataattgccacattaggtcattgcattttcatttgtgctctcttttttatcacacacacattcacttgcaaattcactgggttcggcctgaccaggggcggtcagaccggccacatagtggcggtctgaccggcgtgccctggccggtctgaccggccgcaagaaggcggtctgaccggagcataaggccggtctgaccggcggcacttgcgcggtcagactggccccctggaggccgagatggtgctgctcgggatggccgatacagagccgacgaagccgtattcggtcagaccgagccgatggcggtctgaccgagccgaggccggtctgaccggccaccccatgccggtctgaccggccaggccgatggggtcctctgacagggctacaacgactagttttctagccgttgcagagtagcacggtctgaccggctacatacctccggtcagaccggcagagcacagagttgggggatttcgcccccaacggctagttttggtgggtgggagtataaatatactcccccaccagcagcaagggggttctcttggcacccaattcaattgcatatactccttgcacctctctcacactcacttgagctttgtgttcatccatctagtgtgttagagggttgtttagccaagagtcaagtgcatttgcttccattgtagagctagtgtggcacttgatcatctccacaccgagtcattgcttgttactcttggaggttgccgcctcctagacggcttgtagaggagttgctcggtgacctctccgtgaagattgtggaggaggcccggcgccggtttgtgagtggtttggagttcaccaccttcggagtgaaggaagaactaccccgagtgatcgagacttgggtagtcctctccgtgggccggctcccgtcttgcccaccccttgacgaagggggcgtgcggtggcttcgtggttgagcggtggagttgggctcgcctcaacggggagtaggaaaccggcgagtttccgaacctcggtgaaaaatctcttgtctcattgtctcatttgattgtcgcatttacatttgtgcaatttatatttctagagacatacttgagatcatatcaccctaggattgcaaaacattgacataggagtgtgatttactttcctagagatataattgagccactatcatcctaggtttgcaaaacataacttagttgcttagttagagttcaccctcaccaagcctagcaacttaggttagatttgattaggtgttatttagtttttaaatcgcctattcagccctccccctctagtcgacatctcgatcctacaatagagaaaaagtacaccgaaggtccctcaacttgtcatcgagttacaaaatcattcctcaactacaaaactagatatatgacatccgttaacttacaaaaccgttcactttaggcccttcagaggttttgactctggttttatccaacatagtggctgagtctgcgtgagacccacttggacccatcattatgtccacgtcaccacctactctctttcccctcttctctttctctgtttctctccttccttccttcctctcgctctctgctcttgcatgggcatagggatgccggtgctagggctggcgcccatggtggtgcggccggcgatgacggctcctggggggtcttagcttccccaaggtggtggcgcgcgggctcgagacagcgcgagctcgctggcctccccgtccccctcgtgcgggccggccggcgaggcgaggcaagcacgcggtcctgccctcgcctgcgacaatcgtcgccgggtgcgacgcggggatcacgatcactgactcctcactgacctgcaccatcaccttctggtaccttctcaccttctcgctgtgctcctcctcttcctgttcattctctctgccccactcatcccttctccttccgtgctggtgaggttggagaaggacgacctcttgccggtgaggctggacagcttgatttcccactcagaacccgagccgtcgccgccgtgggagcacgacttgcttagctcccgtgtctgctcctctagcgccatcgcgatctcgtcaccctcccactgcctttggatcaccttctccaattcttcccgacgaatctaatccaaacaagaaatccaagaacacaaatgaaatcaatcaagaatgttctagaagagccatggtgatgagcaccgacgtacgttgaacgccgcctcctccgcgtcgtcgtcctcctcctcgccgctgaacatcaccgagatggccgagctgaatagctgatgcgccggtcgcaggaaaaggtctgcctagagctcgccgaccacaacagggtaatcgaggacagcctcccaaacatttgaccaacgcttattataatataaattaaattttatttgctaaaaatatatcattgaattgacatttgaatttactttcatatggttataatttttctaccgcagacttataatatatgataaagtataagacaaagattagtttttgagaccgtgccaagtttaaccgtgccttatatcatggaactgagagagtatttactttgaaaactattgttttttctatatttatatttttttgaaaaaaaattaacttatcaaagtttaaatataaacagtggttggtgacatgtatttggaagtggatagagtaattccttgttgttagtaaggactatttttttttcatacaaagcaaatgggattttcctcttaaaactgtactacctctaattttttttataacgcttgactatttatcttatttaattttttttcataaatatgtaaacgtataatttaatgttagagtaatgataaaacaagtcataataaaaatatatactacctccgtttcaagttataagactttctagcattgcatatatatatatatatatatatatatatatatatatatatatatatatatacacacaaacacgtgggcaatgctagaaagtctaataatatgaaacggaagaaatagcatttatataaatctttttactaagacaaataatcaaaacgaatggcataatatattgcttcctccgtttcatattttaagtcgtttgacttttttttctaattaagtttgactaagtttatagaaaaatatattagtatttccaacacacaacaaacgtatcatcaaaatatattcaatgttagattttatgaaactagtttggcgttttaaatattgctaaatttttctattagattggccaaacttgaataggaaaaaagtcaaactacttgtaacgtgaaacggaggagtaaaaaaatggagggagtataacttttccatttcttattgtcaattaattttttttatcgattttgctatatatttgtcgacaaatttttcccccaaaatttgacagatgtaattacagtacaatcgtagtgtaattacactgtaacttgcatgtagttacactgtaactatagtgtaacttgtatgtaactttcaaaaatctctccgttacatgttatttcggtaaaatggaggtcgtgggaacaaattctttcacatatgtgtgtgctatgatttgttttcttcctcaccaaaacaaatcttgcactaaatccaacgattcaaaatt

SEQ ID NO: 18524 - DNA, 6957 bp, Oryza sativa
aatttgtcgacaaatgtataggtagtccctttttttattaatccgagaaataaacaagcacttgaaatggttttcgcagatgggctaattgggccggtggcccggctgattccgacccatccaagcatctcctctcctccgaatctcctccacctctcccacacatctcctctcctcccctcgccgccgtcgacgcagaggcttggctcatcgcggcgccagtgactgatcgatggccgcggcctccatccccgcgagctcccagcccttcaaggtttgctcccgggagcagctccgccgattaatctcttcttgtttgaggagcgaccgagcgagtctaatcaatccgttcttgctacttttgctgtggcttcgtcgcagctgatcctggggtcatcgtcggtggccaggaagcatatactcgccgagatggggctcgaattcgaagtcatggtgggtttgcgccgcttttctcttgcctcttgcccactcccgttctgcattttcgccccccttttttggtggggatttcttgctttcgggactgtctcttgggggatgaactgattctgtggtttcagactgcagatatcgacgagaagagcatcaggagggagaaccccgacgagctagtgacgatccttgcggaggccaaggtgcggccttttctctctttttccccccatttctttggaagtttttacagcttcagcattggcgtcccattcccatcgctacagtagcaaatgcgtcgccgagtgccatgtattaatattacttgtgcataatattagatggtatttatggtgatatttggtctgtaccaagtgcttgaatttctgagaaatgaaaccttggcagcttcaatgggacatttggatcggacttgaccgagtaggtttcgatttagttatggacttgaattgtaactctaaattaaagaatggaaggcactggttcatctctggttgtttctattgctgctgaattggtcctagaagaaagagcataccatgacttcgtgttgatctcctgcattgtgatgctgtttctatgttgtcaattttttccccttgtaacaaaaactgaccactttgacatctttcaggctgatgctatcatgtccagattgaatatttctgattaccagaaagaaggcgacaggccaacactcctgatcacttctgacatagtatgccttgatttcctttgctatgctattttacgtggaacttggatgctttattaatcacaaaatactatgtttgaaatttgaccatgcctcaatttcagttctcctttgatgtttttttcttagctaggagttccatggattgtacatcaatttaagtatgactattttggtgccatgtttttgttattacacatttgtgtagataggccttttcgatatcaccaaatccaaatgtcatacagataaattagtcaattggaatcaatcctgaatatgaaattttaaattcctgagatgtgcattgtcaatgctgaatagatcaatacattcgcttatttaagaatgatgtcctgtgtgaaccataagtttggtaatgatgcatagcgcaagtcattcctgtttcaactttttgttcggcatgttctcttcgttctagagttcatgggcatgtggttgaacatatctgctttaggacccccatcatttgcattatccggggaatagccaaacgtcatatttgcaaacaaaaaataatttgtgaataaaacttttatatacatgttcttacgatctaaaagcaaaggctgaaaaataaactttgatgaaaaaaaccctaaaatcaactccaaatttgaggttggaaattcaaattttggttgataagcataagcataagcgaaaagatgaggttgttatttactagaatgttgtcattcgcattactgtcatactgaactgaagttgaccttgaggtggtcgtccatgaagggattatcagagaaaagccaaccacgaaggaagaagcacgccaattcctgaaaggtgtgcccacatgtcgaggcaacatgcatcttatattcttgttctccaatattttattgtattatttattacttgaacttttactttctccaggttattctggcagccatgtcgcaaccgtggggtctgtagtcgtaactaatctgacaactgggaagaggcttggaagcctagacaaagctgaggtaatttacttttgtagttcagcacttatttgatgagaaaattcctttgatagaagctgtttgtattcaagtcagatttggcaatgcgggtgatcccattgatatgtgcgcccaaaggctattgatcaacatctttgacagaacataattcacccaagctctgcaaatgtgtaaaaacaccaaaggatattttcaccatccagtgactaatgacaattgtagttttcagacttgtttgtgtggcaagctttgttgtgtgcatctagctagatatagctactacggttcttggtcatctttttgttatattaaatcaacaataaaaagtttgtctctttgagtttcttatcgtgtgttcaggaggaactattaaaagatgatgtcattcaaattctattactgcaaagcaacaatttagtttgttctctaatgttagtatttaggacaattatgggaaaattcagtagataatatttaatttctgccagtcaaaaagtaactggattgtgtatgtatatcatggaaaatttagttaaggttgccttttgtcgtcattttgcaggtgtacttccatgatataccagatgaggtcattgaaaacctggttggcctcgtttattccactctatgtaatatattaattgattatttgctaaatctaacatttataattgtagcaacagtgccagttagaatactatcatcataggatccaatctttaaaaaattgcaaatgtttttatgccactgacctgctctctctacccgtttgaatgtcaacagatcgatgagggggtagtatttagggtcgcaggtggcctgttgcttgaacatccattgacattaccatttgttgaagcagtggttagtgtctatctcaccttatttttcacaagtcttatatatacacggcattttaaactaatgcaaacttggtctccttttcatgtaggttggttctagtgacagtgtaatggggatctcgaaggatcttgcaaacaaattaatccaggatgcattgtagcctagcaatatttggtgctctgttcattcatcacatttattactgctcccaaagagatactacctatcggtgaaaatatgtcagggacatggtggtatactggtatctcatagtcatttttgtagctcaaaagcttttgaaggatttcagaacctgacacacgaagacgcatggcgttcaagaacacttcagttcctctgtctactgttttgatgagatttttatcattgtacttacacctttactgaatatatacactgtcattgtgaagcgttcagtcgataccttaatggaaaacgaggatgttgccaaagaattcgcaatttaaatgttaaatcgagaaagacttgtgtcatgtttgcaatgtgtgaattgaactgtttgcagtgaacattttgcaaccattaccttgatgcctgggtataaaatgggctgggttcgatttttattaatttttggcctaaaaatatttaagggctagagttgtgaaagaacccatgcatggcctaacccattaccacccctacctacaaaattacagtctgatcttattgtatacgatctgagtgtgacaatacaggaagtactctccagcttccaaaattctgcaaattccacgtgaaacagttcatttatatgggcccagcccaactttatatgggcccacatgtagattacactaccgttccagaccaacataatatgggcctgcacctcggtgacaatccctttacggcccaacgtaatttgggaccacatgtgggtgaaatcccgtctcggcccaacttggtttgggcccgcaaagaggtgaccatccggtttcgtctccgtttcgtcttcttcttcttcttcttcttcggtgacaatctccgtttcgtcttcttcttcttcttctccgccgtgacacgcacacggcgaagcggaggcagccgccgccggcgaccatctcgcgtcgctcctccggccatctcttcagctcctccactccccgaagctgccgcccgcgcgatccaccgaatgaggccggcggaggaggcggcgagggcggcggcgctggccggcccgctcggcgagctcctcccgccggtggacttctgctgcgcgtacggctccacgctcctccacgcccgccccgaagcgtcctccatggtcgactacatcctcggcgtccccgacccgctccagtggcactccgaggtagggtgggtgactgagccccccccccccctctcctgttctactcttccagattattccatccaattggtccccttcttggtttgatactctttgatgcgatcttggttcttggatggtttcttggttggttaattggtgcagaatttggagaggaaccctgatcactactccggatggatggctcgcctcggccccggcgctgtaagctcccatttcccaccccaaattcacactccttttacttggttaccccggttgattgctcctctgactgtgtgattgattggttgttgcttgtgccttgtggaagttcagattactcgacttgcggataacatcggcgttggggtgtacttcaatccatttgttgagtggagggacaaggttagcatttgcaatgaagcctcctgaattttgtagcctgatgctttgtgtgcattgtggtttacttgtcttcatgtatgtgcatttagttctgagtgacaaaattgtagctatgtggatgcagaggataaagtacggggtggtgaggatgaaggacctggccatggatgtcttgacctgggaccggttctacctcagtggccgactacagaaacctgtatgtatgccctcttgttgatatctgtgggaaggaagatgcgagcactgataatcttgttttgccactgtagtggttcctgatccagggtgtatcaccattcatgtttagttcaacccctgttttaattttagtgcatgtatatgcctggtagtgcagatttgacatcagagctagtatttgtcttttgtattcatgtaggttcatgttcttgttgataattgggatataaggaagattaacacaattaatctgaaaatggcaacatcagcttctctactccttttgccagcagaattcactgaggtttagtgtcactgtatcagcattgttgttacaaccatgatatggttctatgcttgttttcaccttccctttttattccttttgtgcagtatgacctgtacgcccaaatttgcagcctatcatatatgggtgatttaagaatgctcttcgccgaagacaaaaacaaggtaaattgataagatgtatactacgttgttattcttaaatattttcctgtaatttatttcagctcaattaacatcagaaataacattccttcctcacaatagtgacgctgtcaatatggatgtctgaaagccaactctactatacaccttgaaaaatgaaatggcgtgttattttttttttttaaaaaagaagtggaccacaaaaaaaatcaaatattacatgggacgcttcttataaaaaaagcatgggatgcatggtacacagtagttcgtgtaattcattctaagtgtgatgcatgtcattatctaaaaaaaagtgtgatttatgtgatatgtttagtatgtcatcctgcacatacatgcacctatggcatataaaaaaagatgtacaatttggctgtattgagcacattagtgagttactgctgtttgctgggttttgtgggaaggactgacaagcaaattgactgtgtttctgttggaagattatttatagtgtctattgctgttgttagtctgctgtatggttgaaagatcaatatatggttgttattcttcatgctgttttttttttcccatgacaatggaacttatgaattggtgccaattatactctgctgtgaatcaggtcaagaaaattgttgagggtagtttcccatcatttcaatcgatgtacagaaccctgatacaagagtacattgctgaaggactactgaagacatcatcttatggacaacagaaggctttccatcaggcctgtgtttccttttgctcatgcatacagtttgttgaaacagtgttaaatgtttagcctctcactgagatgctttcttgctatcacaaatgcatcattggtggcccaccaagatgtttaaacttttctcgtaatgtttatcatattggcgtgttctcgcaaatgtggtatatttatctcctttgaaacttataagatattttattggcactctatgaaagtctttttcttttggaacttcataaactaaaactgataagagttttatatttgcaggattgtggtgcatctgcaacaaacgaactgttctcttatctcccatggacaatccaaaggcgaacgcaaggaagatttgcatcgaattgcaaaggtactgtcgtcatttgcgtcgagattagtaccgtcgaatctgtaacacattctgataaattgtttaatttccagaaatgccaactggtgccgcagtttcttcaaaaaatgtagcagcaacctgtgtccgcaaggctttgaggcgccgggtaatggtctcaagtgcacgtcaagcggtgtctggactgcttgcctctggtggcactgttgctgctagatatctggggaagaagatatccaaagcctggaaatcaagaacagtttaagttgttgctgacacctgatgctttatatacacctttgttagttacggatttagggtaggttttgctct

SEQ ID NO: 18525 - DNA, 1840 bp, Oryza sativa
tatggagtccttgcctcctgactttctcaccatacttcgaacagagtaagcaatatttttgtcagtgcataagcatgttacactgctttcgtctttacccatttttgctgcttacacttgtgatatttacttcagtggactactgaggtcaattttaggtaatctaggtgcaccacgccatgtgcgacttcttacctatgcaaaatgcgctttgtacggccttgaagaacagcccaaatcacagtcaggtgtgtttcagttaacttcatttatcgaaaatagtttagaccttatatcttagcttcaatataagtctgattctgatatctccaatatcctgagctgttctattgcatttaggctcaatcaagcgtacattcttgcaagtcaaaataaacattagctatcttcgtctgaggatacttatcggtaatttacaatggtgccactttacagtcctttttatctatccagtttgtatacatactgatctgctaattgacgtgaaaattggttatactcacatgttgatcctgaaaaattcctttgtatccttttttttcagaattagcagggtttttaatgcaaattaatgatcttaggcataagatcatgagcagattcagacgtatcctccagaacactagctgagctttctcttctgatgttacagacctcttaactcttaagtaatgttcaagtcgaccgaacaggacaggaaagagcccatcgatacttaagcatttctagagtatagttttagcatcaatcaaactgtacaattaaaacttagaacctgggatcctgatgctgatgaattgtaatcacacctcaattatatgtaaacacaaaatttgggctccgactaatactgatttgctatgaatgaagtcttcggtttcatgacaaattttcggatgacaaacaagatggaagaaaattgtcatcatactgtgtatgccatgcatggtcatctgtgtcattaactcattatgctgagtgatcctacaaaacttgcggcttagcacaagatgctgacaatgaccaagctccaaccttgcttcaaagtcatcaactttactcaagtcaaataattttattagatacagaacacagtccgtgcaggctttttcagtcaaagaataaatgggtaaagtactatagaatatgaatacatgctcatcttttgctgttctttttcttcttatttcaaagaatccaataatatctgaatgactgaaatgattttccacatttttacagttttgacaagtacgcatcaggctttgttgggaaaaggtcataagcatgtacctttcgatagtcctcccagtgaatattacgggaaagtacttagcatatttgccaacaccaaactgttcacctaactccagaattttttgagaatccaacaatatcaacgctttccacagctgacaatagtccaatctgaacttttggtctaattctttataaattccatgatcaagcagcactgcaaaaatatggatcacttaaccaactaaaaattatttaaagctcactttataaaatagaatctaatgactggaatatattaagtgtctactctcttcaaaccatgtgcttctcaccataccgtacattctcagagccccattgctttgcacaaataagccaaagcaaaagccaaaatttaaattttcaaacttaattttgaagttgattttaagatattttaaacataatttctttttcagtattggcttttaagtcgctatgaacacatatataaaagttttacctacaaattaatttttgttccttaataagccattttagcttattaagaaatatgggg

SEQ ID NO: 18526 - DNA, 2824 bp, Oryza sativa
gtttccggaccgagaagggcaagggaatcgtggctcctattgagtcggtggcgcccaagtggccgccggagagcgccgacctcgaccatgctcgccatcgctggagccgcatgagcgaggaggagcggcaagccttcctcacggtgagttttcaagatatgaagtcgcatttcctttcaagatcaggaacgtcgcggtggcagacgagacgtgcgctctcaggtgctgaggagctcgtcaacgggtgtgggtcgttttcgttcggctttgccctttctgcttcgtcatctttgtggatgctacggagttcatgtcgcacatcgacagcttccacattgcgggttgcaagaaagaattgcggtcatcaatgcctgaaagagtaactggctgtgagatggagcttctcaaatcatggagatgggagccgatgccaagcgatggagatgatttggcagagagggcattgatcttgagcaagcttaagagcattgtttcttggctcattgataaggatgccgtttctctcagccttctgtacatcatgtacaagttcatcatgagccgggtcaggccagtaaaaccttctgtggatccatgtgcggctcctgcgggattggacagttgagttctgcgcccctcaaggaactgcttgatttgcttaagtggcttccacatacccatacagactataaacaagagaaccagaaggattcgcttggtttggctacatggatggaagagtcaggcaccttgttttttgattatcggaagaatgcttcaagaaaaactgatgattctagccagccagatgaattttttgactggctattctgcgaatctttgcttgaggatcgctgtgaatcatggcttggcatgcgggaaaaatgtgttaatcttggacctgccatctttaaaaagataactgaagaattggataaactgaagctgaaatgcagctcatgtgaagaactaaaacaaaaaggaggtgtatatttccttcctaaggccatccttgagagtgatattgacatcgagccttatttttatgatggggtatcgccttcctttttactgcattctgtttgctcttcagttttgtaaacagcatcttgaacttgttgatcaatgcttaaatcctacttgctgtatttgcagattggctctgtacagactgaaatgctattaattgatgctgaggtggattaccagaagaaaaggcttttggaagcctgtaaagtggattatcttgcagccattttacctattgcaaagtcttacctttgggtcagtacagttcttctatcaccaactgatgaactcctatgcactttttctgtaactttttcttcagtgtgctatttattgttgacaggccaaattgaataataacccccctgagaaggttttacctcttcctccaccaaatggtcttcaactacaagctcctttgaatgtgattctccgggtaacttgtgtttgcctcattcatttttctatatttagctattgcctattggtttagttttctctaatttctgctgactatctgcagtctttgtggcacataaggcgattccatgatactctccagaagattccacgtgaatgtcgtgatgttacagttggagactttcaaattgagaaggaattgcttgaaatctttgattcttgggatcttgtgaaagacggcaaaccatgtgaaccaagtggttcgacgagatttgcagattttacaagttctctgataaaaaaggtccgttccattcactatttgtttccaacctatttaattgcaatctgtgacctccagcaaaagatgacacatacttttgtaaccagagtgaaccatctccatgtctcaacagtagactcttagttatgtcagataagctgtagatatgtataaagtagataaggtcctactcactatccattgttctgactccatagtccccttgagcaacacttttagccattttgtgcacctcaatctgaagttctttggagcagattagattaaaatcctttttgtccggatagaatatggcaggttaaattctgcaaattattctgtgactaatttgatccttgaataacctttatactgtccttagactagaccaggttcagttctacttccatttctgcagataggctcatagctaatgagaaaatgttttttgttttttgcagagtggaaaaatgactgcatccaaaattgtgaaaagcctttttcagaggctgcactcgtcacatactcctttgcattttgagttcaggggtgaaacttcggaactgcaaacaccaaccgagccaagtttagtgggttgtatatgcctagtgcatgatctctttgggttacacctttatgaaaataaattcaactgtctgaatatggtgcacaccaaatttgcgtactctattgaattgggcgctggaggagaaactaaggtgcacacttcacagtgtattttttttccttccttttttttatatatttagttccattagttagtaaactaacatctcttcactttttcagttcaagtctttcagcgaactcttggtagctagagagtccaggaatggaagtgttgggcagaaggttgcccagtactctcttttatgtccaccacgtttgttcatgaccggtagggttgccttctcaactgaactgacatttcaatgtaaattgtttgaatatgtttcatctatttaggagaaaaagtaaggtcagtggatgaaatcatttgatcggtatggcatatgatgttttttttttctgaaaagtgaaaactaattcaatcgttgaatataaaatata

SEQ ID NO: 18527 - DNA, 9283 bp, Oryza sativa
attcctgcagccccattggagaactttccaccgcccgtttatctatctattattatattattaaaagaatagaaaaaggagtctccacgttcgttctcatggcctagaaattctcacattaatcggagaaaaagaaaaagcagagtccatatagaaatacaatttagaaatagttgaaattcggaattaaaaaaataaggaatattagaagaggagactagagtccatatagaaatacaatttaaaaatagttgaaattcggaattaaaaaataaggaatattagaagaggagactagagtccatatagatatacaattagaaaataactgaaattaggaattaaaaataaggaatattagaagtagagtatatattccatatagaaatacaattaagaaaaaaaatagaaattcgaaattaaaaataaggaatattagaagtagagtatagagtccatataaaaatacaattaagaaaaaaaatagaaattcggaattaaaaaaggaatattagaagtagagtatagagtccatataggaatttaaaactaattaaaattcggaataaacataataaaattaaaagtaatgtttagagtccatataaaaatacaatttacaaataactaaaattcgaaattaataaaaacatgtgaagaagattttaaaatcaatataggaatataatttagaagtaactgaaatttgaaattaaaaattaaagaatattgaaagatgagtttagagtccacatagtaatacaattagaaataataaaaattcagaattaaaaaaaaagaaatattaaaagacaagtatagagtccatataggaatatatataatttacaaataatattaaaaataattaataactaacacatatataaaatacaatatgaatattacactttagtagtttcgtaaagttattgcaaaatttaaaattatattgtcattttaatatatttgaataatataatgagaaaacatatatgctattatatgagagaaaatataatgatgctggccgcgttatttgcgcgggccaccatgctagtttttttaaatatgcccgtcctacagtattttgaaagcaacgtcatctcctgtttcagacgagaaggtaacgatgggcatatttttgcaaaactttgaaataatagtttatttttgtaaatctttaagaaaaataaatatgaaaaatcctgtataatggtatgcgcaacgctaaaaacaacgcgttggattttaatcatgtctaaaatgctcaagcaaagcccagaattagcatactttgcttcgcagctaaaatattgacaattttaacaccggagggagtatgatgcaggtatggtagcatgctcatgcgatacaaacgggttcccgggccggggatgtgaggataatttttttattttttgaactttttaatttttatttttaaaataaatacttttgaaacttattttcaaaacctgaacttattggccatgccaggcatggcaaaacaatactgtcacatcggtttggctggtatgacaacgttatttggtcacacacaccccttgctgacgtcacagaataaaattgttacactcgttatgtgtggctcgtcagtattgtttttgctacgaatacgagctggtgtgagaaaaagttcatattatgaaaataagttttggagggtctattttaaaattaaaaaaataaaaaataaaataaaattaaggcgaggatgcgtgtgacaacaaatcaagtacaaagattccccacctttgcttgggcgtcgatctgtccgcacgcttggtccaaccctgctggaaacgtgggcaataattatctgtactgatgaaggtgagatgggtaaaggtttgtccatttttcaaactcataccatcaaacaaaaccaaatttattttaaactgaactacaaaatgatggccaatataatataatggttttacagtgtaaataattttattttaaattttaagatttaaagcgtaatatgggctgcgggagaactatataacaaaataatatatatcagttgtaaaatttattttcttgcttactattcaattttcttttatgtgttttctgtatcttgtaccttaatcaattattcataagttataaatgattgagatgcatggtgtggttttttggagaaaatgtgaatttacattctcaatgaatcatccaaaaccaaaagctaaaaaggtgacgttgtttagctagagaagagagaattagcattaactatatttagtgaggatggactttgtagatatatatgatttggattcttgttatataatacacatgggcattaaatgtaggaaaagaaaaggaaaacagaaaacagccaagatatggcgtactggaatggatcagatacagataagctaagctagcctcggaaaattgcttagaatattcgtcgacaaataatacttgaatcaaatcattgcgttttcttacgcacgccatactcctgtagatatcgacaggtatgctattcctttgacaggactctatgtactcaatttaatttcaagagtgaagtatttatggtgtgttcagttcacgttaaaattggaagtttggttgaaattggaagtttggttgaaattgaaacgatgtgacggaaatgttggaagtttatgtgtagaaaagtttcgatgtgatgaaaaagttggaagtttgaagaaaaagtttggaactaaactcggccttatgaaagttgtgggacgatggaaacttcgcttcacctttccagtttattttcttatcccattttattttttttatgaagctaaaatcgttttgttagttctatgtttaaaagaagctaaagctctactaccaatctaccaaagagacctcgtatctcgatctcgatcggaacgtgactcagctgacgcacgcaccgaatggggtcatgactgacgagtgttggagccaaacggcatgccagactggcaaaaggcacaagggatatcatatacagtgggcgtcacgctgtatggataattcattttatcgttttatgaccagtagcacgtactccctccgtcccaaacaaaaaaaaataaaagacaaatcctaagttttcgtgtccaacattttgaccgtccatcttatttaaaaaaattataaaaaaaaattaaaaagacaagtcacgcataaagtattaatcatgttttatcatctaacagcaatgaaaatactaattataaaaaaatttcatataaaacggacattcaaacgttggatatggaaatccagtgtttgtcttttttttttttttgatggagagagtatacgcatgtatgtgtgttcatgccaattaaagtgggccgggagaaaagcgcaaatctagggcaaaaattccatcgtacgaaaattcaagttcaaccaggcttggacaccaggttttggggttgccttaatgcaggttatcaaatgttagagctgaaggtatagtactcaacattatgtactgcaggtaaaaaatgggtgttttttcaatcttattaaaatgggtgttttttaatcttattaaatattatattttaagtaagtggattaggatttaggtcctctaatattttgggccttgtggtgattggcaacacggcactatcttaagggtaagtttacagtttatagaaaagcatggatgcctaagaacggaagcatgcctggggtaactaatgcttgaccggttgacattaggcctgtctctaaaatcttgtttaaattttgttaaatcatcgtgtaaattttgtagaaaaccaaaactttgttagttaagcctatgttgatcttaaccctagtcttttgtaatttctaactccgtcactaccgatgccaacgaaaaaataagttggttagagaattgagagacacaaacatatatgattggatataattgacgataatcacttttcccaaggaaacaacaaaactagtagcgatgtgtgaaaaccacggtgtcaatgttgcaatgggaaagagccatcatggttagacaaggtgcatatcaggactacctacggtctactagacgctcaagccagtagattccgtaagagggttgattggggataagccactgtggagtctatggtcacaccaaaaggctactcctcatataagtccgttgagcatattcttcttcttcgaggtaaacttgaggaggtggacaaggagttcaagcaccttagaaaatctcttattttacacatatattgatgtgaaattattccctctcaattttcttcaattccattcaaaccgaacaagtcccgaaggaggaattagacgaataagatttcaatcaatcatgagaaaactcatccccgttgacatagcaatagcaccaaaacccaagtttcaccgtcgaacacctcgggggtttaggttgaaaccacacaccgcttgccattacaccatcaagtacatcacagagctagctagctgctcgcaatctcactatctcagtacccggtggctggtttggcgaccatccatgtgtggaggatcttgccggcgacgtcgtagaaggcgaggctagcctccgccgccgtcagccgcagcgacatgaatccctgcccgtcgtagaagaactccaccttgtccgtgttcgccgtctgcaccccgcgccacgccttcgacccggcccgctcgtcaggtactgaatcttgctgcaatttatttataagttttttttgttcaattcagagtttcagactaggcataaattcagacgaattttatcgagtttgcagagaaattccggcaaattctttacctgtccctgctgctgatgtgctcgaggcagtggtcgtggccgttgaggtagagatcaactccatgtgcctgcaatttttttcatacaaatttacaccatggtgaaaagaagttcagaatatatatttcagatcaccaactcgagtcaagaaatgttggaagcatcggaggtgtggtggtagagtcatgcgtgtatgactccacccataggatggatttaaattccggggttcacaactactgcgtatacgtaggtggcctttcaatagaaatttagtgagatcagagatatatcactagttttcatttattagagtatgtgttagggatgcattcacggaatgtgagcctatataggggtgtgcgcgtatacgtctgccgcgtaatcgaaaaaagaaaaagaaatgcatatactactttgaggattggaaggagatgctccaggagctccttggtatcgccgtgctggctgacgctcctgatggcgtggtgtccgaccacgatcttccacggcgctttggactgctccagtgcatcctccagatcctgaaaacaaaaaaggaattaaattaacacacaagttatgaaaaaaatgagcaaataattcatcaggaactgcaggatcagagcttaatttgttgggattaaatgattaattaatttaccttgaggacatttgcaatgtaggtttcacggggagaaacccctctccagtcgtacttgctgttcttgggatcagtccagtacttgagcacgaacggcgtcgtgtccacgaagaagaaatccgcgatctctgatcagttttaaattttttttcattcaaaaccaaaaccaaaccaacacaaaaatgtgaacgaaatacatataaacacatatccaattcttgatctcaaatggtgccagctaatttaacggatcagagtaaaagatgctaaagattgaatcaagacaaagactctgtcagactgtcagtgtcgtttactcacctgcgctaacgacgaaggacttgatgcagatccagcggctgtcgaccttgcgaagaacagggctcagctgggcgagggcgtcgcccctgtagtcatggttgccaagaactgcatgtttgttatcaatatcgaaattatcaattatcaccatacacaaatagaaaatcaataatctatttctctttcttcagagtaattcagatcagtgcatgaaatttgatggtggcattcagataatcagatcgcattgcatttgatagtgtagtggctgggaaagtgcggtttcaactttgaagttctgtgtttaatttctatcacgctcactatttctttttaaaaaatatttagagagacgtctctgtctccaaattttttttatcgcattgcattttggtgtggtagtagcattcagataagcagattgcattgcgttggattattacttaccggtgtaccatggcttgtggaggctcttggcggtgtagatgtcggagaaggattcttcgaaggccttatcatcgacgccggtgaggccgttcttgtagaagttgtcgccggtggagatgacgaagtcgatgtccatcttctcccctactattcccatctgcatgcacacattttgttgctcatttaattttgttcacttatgtgttgtgcattgggatgcaaaggattggtctcaattcgtcacatactcatatttatttagggcatgttcactttgatgccaaaaaaaaaccttatcaattttggcatagttatcaaaattttggcaacttaccaaaattttcgtatgatttcgggcctgttcactttgatgccaaaaaaaaaccttaccaaattttggcattaccatttcttatatagttaccaaaaatttggcagcaaactaaatgtagccactttctttttgacaactttaccaaaatttggtaagtttgaaaatggcatcaaagtgaacaggcccttcttatatagttaccaaaatttggtagcaaactaaatctagctcttttttggcaactttaccaaaatttggtaagattgaaaatggcatcaaagtgaatatgcccttattatgttgaaaaacgaaaggaggttgttataaactcttcaaagtcaaaattaaattatgttgactgcacacatcctaaagcgtcattcctttttaaaatatactattatcaactgagctagatagatgtgaaaaatccacacacttgcatctagttctatccagggttcccaaaccgtcgtaggtacggttaccgcgcggtaaccgcaataaccatgaaaaaccgtacgaaaccgtgcaaaatttatcaaaaattcaaattattttttaaatttatttgaatctaaggaggttaccacggtatttctattaccgtacctccgcggtaaggccggtaaccgcggtaaccgcgcggttaccaacggtttgggaaacctggttctatcaccactagaataacaattttgtttttttcaaataacaaaaatgttagatatcaaggaggaaattagtatcaattgagtaaagaagataaaaggtgaaaaggcgccctagccagctatgcggctgagttcgggtgtgaggattaacaaccttcactcctagcacctaaaacggaacagttaattagtgtgtaattaattaagtgttaactatttttttaaaaaaacaatatgatttaaagcaactttcctatacaacgtttagccgtttgaaaagcgtgcctgcggaggaaaggtggcgccgaatacagccgtacgtgtagtttaaagtaacttttcgcacattttcttctttaatataatataataccaacaaatttgctctgatttttaatcagtatcttttgatacgcacgtgatagatagtgagtagatactacactctgttttcttccttaaaaaaacaagagagcactaaacatgagcttaatttacaattccacatagcctccaaaaccaacctcctcgttttcttgatttcttctaccttaacccacattgcattacagtatttcataattaggccattaataattaactagccacatttagcaaaacgaaatcatcaccgccaactaatcaatcaaaatcaatcgattacctgcgcggcgaccatcgactggttgtacgcgccgcggcgcccccagtcgccgacggcgaggaggctcagcgacccgtcgcccttgcgcgggtgctccatccgcggcatctccgccgccgcagttgccgcagcgacggcgacgaggaagacgaggagtgtaataactggagcatccatggccgatcgagcagctcgatcgccggccgccggcggcgctccttcacttgctcgtcgcgtggagaggagaggaggctatggctggctcgaggtggaagaagagggtgcgtgcgtgtatttatagggggagaatggcaatggtggtaaatattaggagaaaaaaaaagaggagtggcaatggaggtaaatataattaggaaaacggcacggggacaatgtgcggctgcaggtgggcccggatggggggaatggtgggtggggcccacggtatgagacttggaggttttgctagattgccaggtcacgctttgcctttttgcgcgggaaaataagtacggcacgcatgcttggaacgcatgaattgaacatgttaattttgtctacaatcatgcaacatggaagtgaaagttgtagaaatgagtgaaacaatccattaattaagaagtcatttgaaacatgtaggtggaagtaattcatgatcatcgcaatggctagaaattactttcattatctaaaaccgtaataaaatgattgttaaattctgttattagccgttattgtttgaatccatatgtttgtaataaaaaagtacacctataacgttctatgactagcaagtcgctctacctttgacaagatcggtcaatagttgagtgcagccgcagaaaccacctatgccccaatgatctatgatgctatttcaacaatgtggtcatctatatgactatataatgtagaaacggttggaaataataaaaaaacaaaactacctagattgtagagccagccaaaatatggtgctcgaagctgcttctcatactagagagtctcagcatacaatatttgatgatcaacccctcttttcatgtttggctcacagttgtttcttctcccattcccattttgaacttgtaaggttgcagctcgcaatttctctcagctgtttattttgttcccattgggttcacccctttcggctttcctacctatactttccaaccttcatttaattgattgactagctgacacttgcctccttttcaataaaaagattggaaattcaatctgggtagttagggattaagattcaacactaacggcaaagtagaaatttttcacacaaattaagaaaatgaagtgtatgttttgcaagtaaatttgtatgttgcatctaagctga

SEQ ID NO: 18528 - DNA, 4078 bp, Oryza sativa
attcctgcaccccacaaatctatagcctaattaatccatgattagcctatgtaatgctacagtaaacatgtgctaattatggattaatttggcttaaaaaattatctcgcagattaactcttatttatgcaattagttttgtaagtagtttatatttaatactccaaattagtgttctaacatccgatgtgacatagactaaagtttagtccctaaatccaaacaccctctttagtaaagtaagggagtgacactccctctatttcgttctatctgtccctgaccatgtggcaaaaatacatgtgtggcttggctttatcagtttcgcatcagcacaatccaatagataactaaaaccccatgtcatgggctatttttgagttatactggatggcatccgcgctttgcggtagaatatatgaatgagtatatgttaaatattgtacaaatgatggatggatttggattgaaatatttttaaaatgatttgagaatgatgatttataatgtatatgccgagttttagaatgtaatagttactatgtttgcatgttgagttttaagtgtttagtaagttgatctggcatacttgcatgttaggctttagaaataataataaatacaatttttacatgttaaattttaggtgttcagtgggttataactaattaataatatatttctggctgacaactcaaatgcaggagcaaattaagccattttgttagcatcatgtccaataaaaaaactaatgggctttgaaatggcccatccaacaatgttttttaacacacacacacaattagtccatttagccagcaatactctttagagctcagtggttgcattgagccctaacaggctgacagtggtagacgactgatcatgtgaattcaaagattgattattcattttctatcgtgaacgtatctgtagttgttgggggtcctaatttgtggttatttttgtacaaaatttagattaggtgtgggtgcaatgcctgtgaccatgtgctcataattttgattttcttttttcaaaaataaaaacatagagtttgcagcaattatatgtcggttccttcatatatgaaatccgcatttgctgaatttctcaagaaggagagttagattttgttttttgagggaagagttagataattttaaaaaagattaattagctcctcaccaaaaaaaaggggatcaagtagcagtttggattaccagatgaaacgacattattcatttctgaactacttgaaacaaaagcatttgtacatattttttcgacataatggataaaaatcagatctcatataagcattagcatatacgcacactgaatatcatttagatagccattataacttatcccatgaacttaggatgcaattacaaacagcaacattcttgcatacttacgtatacaaacacacacactatttatacaccgtgcatcttttgtcacagtatatatatcgataactgaagcagtacattgactgttccaatttcacacacataagcagctaattaacacaataattaagtgttgactttgatcactagttggtggaggttgacttggcgagctgccagctgtacaggacggcgccggtgacgtcatagaaggcgaagctggcctccgccatcgtcagctgcatcgacaggaacccttgcccgtcgtagatgaactccagcttgtccgaggtttgcttaaacttccccgcccacgccctcgacccgcccccgctcgtgatgaattcaagtgggctataatttttatttcatcgaattcgataagaaaaagaatttaaacttaacaccaatggtagctagaatggtaaccaatgtaatagtggtatgtgctaaaggacaaattttacatttctcgaatactaaattttgcactacaaaatatatgtgacacctattgatgcctatcaaattttacatgataaaaaaatgatatttgcatacaaaatataatgcccagtacctttcaagatcgtaaaacttttttggtgctaaagttataattacctgtcaatgctggtgatgcgctgcaaacaatgatcatggccgttgatgtacatgtcagccccataggtctgaagttttcgaaagaaaaaaaaaggagtgtttcggtcagggtttggatttaatttgtgtggattttgccagagaatttgaactcagctcatacgtgaacttaaactgatcgatgattcaatgtatagggtgtaccttgaggacagggaggagcatggcgacgaggtcggtggtgttgccgtgctcgcagccgctgctgatggtgtggtgtccaaccacgatcttccacgtcgcattcgactgcgacatcgcgtctcctaaatcctgcatccgtgcaagcaaccgcgattaaataacagctctagttcgtgtacatatgaactatatagcccgccagtaagaatgctttcgtttgtaaaaatcatttttctagtagtgtatagtttctgtttaagcaaaggcctagtttacccaataacttactgtgagtagagtggagaggtaggtgtcacgaggggcgacctgtctccagtcgaacttgctctcgttccaatacttctgcacgaatggcaccgtgtccaccaagaagaactccgcgatatctttaatttcatatattttaaaaaatgagcaattgttacacatatttctttttcttcttcagacgtatcgtcctatggaaagcttttggatgaattggttggtatgatacgacgatgtgtcatatgcaagtacatacctgagtcgacgatgaaggacttgttaatggaggtccaacggctatcgacggcgcgaatggcggggctctgctgtgcgagggcatctccagtgtagtcatggttgccgagaactatacacatgcaattgcgcatataaatatatgtgggtatgagagatgaggaattttacggtacttgagaaaacatttggatttttttaaaaaaaatattttgatacatcgagttacctgatatcaaattttatattagaaaaatatggtacctcctattttttttttttaaggatagtaaaattaactacagaagaccaatctagatcaagacacataaccgatgagatcttgtttatcattgacatctcaatatgtatgtatatggtggacataatattattgttgcaattattattaccaatgtaccaaggcttctggaggctatcagcggtgtagatgttggtgaaggactcctggaagctggccgtgtcgttgtcgccggtgaggccatcgttgtagaaattgtcgccggtggagaggatgaagtcggcagccaactcctccccgatcacgcccatctgcatttacaattcaagtacacacattgtggccagtctttgataggcatgcatgagctggatggcaacttaattgtcatgcatattactaatcaattttgattttgatttggagggaaatgataagctagttattatatccacattagctaattaatttagctataggttcaagttgactggatttttcacattttggtccttttgaaaaacttatttcgcaaatagacccctgaaaaaacatgtcccagaaatagtcctttttggggcgccagagtgggacggcgccagcctctctggcgccgtcctcctgccaccgtggcgcacgcgaaccgacgtggcaggaggaggctagcgccgccccagggaggagggcgccagcatggctggcgccgccgcctccattcctgtttctctgtatggagttgcaacggtgtcatttttattttattttttcggatgttttttcacactcaggatcacgatacaaccaaccacaaaaaaaatttaaactcgaactaccacttagctaagtctgaaaatatctagcataccacttagtctactttgcaccttcactaaaattagaccataactcctttagtaaaaccctttgatcagcatgttaaacataatgcactctaccactatatgaaattacttaatctaattcaaaatataaccacatgaaatgacatatatataagttaaacagt

SEQ ID NO: 18529 - DNA, 6083 bp, Oryza sativa
ctccccctagccacctcagcatcgccccgccacgtgggcagggggacggcgccaaagaggctggcgccgtcctgttgaacgacggcgccagccactctggcgccccaaaaaggactatttttaggataagtttttttaggagtctatttacgaaataagttttttaaaaggaccaaaatgtgaaaaatccagttcaagttgacacatgcagggagctagctagtagtagctctcttggggagacccacccaatcaatttaagtttgtggccaacaataatttgaatattgtccatctcaattaatttgaactcgtttgtttgcttcagaaatagcactatataatagtgacatgccttacctaacaaatactttcggctacttatgtaaatgaagaccccatgcatgataagcttcagggcaccaaacatgcatgcattcacattaataataactaaaatttgttagctagttcattattggtgctcattaataggggcctccaaaggcattgagagaagtctttgaggtcaaccgtagtatggtagagtcgatatcgttcacagactaattaatgttgtacttctccatttgtccataaataattgatgggtgccaagatccaatttaacttgcaaaatttgaccatatatagcctatataatatagttagtttcaaaaagtaatgacttcagatatatcttaaaaagtactttgtaatctcctaaacttattgtattttataaatttattctaatataaattgtgcacacgtccaaaagttgaaaaagaaagttttaccagatgaagtactccatccgttgctctattaggatatcatttatgtaataaaaaacataatcataagtaacttaaatacgaatatcataaatttagttagttttttgtcaaaagaaattatatatcctactagtttgttggtcaaaggtttgtcctaccgaaacaaacaaataaacaatatacactttatattttgaaacggatggagtattaatttgtagacaataatcaccgatgacttcatattttcccacgaaaacaaatatatggaaggttgatgtcagttattgtcacctattctactccacacagttgagccttctcctggccccaatataccatgctgccaaagttgaagctatttcatggctcgtgctctataaacagacctggcagctgggtacgtaaaatattaatttgagatagagacatagagttgcctctagtagatctataatcaaaacaattaatgtctacagtaatagcggtcagcgtacgtagtgttagctctttggcttgtgcaagtgttgtcgatctgtagtggttttattttcttttcctgattatagctttccagggctgttgtcttgtaattttttttaatataaaccactgcactttcaaaaaatataatcaaaacaataactacaacggccagctattacactatatggcagccaacaaaatcagtacgagctacactagtactctatgttcttttgttttttttaaaaaaaaagaatattgtgcttgaatataaagaatattgtctctacatataaaggaataatcataggcaggccgttatacagttattctgcaaaattgccttgcggtcagcttaatcatgcatccacctacaataatatggtttcacgaataaattttctacaataatatcatttcacgaacaaattttctacagattgactgtatatagagaaagccattattaaataaacctacggataagttggttgcttgagaaaatcacttttgtccgcctacaaaaatgtaatatgcatattctaattatgtggtcttaagcaccaaaatataagcacttctaaaatactatttatcttatcaaccattccccatttaatatttttcccatatataaccctaaccactctcccatcccaatcatatctagggccatgcattataatcttttctactcaaccttattctttgttaaaactgtaaaataaacatattttgcaatggagctagggagtatatatgcatgtatatatattagctagccctaattaaaaattactcaaagaaatggggaaaaaaaagagtgcagcggtttgaaagcgtggtcgatccacgatcagttggtctcacatcacaaataagcaatgtacataccggttatacctactagtcctctactacctgtattgtagctctacaagagcaataattgatcgacaacataatacattcgtgagcgatggattgatcgaccgatcaagcattgccgccaccggaaaaaaactatagaggcggcgcctaaatttacttcgttgtcagctacacacacgagctcgtaaattcatttataagttaaataaatagataagtcgggtctcagacatgcaatgtaatgtatatacctgggtggcaaccaacgtctggttgtactgccccttcctcccccagtcgccaacgacgagcaccgccagcgacccgtcctccttcgtcgggtgctccacccgagctagctcccccgccaccggcgacgccaccatcacaccaaccatgacgaccaccgcaaccaccgccgccgccgaccaaccacacctcatcatcattctcctcctcaccaccactacacagctccggcgagatgatcgtgagagatagatgatcgatggagaattggagatggcgatcgacttcgaattttgagagaacgaactcgcgggaaagcctactttatagcgacggtcagctggtgccgatgtgaggctgcaggtgggccccacaccagcgtcggttggattcaaagttgcatatataattatgcctatatccatcgtacggctgtggtacgagccacggatcacccaacggcgcggatggacggatgggatcatcgaagctagcttagctcgtacaggatgagtaattaagagaggaagactgcacgccttgtgtttcgtccgatcgagtacgaagttgttaactctctttgaaacaacgtgcgccattaatttattactgttagtggtttttgtaattgtttcgtaaagccatatatatgtgtgtgtgtgtgtgttgcattaattaatttgtgctggtacatacttgtctacgtgtacatgtgtactatgttttgaattaataataattgattagtttgagaaggctctagatgcattggataaggttaaagttagttgattagggttgcatcaagtgattaattttgggctttcatggccggagagggtacgcttactaggctagggcccagggagaaaatgggccacgctgcgcctaccggcttgattaattattagttagtggttaattaattaatgcatcgtaaaggagcacttaacctctaataaatagttttcgacttttttttatctcactttacacaccacatgagaactgctgaatacggctattactactagtatttaacttgctgggagtatatttttttcttatttactatattcaagtaattaaattcaacgcaatacaggaattcagctgatacatacgattaaggccctgctcttttctgattaaaatttgttagcatgcttttctgctaacggtgtgttttgtatgaaaattttctatatacaagttgttttaaaatatcaaatatatccattcactactggagaagtggtttttagtcccggtttgcaacttcctttactcccgggttgcaaactagaaccctgaatccgggactaaagatgggcatcatctttagtcccggttgaaataaccggactaatacgggactaaaaataaaagtgccacgtggttggcgcttttttttttgctacttgcatatttatttcacaccaaactcaacaacaaaatcatccacaaattgacatcacagattcatccgcaacttcatagagacatctaaaaatcatccacaaatttacatcacaaaatcatctacaaattcaaaaaaacatctaaaaatcacccacaaatttacatcacaaaatcatccccaaaatcatcacaaagtaatcgcctctctgcaaatgcccgccgctcgctcgaggataagggagaaaaagaaaaggataaggaggaaagagagagtggagagaggaggaaagggagaaggaattgtttgcgcgcgaggatgagaggataagggtgagggattatatactcgcgttgaattttaccgggactaaaagatagagagggacaggacgatttctgaatcgggaataaaaattatctttagtccggttggtaacaccaaccgggaccaaagatcataaaagtgaggtgggcttgtcaaccaggacaaaaaatgatttttaatcccgattactattggaaccgggactattgtggttttagaccgacctagcaaagatcagttctccagtggtgattaatttgttatgtttgtgataattaaaacttaattaatcatatactaatgactttctttttttacatgcgccgacttaatctttatcggttttaaacaccacctaagagcaagaagttaaaaattaaaatattgaatatatcgatacagtaacttggctcgatcggtagtcgatgtgtttgcatggtgtggttcagatgacagtaatgtcagaaattttgctatgtcagccatccatctaggcgaggatgccacatcagttatatggaacacccctgtgtaaaaccctcctttttttttattttagataatggaatataatatcccggcctttgctcaagaagagctacagccaattattacaaaatagcactcgagataatagtatagttcaaataaaatagaacacacttaaataggaaaagccaaaataagaagaacacatttattccagcctatctgtgaatctccattcatagttggcataaagttgcataaccattgcaaaaccctcctagaaggggttgacggagcttggggctcctcaccgggagaccgcgcaggcccccctttgccggttcggccgggggcgctaagtgaggttcttcgccctcgatctgtggaatattcgcgagagagcaaatgcacgagacacgggcgatgtagacaggttcgggccgctgagaagcgtaataccctactcctgtgttctggtggatctgtgtgtgaaggagttacagagagctggagagcaagggagttcaggctctaaaacccctcttcctgtttctctcctctacgagctaaggtcttctcagagtcgtccctcctattcttcttctggatctcccaaaaaaaaccccttttttcagtgggcaaggtcctccttttatatctcaaggggataccacatgcaccacttctacctacccttcttttgggtggggactcaccctatcttgaccagaacttggctcgcgccttcgcttgaaagctaaatcacagcttgtccttgagtgaggcccagcgccgtcactcacctgacccaggggatcaccctgtcattccttcattaatgggcggagatttgcaatggccgctgtccgaatgacccctccgatgggatgggtcatacctacctccactttgccggaaacggatgcaacgtgggagcacggtttgtttgccgatgacgtgaccggcgtcagaccagtcacagaccggtcattcttgtccaccacgtgtcagtttagcatgccgcacgtctgtccctcttcatacaatgacttccttgcaatggttgcgatgaagcctggaatgtatctggccgggactggcgtgctaactccaggagttagcacgccggctccggctagggacaagtgcctggaggctctcatcattccgatgggacggggcgaggcgtgtgacaggccgcctgctgccacctaacccacgatctgaccggtctgtgaccggtcacatactgcgaccggttacggaccggataagcgagcgcgctgcgctgcattaaatgcggcgtggcgcgctcgtccaacccgcaataaatgcggttaggtgagcgccgctgtgctcacctaacccacacacgtggcgccaacaccacagggggtcggggcgccccagccatcggggcc

SEQ ID NO: 18530 - DNA, 11548 bp, Oryza sativa
  unsure (1)..(11548): unsure at all n locations
gggggggggggggtggccacgtcaccctcgggcccgacccccccccgagggggtcaggccacgtgggtgagcgcggctgcccaagcctctagtcacgatactcccggtcccatgtcaccgacaggggtagtgtaaattatatggaacactggatgacaaacccactctttgtgcacattttttcttcaccgattcagacacatatataggcaaaccgagatcgcattcgattgttcaactttacattggatttttttgaacaacacgtataggatagtgtaaattggcatacatcatgggatagtgcaagcacactggatgatttgtcaaaagaacaagctgtagggagttgatcggaatacatcatgggatagtgcaattggcatcaggactacctctccaatcatgtgttgatgctgatgtgcacccttgcccgggtggatgggtgtcgtggcacaaatatcttacatgacaactttagcggtcaaacttacaccttgtcaagttgttgtaccggtatcggcatggtaaatggtcaagtttttacattcaataaaactcaccgatttattatattacaaacgcaaattactctaatcaatattgggagttgagatacaaggtacatgagtggtattgtagataagctatgttttcaatcctggacatccttcctcttagcttgccgacgactggcagccactagagacagagaggaaaggaagtcaagcggatgaaagaaaatgacacttttttttctctactcactgacagatagagaagacaaagcacttccttttttttccttcttatagagtacatgttttcttcttagttcttaaggtgtgggtgacttaagctttgagagatggtttaatgctggtccaaagattgggaattaatagggtaatatttcagtcagattgtttgcaggttgtcgataccatgttgaatggaggttatgcggcaacagcctcaacagctatttacgaagaatgtaatctaatatggagaggttttgatagcacatctattgaacattgtaatagagaagcaaacaaagttgctcatgcattagccatggtagcttttagtaggaaagagtcgtgtatttgggtcgatgaacctcctggctatattctaagtactttggcaaacgatgtaactatgttcaatgatcaataaagctagccaaatggcactaaaataaaaggtgtgggtgacttattatttttctcactggccagatgttctcaaaaatgtctcggttaacgatgtgcggtgcaaagtgagcggtttggaaaaatgaggaatcaatagtatcttaattgaaagtttaagtagaaacaattttaaacttcaacaaaaaaaattaaggatttgcaataagtttcacctgaaaaaagttaaggattttcaataagctatatgtttggaatcatcatatctctcaaacatttatttttcataatagaattcaatccagaccactctgcatcaaagatacatcaatccagccacatattattgatcggcatagcagagaaatagtataatataacaaaccctcatcacaaaacaaccagtacatgtgcagctattggtgatttaatataaaggaatttaaattaaaatttacacgcagttgctcccccaacgtacaccaaaataattaactcttgtcatcagctagctttttttagataatgaaatataatcccagcctttgctgtcataagctagctagctaaccatcatgcaccaatatataatctcgatcgatcacctgacgagcgagtagatggagagcattatgatgagcgccatggcggcggcggcgagcagcatgagcccggcggcggcgtaggccatgttgaagaacctgaccacttcccccggcagcttcgagccaccaaatgcgctcttcgcgtcgtaggtgaggccaaacccggcccccgcccccgtcgccaccagcaacgcgaatatctggcacatagtgaaaattccactagctattgatcaagctcctcagagggtggagcggagctaaggagttgtcgctccaccctcgtatagtgtaatttttcaagatctcgaaagtgtttgatatagttgtaagtgtcaggttttgatcggaccgtcatattgatgtgttattctgtagcggtgagccgtaccaaacgggtatgctgttctagttggtcttgaaattcgaaatgtaattagagctagatgaatgagttaccacatcggcgaagatgaggaacaatgccacattctcgctgcctcctatcatcctcttcctcttggcgatgctgacggcgacgaacgggatctgtagcagggtgtaggcacacccaatgacagcgattgcgaggacatacctatacgatagaacacaaattaattgaaaagttcttttattttgccttttttaccaatacatagaatcgtggcagttctagcatcaccgaaatatatagctagttagaccctttgaaaaagaaaaaaaaaaagctagttgccccacttgtcatgcataattgcgtatgtaggtcacgctcctttctaatgaagggataaatagattaagcatgcttattgaattgaattcctaaacagtacgacttttacaagtactctatatatgaatctcttatgatattgtttcatatttattttcgaaccttataattttgtgtgtaccatcaaataagtatctcaaattattcagctattcaaatcattccgccatttaatggggattttatcagattttcagtgttactccactatagtgatgctgctgcttgtgatggcaggcagcgccagccagctcgatgtctcatatatatgaatatgattcctatcactaggtgctgacctgtaggcgtagacgtccttgaaggtgatcttcttcggcgggaggccaccgccgaagtcgagggtgagcttgtcggcggcgatgacggcgagcgacgccgcgaggagtgccagcgtcaggaggcggagggccagcacggcggacggcagagctgtcctggaagacgacgccattgctgctgctgttgcctcctctgcccgaggaaccggtttttacatgcgtgaccacttattttccgcctgcaatttaacggcggctttaatatggaatgaaaaacggttttcctaatagtggttatctggctagccagctatagaaattggttgttgttcatcgttgagatcgctaagaggttttatatacaagcagctagagcatcggtatctcgcatcggcctgcagggaatttggtggtggctccatccaattgttcattgttcagaacttcagatcgatcgccggccggccgatcgttgttggagctggaacatggcgacgacacattttggctgtagtcttgagatggttggttgttaattatgttgacagttttgatttggtctcgtctgtcttgtccgatatggcgatctattcaaatcgacaagacgtagagcagctgtaccaaaggaccagaggagcaactcgatcgatcgatactttcgatagtgctaagggcatttgtagtgttggttaggtaagtccggttcacagaagtcgaataaacatttgattcgacccctacagcgttaaaatcgattttgggtgggacccatgaaaaaaatcttaatccccaatttcccttccccctcacaacctgtagcaacaagtaattttttatcatcaatgttcgacttctattttgaagtcgctttttcatctgacacatacggttcgcttcccacagtgtgcatagttcggttttttcacgttgaaatcgattttaggtgcgcactggagctgctctaaggggaacaggatctctgacttaagagcaacctacgtcagagcctcagagggacgtccgatgctgcagctacaccgcttgatcggcatcgaacggaggtgaacaagcacccatcccggcagcaaggccctccttacgatcaccatgccgttcaacttgcaggggctcagctcatcgcaaatgccattcactagcaagaagagtgaagattcagcagcgctccatctgagcgtgagctcgaggaggcagctagccatggcccatggctcggccagaagcgctggccccagcgacaggaggtcggcgtaggcgaaccagacactcaacgcggacggcgccgccgcaggatatgctgcgctgcgggcctgcggcaccgtcggcgaagaactcggcggcatatgatgagggaagcggccgggagcgagcctttccgttttcgtgggttgattttgtcagcgtggccgaaaagaagccagatggtctgtcgtgcttgtttacctccgtccgatgccgttacgccgctcgatcggcaacggatggaagtgaacaagcacggtaaattaattggcttcttttgtgctaaggatatgcatggatgatcctaatgcaaaactatccatcgcagcttaatttcatcgcgccggcgttctgtttgtttccttcaaggtattttgggttcgaagtaagtcaaaaattttcaacttcgatcaagcttaagtaattaaggttatagaaaaatttattaatatctaaatcataaaatttactattgagtatactatgtttttatgttatatttgtttttattgaaaatgctattacacttcctataaaactttgtcaatcttttaagaagtctgatcactggtggagaaaccatttttactcccgattgggaaccgctttagttccggttttatcactgatggatggttttccaaccgggagtaaggatccgggactaaagaaacaatagtggtagtaccagatggccccattttcttttttccctttttattttctcccgaatcaagtaggcaaatccccacatcaaagtaacaatgtaacatcccaaattcacatcacaaatcataaagttacttatacacacaaatcaaatacatcacaaaatcgtaaaaattacacacaaatcaaatacatcacagatccaaacaatgaatcatatatttgtatatctcagtgaatcacaaattaaagaaaaaaagaaaaaacaatgccgctgccgcgcttgccacgaccgctgggatgggaaggggaggaggggggatgaggaaggggaggaggtggaggagaggggatgaggaagagaggatagatctaagcaaacggggagatattcgatctgtctaagttgtaactgtgtaggagaggataagtaatagggattatatactacgcgttcaatttgatctttagtctcggttattgacaccaaccggcactaaagattctcggccctctgacatacatctgacaggggatggttaccaaccgggactaaagatcaaaatttttataaccgggactaaaaacaatctttagtctcggttctttttggaatcgggactatcgtggattttgccagaccgaccaaaaatggtttcttcactagtaaattttggacaaatctaaatgacttataatataaggagcagagggaatatgtttttatctttcatccctacgctgtgcaagtacaagatctatctgtcctttgtttgatattgatggcacgaattataccgtgtcaaataaacgtgtcaaataaaagatactactactaaactatgcactgtgacaaaataaacaataagaagattgctaattttcaggtgctgctccctggctatcggactgagccgtcttctacttgtacaccagacatgagaggaaagaagcatctcaaagagaactcgcttgtctaacatcggtccgaagatgatgacagtggcccagattcaggtatccaagggtagctatggtgacgatgggggtaagagagggttgggtggaggaatggctagggttgcagtgggcgacgaagcggcagtagcgtatgcttctagcatgggaaaaaagggtgagttgctagcatcagtggcaggagagccttgttggagtgttatgaggtgggagaccatagtggcgtgtcgtctagcgacacaaatcgtccgattagacctgcaagacgacagagcagatacaactcaccaccgctatgtttggggaggaggggaagggatgtaagaaggggaggggcggaggccggtctagcagaactcggtggcactagtgaggccgagaggcggctcgatgaggtgagagaggggaaggagtggtgatggagctaatcgatctcgacctagccatttcaatcagaccaaggggagggagaacataaggttgctatacaaatcttggcacaatctggaccatccaatagtgactgaaatttgtgtgtatttttaggtgactgtagtcccataaagatgatcaattgtttgtttttttaaaaaaaatgtcacttctggaaagggcaagattgctccatgaagaatatacccctctcatcctagtcttgatcaatctcaatcaatcaccatttaccaagtataccaccatctcctgttgttgttgctaagcacctgtcgaatgagccctccacttcatcggagccgtcaagccccgttggctgacccatctcatatcttcatcttccttctccttctctaccaccaccaacaccgttgttgtctcctctatttctcaagtcaagaaatcttccctgtcctaccttttcttctcactgtatggcttatgactcctaatgacttcaagcatcactgttgtccgaggccgcaccacaactgcctcaccgtttcaccatagctgccgtccattgtcgggcttttgtcccagacatttctcttaaaccatcccctcctctaactggcgacctattctatcaaggttgctggagattggaccaccattaacatctcttcgctgccattagagaaaatacacgaatgagtcttaccgtccatagtcctatttcacctgcctcatcacttatttgaatcagttacgtgaatattatttttgacaattacgtggaactggaagacatacactctctgtcccataaaaaactcaaccctagaagtgaatatgaacatatattatctggagatagtgtatgtccattcaggatttgattatttttagacataggagcatatcatattatcatcagtgatcatttcatctacacacatattccggtttaacaaattgttctttttattcctttttaagataacgggttgcaaatccccaatttttcacaaattcctaatttcaatcgtcttctcgatagaattttttttctcgaacatagcactactctgctactgctcgactgttcctccatcctctctctaaaccccaaacccctacccctcgctgcaatgctccgccgccgccgcggcccgctcctcctcgccgccgccgccgccgccgcggcgggcgccgtgacggctgcgctcccctccggagaaggccgcggcgcagccccctccgtgctccacgccgtcgcccgctcctcccgcgccgtctacacggttcgcccccaaatttgagagacgctaacctctatctctgtgtgtgtgtgtgtgggtgggtgggtgggtaattcggatgcttctcgtgctcattgctgcggatttggttgttccagattggcttcgtggtagtggactacaagtactcgctccgtgggctggctcatgggtcggcggattaccgggataagctctccgaggtttgtatggttgcgctggcggtttgcggattgcacgcgtaagctggttaatggcgatggaaaactgtaatttgtttttttgtttctctctcatggattattaggtaggtaggaatgaagtcattgatttcttcaatgtggaaaatgaacttgtaggattgtgggaagaaggatttattttgatacatgtgaccatgtgacctattgctcctggcctcctaacactgtttcagttggcaaaggaagaacggatatgaggaactttggggataggagaagctgtctcacaatttcttttttttttcctgtacggcatcaaaccaaccgttgttaacagccttatctattctaattatgaattcaacatcgtggtttggtaccaaacagcgtcattgatagctattgcttcttttagaactcaacacttttagttggacagcttccttgacataattttagtttttcgtttcatttgatattttactttagaaggccatcaatcagatatctcaacttttcccatgtcttcgtattttgatggaaacaaagttgcacaatgtgggtgctctgatgctcatttgaatagattatgtttccaggagttccatcagagttagcataacttgattaaacatgcggcatttcgaatgcagttacaaatagcaagagctccagatggttatagatctgtaaatccttaatgtttacttgtatattgtaggttcatttgcgttcagcaaaaaagatactcaaactatgtgaagcgaacagagggttttatgtaaaggctggtcaatttgtttcgtcaataagacaagtaccaaaagaatactcatcaacactctcttgtctgcaagatcaggtttactagttaatttctatcttaatgttagtgtacactgtatagcctcattagtttttttttatttaacatttttgtaataattcaggcaactccatgcaactttcaagatatcaaaatagtgatagagcagaaacttggcaaggatttacatagcatgtaagtattaaaggttcatgattttttaaacttgattgtgttatctgtagtatgcagagctgtggttataggcaggttcggaggatagcgtggacttaacagggttgtggtcccccagaaaattttcctttagctactatgcagcagcaattggcacacaagcccatgtgtggtagctagtagtatgcagcatagcagnnnnnnnnnnnnnnnnnnnnnnnnnnnnnnnnnnnnnnnnnnnnnnnnnnnctcaacagttaggcttagttcgtgaattttgatggacttgccatattagttgctcactgctgcttatctttgtttcttgtgtggggactgatgagagagctacacaccgtggaaagaagtaacaggatctgtgagagcaatgtccattaagcatgtggcagttaggcctgatattagtgtgtaatagattcgtagtgtatttttagtactaaatttggtattttaatagtgtgttaatgaataccattaactttttggtcccccattggtagttcactcaaactccatcactggttataggaagtgaggttttctccattttgtttcttttaaaaaaaaaaaggtgtcatatgtctttatgttgtcattttatggtctcttaaaagattatctaagttcaacatcaaatcttccttaggtatagctaaaaaagggtatcataaacttgttctctactgtatgcagagtgctgaaaagtagagtttgcatgcttttcattgcataaaattatcatataacctgtgatgtacctgatggttactctggtgtggatcattgtcgtcagagtagattgtgcatgagtttactttttagctggttcagtctagacatgccatgggctcttcggtttacttttttaccctttgtcagcctgtgacgtgtgtccttgatagcttgtgtaccttcgcaattggctgctaggatgcttagctaaggttggttgacattagtgctagtgtcatctccttgccatttgcattaagcaatggctatatgaatgcactgactttataacactgttggaccaatttgttcacgtttagctagtagtggtgggttgagtttcccatggttagctctagctgcattcgaactttcatggaccacctgtatcaactaagattaaacttttaggctgagtgggggtgaatgcatgtgttcttgcaagcaggacttacccagggctgtatatttaaaagttgatagctcttgtcagctgtacaaatagctcataattttattgaaattttttgttgattagttgcatagtttccaaattcaggcaataagtgtttaagatttaatacttgagtatcagattcctggaatttgatgaacatccgattgctgctgcatcaattgctcaggttcatcgaggtcggttgaataataatcaggaagtagctgtgaaggttggttgctgtgaacatgtatctcttacctgtcccattattgttctcaaagatattttagtgattgtttgatcctatactgttatgtcttcaccattcaaatgaagcagggtgtaatgtcctgtgctctgcaatacatttatgtaaaccattgaaaatatgtccagcttgatatcatcacactgcatgctcacagtttcaagacagaagtcagagagattgcatttatgtgaaatccaccatccagagttataacttgcacagggacctaacaaatttatatccaccatcccagttctaccttatagctttgcacatctatcaaatttatggatgcttgtcaacagaacttttaatttaaggatggacaactgccaatttcaaactttagtaatttatccaactctttacacaaattacaagttggagtattcttctaaatttcacagccaatgagaaagttggattacctgaaaaattttttgattattaacttaggctacaacaatttctaactttagcttagccatatgaaatgtttatacactaattttacatggaagcagctaagccatccaatatccattgatgtgaacatgaatttttcatctcaattcttttgactcagagcatagcataaactgatctcttgcacctttttttttaaaaaaaaatatagcgatatggttttatcataattttgctagcagaattgtggaaatggacagaagcgaatatttcccctctctttactggagatatccttttatattcaattttgaaatgccatttcatcatttccctataatgtcttgcaaacattgtctttcttggtgtgcatgtatattaatctagaggatttccatcttaactgtgtcatataggttcaatatcctgggcttgagcggcgcatgaagatagacataatgactatgtctttcttgtcaaaatctgtctcttgggtatgttacatgtatcaattttgcgatttccattgatttgcaaattgaatattttgtgcatgcagctcatttacatgaaaacaattttttacccatgcaatttattactatcgtctatacaatattctgaaagaagagcaggtaatgagcacagttcaattatattgtcaactgtcagcttttttaacatcaagattgttactaaaattctaaaaataaaccattcttggagcactagtgtctctggcaaaatccttgtaaaaaagaaagtgagtatgcaatcctaagcaagcaattgttttttttgttgattagcttgactctaactgttttaagtggcagttttcataagcgtacaacgtaaaattttcattgattgtaaagcttgacatgtgccatgatatgtttaaggagtgttatcagtgttttagt

SEQ ID NO: 18531 - DNA, 1048 bp, Oryza sativa
atctatctatctatctatctatctatctagctagctagctattttctatgtatgctaattggacactctgagaaagtttctactttaactgtaaaaatagtggataaatctagccatccctaattataatggcttaaattacaagaagatccccatataattttatcaatcaataatatcaatcaatattggatttattaaaccgagaaatgaaaagtcatataaaagagtattagagtgaatcctgcatataatttaattttaaggactaaatttaaagtttaaaaaatgcttatcaaataattttttttgaagtacttaaaaacattaattatattttccccttaattattcaatcaagaaagctaaaattaagattctatggcaagtatgactttgtatttatttactcttaatctttggagctattaaattaataaatgaagagtagcagaaaatagtgttttcatgaatcatatgtataatttttagtgctaaatctaaaatttaaaaatacttataatttttttattttgttctgaagtacttaaaaccaatgtttacacatatatatagtactatgtactactagcctacacaatggaagatttatataagcaatacttgtcaactttctttcgaaaaggacattatattttaagaacaatttaactaaccaagtgtacactttgtgtcaagttcttcaccctgcaagtattattcacatctatgagcatattcccttctgtaagcgtagggagctcttccaaatgggcaaaccatagcagtcaagaggctgtcgcgttgctcacagcaggggataggagagttgaaaatgagctagttttggttgggaagcttcaacacaaaaaccttgtgagactagtgggtgtttgccttgaggacgaggagaagctacttgtgtatgaatacttgcccaataggagcttggacactattctttttggtatattatttgtcttttttttaatactattaagtttttttttaacattatactccctccgttttttaatagatgacgccg

SEQ ID NO: 18532 - DNA, 9835 bp, Oryza sativa
cggcgtcatttattaaaaaacggaggtagtactattaagttcggtatatattcatcactcacaatgacgcgaaatctcctttatatttattggtggcagatcaagataaaagcaaggaattggactgggagaagagattcaggatcataagtgaaattgctcgagggctacagtacctgcacgaagaatctcggttgaaaatcattcaccgggatctcaaagctaacaacattctactagattccgatttaacccctaagatttcagactttggcttggcgaagttatttggaggggaccagtcgcacattgtcacaaatcgtgtagctgggacatagtaagtgccttctcaaattcaatccattcattctgttttatcttactttctttctttgccaatcatgtctctgtcactgaactcgaggcaagataggtcagaccaattttattaaaccttgaaacgatgtactccctcggtctcataaaaaaccaatttagtgttggatatgacacatcctagcactacgagtctaaatcagattcgtagtactaaggtgctagattttttttggacgaaaggagtactctggtgacgggatgttccattacaagaggcaaaccggaatagcctccgattcctccgaagtggaacaatcttggtcagctcatctctactattgtaaaaattgaagatgtttttgtcggtattttggtatgtcatccgtgtatgagtcggtttttaaattcgtttgcttttggaaatacatatttgtatttgagtcggtttataagatcgttcacttttggtaatacaaaaggtatcatataagaaatctgtttaaaaaaactcgcatgctaacttgagacgatcaattgaactcctaactacagctcatgattttctatatatatataaaaatatatatatatatatatacacacaagcgaactcctagagtggatttcatcttaactaaaccatataacaataataaaattaaaatagacttcacccgttgcaacgcacgtgtatttttttctagtatatacatgtattcatgccggagtatcgatggaccacatgaactctttaagtattttatttacttttaagataagagaactcttcttggtgacatggcaaatggctgatgtcgcttgcccaaattaaggattgtttcatggatttatgaaaaggtcaatttagaaactgaatatataagacaatcatcttgcttttcattcaaaaaaaaatttagaaactgaaatccacgtgcgcttgtctctcgtccccgcccccatgcaggatgcacggattaagcatcaaaatatgcaaaaattatttatgtactagtgaaagtgagaaaaaagtcatactaaaagggaattgcagtaaaaaaaattgctcaggcatctatgtaggacgaacgaattaaccatcaaaatatgaaaaaaaaattatgtactagtgaaagtaagaataaaaaataaaaaaagctatatgcagaaattgtttatgtacctgtgaaaatgagaaaaaaaagtaacaaaaaagctcaggcgtccatgtagggcgcacatatataacatagtccgaatttatgattgctttacgtgtacggtcgagtacacggctaaatctccagctcacgatctctgcttcagatgtcgcgacctagaaacataaggtgcctccgaagaggcaacacgttgtgagatggaaactcttttatataggtcacaaaacatcaaatctatcgaggtgggacaaaacttgtggctaatacggtaattaactacctgcgcagccaaagagcgcgcgccgccgctgcgtttcttcctccgccgtccgctgctccaaatgatttggattggatgcgttcatagctagcatcgatctctaatcttaattccacatgttaatctccattgctaattacttattagcattacattacttttggataataatgtaaaccattagtactaattaagaaacttaattattacaactcgcggatattaataacctggtgaagagaagaactcgaattattaggacacctagcttaactgctacatcatcttgttcttgtagtggccatctggttgttcacgcgctgcgtgcgcgggcgaggccggcgcgtcgacctgaacgcgcgcgtgcgcgacgtcgccggcggcgccggcgccgtgctcctcctcctcggccctctccaccttctccttggtcatggcgccgacgtcgaaggctgccctggcgacggcgcccacggcggcggacacccacgcggcgccgcgggacgcataggggctcgaagccaccacgctcgccgcgccctgctccgccgcggtgaccgcgacgcgggcgagctccgacacctggaaccgctcgtccacgccgcgcacggcgccgcgcgccgccgccgtcccggcgctgaacttgtcgctgagcccgaaccggcggtccagcgacgccacccgcgcgctcgccgtcgacagcagctggtgccggtcgtcgaacgaccgcgcccgcttcagcgcgtccttgctcagcacgaagcccttggccagcatcgtgctcaccacctcctccgccttcttcaccgccgcctccgtcggcgtcctcggcgagcccgtgtccttgtacacacacaatccaaccccatgaattagcaataaccacatagttatttagaactcgcaatggagcttccaaaatatttctttccatagtcaatgtctcagttttattaactcgggacagcaaaaattttgaaaaatactatcgcggagatacatgagttgcaaaataccgtctctgagaatggcatgtgggacttggacccacgtgttaatgacatgtacgacggtattttccatctccgtgatttttacgatggtaccaagcaaactctgatttttgacaaactccgtgttctttttataatggtaataggcaaattggcagcattaattaattgcaatagaagaacatgagctctctcaaagtctcacctgtctgtagaagtaggcttctggaggtagcacatagtcttccactggtgtaatgttcactgaagcttcagatatgcttgctccctgaataataataataataataataataaaacaaagatcatcaaagcatttcaagattgcacatttgaaaacatttcacaagatttcaggtaaaatagaaggtcatgaagaataaatggaagaagccaatatggatgcattcagataactcacagagagtagcagcgcagtgtctgctccatggaactccttgaaggtcacataggcaacttgtgatgtctctgattcccttcaaattagtaatttgaacagaaatcaatataacatgttgattcatgaataattcggcattatggagagagcgtaccgaccttcgcatttccacgtattcgacctcaccggagaaggagaagaactccttgatgttgtcagcagtcgccgacatggagatgtttgtgaccttgattgttcttgcctgaataaaataaaaaacagaaagaaaaacatcaacacatctgtgaccctcattgttaagtaaatcaaaagcattcattcgaatcaggatgtggatatatattatatatgttgggggcaagaattaatgtgtcatgtgcgtcaaagagagatcccaactgaatcaaacgtgtggcaagatcgacagacagtgagactgaacacacatcaaagaactcaagatggtgtgatgatctgaagaaggcagagaggggggggggtgtcagttcagtgtcactcacatctgagacatcaatggtccaattgggggaggtgctgatgagttgatgaggaggagatggtggtggtgatggtgatgaagtgctgaattggggaggagtcacccctatcctcagatagcccgggtccagccggacctgcagcaggagagacatgcaaatgtatgatcaaaattgatcagggcttaatttgtttttgttttgcaaaactggaagagttttgtaaatcaataggcagaattctagatttgtacagatccatttgacatgacatctgatctagcgtttggatccacaaggaagacagacaaatcgcaatggaatctgaacaaaacaaggaagaatggcaaaaggggagctgtgtgcattctttcctacgatccttcctatatccaagaaccgaataatcaacaatgcagtagtgacagggtttgtttggtttgtgatgatgatcactcaccgccatgaacgactcctgcatccactgatccaagctacctaatgggcgtagagcttgtttgttcactcgaaaaaacctctcactctggatcggcgtcgaatcgttgatcgatcatcaatgttattactctgctcactatctcagagagagagagagagagagagagagagatcggacagagaggggcgggcaaaatggtaaatagacacggcatccggcacggatggagcagcggcaagttcgggtttcagtcgtggtgggtgcaggtgcaagtgcatagagcagcaaaaactgcgagaatcctcttgctcggtagcccgatttgaagaaaaaaatcgggctccttgctactactgcatgcatacaagataagtggagtagctagtttatttttttttgttctcatcactttaaatattttttctcctaaattacttattcgacttacgatccgatcgtaccattgaatacgttgtaattaaatccttacaataagatatctcataattatattttgataaaagaaaaatatatgttttataccgttaaaacttattgttttatatgtgatagcgatatgtttcaaagtgtaacgtttcacaaaatttatttaactatctgcacctactctctctcctctatatccatgcatggatttaaaaaccttcaaaatgattttttttctaaactacttatttaatttacgatccaataataccattgtgttcgttgtaattaaatcttcactacaagatatcgcatgattatgttctgatgaaaatttggttgccattttaatatttttttacataaaatatgaaaatatatgtgctattatgtgaggaaaaagtataaccgtgctagccgtgcaatatgcgcgggccaccatgctactttcatatatatataagagagaaataaaacttgtgctgcctgccttaggcacagtttgattctggttataagcttacctactctctcgtttttcataagcgcatgtttcctaaattgctaaatgatattgtttttcaaaaacttctttatataagactataaggggtttctttaaaatttaataaatccattttttaaatctataataattccaagtatgtttagcccaccaataagctcaagtgaaccacagcccgattaacccatcaaaattttcatcgctagataggccaacttcagggccggtcctatgattttgatgggcactaaaagttatatataaaattttatgatatatatagacgctaattttacttgtaaaacgaaaacaaatacatctatatattaaatttaacatatctggtaattatcgagaaataaaatcaaccaaaataacaatatatttataccttggaactaataccattacattgatgaagaaaagaaccccgtcatatccattgtttctaatgaaaagatacttcttcaagtatttcttaatgcaaaatcatcgataacggtattaagatcaatagtatccaagatcgggcgacgaggcgatgatgctccaactcctctcgtttcagcgtttctgctttcagataggccatagacaggtactagactattagtattaggtattggctccccactatcatgggcccccaccatcatgggcccccgacggtcgcctcggctgcatagggctagggccggccctggccaacttaaaaaaaaacgacccaactaagagcaagtataatgagctataagcttactataatcttatgtggaggggagaggtaacaaaaaaaaaattaaggggttggctctcatagaagaactagcttaacacaatccccaaaacaaatgtattaaatatataagtgagagagagatgagaaggaagttgtagtcaaccttataactaatctattatatatgttggctttaagaaaagctaatagtagaaagtgaactatactattatccttgctctaagtacagctcatctaggacactaatagagatccaatctacgcggcacgaatcacaaagctccccctcttccattcattgctcgccctaggggtgacaaaatccgagttggggaccagtccccgtcgggtcatattttcaacccaccggtctatcaggataaatctcacgttattatatttcgatggataaatcttcgcgctctatgttgaggaggaattgcgtagaaggcggggagcctagtgtacgctcggaaagatatactctctccatatactttggatagttatattttatcttagcacacagactaaggataagtaattctacttatcatctatttaaacatgctactagtcattcctcgtaaacaagcgattcattaatatttacatttttcgatgcccatgtaaccaatcttgtgtgaaagaatagagagtcacacattaaattcgagaaagtcattaagatgataggttgttggattgaaatataactattaaaaataaatttttcggatttgaaaatatacctatcaaaagtagatggagggagtatttacttgggggaggccgggagggggtatttactttcgccgtgtttagttccaaaataattcttcaaactttcaacttttccgtaacatcaaaactttcatacacacaaacttccaacttttccgtcacatcgttccaatttcaaccaaacttccaattttggtgtgatctaaacaaagcctttgttaggttcattaactatcatgtggtcacaggatcccatactctagctgccctcatatctgtttatgttagcatatgaatttttgtaaatgaataaaaaattttaagccgttataatttaacttcttataagcctacgaaagttttattacaactagctaaatgcatgtgttgtaacgggagttaaataaaagaacctcacattacattttaaagcctcaaaaattaaataaaattactcatgtcatattatttgttagggaaaattgcaaaaaccaccccaaatgtcactctgagtttgagatgcctcaccataagaagatttgttacaaatccccacctcctaattcaccttggtttgatttaggcaccttctctccacacgtgcgtgattcctgaagaatcttgtggcgaaatcagccgagtcccactcggcaggagcaagagattatgttgtttgttctgtataatacgatcatttcgttgtgttatcatggccatttcactgtgtttttcatggtaaactaactatatattccaaactgatatcatatgtactgaactacatatccgtttttttcggacgtaatgagtatatagaaacatttgaacaggaagcagtaatcatatagccagattatagctgcatggcttcatctgttgcaattagtcatatgacccaaaatagcaggttttagtacagtttaatcagcaattaaggccacacaatctaatgcaaaagggacctgttgacaaatcatcacgatgagcaggacttggctaatttcgccacgagatgctccagtaatcacgcatgtgtaaagagaaggcgcctaaatcaaaccaaggtgaattagaaggtggggatttgcaacaaatcttcttataggggggcatctcaaacttagagtgatatttggggtggtttttgcaattttccctatttgttattatttttacatcacttcaaatatttttctcgactttaggttagggaaggaacaaaattccacattgagggatctacgtgacaatggtggtggactggtgggtaatgccgtggtggtgcattagggtgtggagtatagaaaatggggggtatttaactttttgccacttttaagatgtggcaattaatcatttgtcgctcgctgtctataacatgtgggctcaaatgtgtatctaatggtaaatcttttatcacctctcgtaattaattattcaagaaaatggtagccatcgaatctgccctgcacgaatctcaatgctcccctccctcctgttcggcacagaccccgctcgacgcccgtcccctctccctctcccctttcgcgcgccccgccccgccccgccggtgcagcagcttgcttccagaagcttccagaaatggaaacccggccaccgcccaccggcgtacgaccccttccgctgcgtgggccccccttctcccgtgggccccacatcccgaactcaaaagagaaaagcagaaaccgcctcttgttgcctccctccctccctcgccgagtcgccgccggcgctccccttcccctcccctccccggaattacttgctccccacgcaatcccccacctcccacctccacctcattccccaatccaatccgcctcggcatttcgccgacacctcgcgcgcgcgcgctcctctcctctcctctcctcccctcccgctctgctgcttcggcgtcgtgacgcgctgccatggagcggccgagcaaccgggactggtcggactgcgacccgacgttctccgcggaggccaacgcggcgatccgcgcgctgcgggacacgggcgcgggcgcggacgcgcgcgcgcgccggctcgcggcgaggctcgtcgagaggtaccccggctcgccgctcgcccacaccatcctcgcggaggggcaccgcgtgcgggggcgcctggagggggcgaggtcgagcctcgagcgcgcggcggcgctcgcgccggggtgcccgcgcaccgccttcatgctcgccgccgtgctcacgcggatgggcctgttcgacgaggcgatggaggtgtgcgaccgcagcctcctcgtgccgcagcccaccgacccggcgcgccacctcccctaccggaggaaacgcatcgtccccaaggacgcggagcataggatcgcttatacccgacaagggatccgtcggctgcgtctcggggccgagaagtgcaggcgaaccgcggttccacttccaccggagtccgcgttgcccgcgccggactggccgccggaaagcgccgaggccaacctccaggtggctcgcgatctctggcgcggcatgagcgaggaggagcagcaagccttcctgaaggtgagctttcaagatatgaagtcgtactgccgctcaggaggggagctagagatgataagtttgctctcggatgccgagcacgaccagttcgtcaagttatctgcgtcgtcttcgtgttggacttgccctttgtgcgggttcaaaattatccttgatgaagagcgcttcatggtgcacatggagaactttcacattgagcatgaggagtacaaaaaattgcggtcatcattacctaaaagaatccctgacaatgagatggagcttctcaaatcatggagatgggaaccgatgccaatcgatggagatgatttggcagagaggacagagatcttgagcaagcttaagaaacttgtttctcagctcattgatatggaggccgtctctctgtgccttctgtatatcatgcacaagttcataatgaggcgggtcaggccggtgacaccattggtagtatccatgtgcgcgtgctgtgggatcagacagttgagttctgcgcacctcaaggaactgtatgaatttctccagaagcttacacctatccttgcagattat

SEQ ID NO: 18533 - DNA, 1131 bp, Oryza sativa
caccactctgtgataactatttattgctggaatggaaattttcctatgttttggaggcaaaatcaaattggtggaacaatcctgactgaaatacaggcaaattaccaaatcattggatcagtatttctccttatgtgttgagaagtagtttaattgtattatgtcaaggtccttgaggttaactcctgcatgctaagatatgacacatcgactctgctagtctgcatcctaccttcaatggatgaaaaaaaatgcaatgatatctcaattattgtccagttgcatcaatgtattgcgtaaagcatcagtatttgattccgctagtaaaattgtgagtcctcttcattagtaatgattttcaagccatgggacagaaatcctttttgtcttcttttggtagacataactggttattcccttctgtttgttaatccagaacattatattcttgaacaatctgtgtttgttagctccgtaatcttatattcttatgtcctttattttcttgagtctgacttctgctcctttttcctatgctaacttatgaagacttctgtcctatgctaacttatgacttgtctgggtgcagagtgtagcttatgatcgatctagtgctccgaaggatttccaggtcagtggatggtatgaaggaccagaggatgattcagacaaggaatcacgtgtggtgacaaatctaggagagttttcttatgaccttgagaagaacaatgcacagaccttccaactggagagaaccgcagattcacgagtcatcaacatggttcggcttgacttctgctcaaaccatggaaattcagaactgacatgcatctatcgcttcagggtgcatggtagagaacctggctctccttaagctgctgcagtgaaagcctgatctgagagctgcatgcctgagtttgacaacatcctcaggcttcaatatacccagtaagacaatgattctagtccactggattgactgttagaagatagaagtgtggtgcggctccatctgactcaggttgattttactctgtatcataatgccatgaaaatatgctgactcgcagttctgctagctagatgtcacactgtttgtatctgctcactctgatagtctgattgctcttt

SEQ ID NO: 18534 - DNA, 1045 bp, Oryza sativa
agtaacatataaatattagctggttctctctatgatcttcccacggtattaaacaaatacgatacccttggaatactctcgggtgaaatgatataatggtatatccgtatgcttgagaatggaatctgtaaccatatgtttctgcgctattgctgagaattatattctagtaatatcgttaagaaataccaacaatggccttaatttttctcagggttggcttcgattcctcgtccggagactagaaaaccgagtagctttcctgagggtactccaaatgtgcaattctccggctttagcttcagctgatgtcgtcggagattgttgaacatttcctctaggtcatccatcagtgtgtctcccgtctttgtcttgacgacaacatcgtcgatgtatgcctcaacgttttgtccgatctgatcaccaagagctccctggatctcgcgctaatatgtattgcccgcgctgatcaatctgaacgacatcttggaatagcagaatacaccggagggcgtgattaatgttgtcttttctcgtcctctttagccatactgatctggtggtagccggagtaagcatcgaggaaactcaacaactcgcaaccgtctgttgagtccaccagttggtctattcaggctagaggaaagtgatccttagggaacaccttgttgagatcggtgaagtccacacacattctccacttttccattggctttgcacaccatgactgggttagcgagccactctggatggagaacttctttgatgaagccagctttgagaagtttgtcgagctcttctcgtatggcctgtttccgatcgggtgcgaatctccgcagtttttgcttaattggcttggcatcgggtcgcaccatgagtttgtgctcaatcacctccctggggactcccggtatgtctgaccgttgccaagcgaacacgtctgcattgtcttagaggaatgtgatgagcttgattcctatttgctgcctagcattgccccgatcttgacggtcttgtcaaggtagaagctggttagagggacgat

SEQ ID NO: 18535 - DNA, 1629 bp, Oryza sativa
ttgttccaccaatttgattttgcctccaaaacataggaaaatttccattccagcaataaatagttatcacagagtggtgatctttttggttttaaacattttacagaaataattgtgttcctttgacaagttgtggcataactctaagatcacccagcaaaagatattacatatttgggttctgcttcagtgccatatataagatatactatcttagcaggggtatgttacaaataacctgttttgaggtggtatttctacaaatgtaatgttatttgatgcacaaattaaaaaaaaaattctggaagttttcaattgatgcaccagcattataagcagaatgagagtagagagcgcacaaaataagatgaattatgcaatgcaaggtaggacagagtgatgttaaattgaattaagacaatatgacgcaataaccttaccttgtccacatgctctagacttactgcttcaggaattattcctgtcctcagcttgatctccacataaccactacttccttgtagtgcaaagcactctccaggctggccaaaacttggctccagcattttcttagcttgttcaagcaaactattacgactaggcataaagctcttagctttcctgaaagcttccgaatgcttaaccactttacccccaccagatgctaatgcataatccaccattccaaggccatctgctgcatgcctctctatctccatctcaactatctccttggcaaataacctaatatcatccaagcttatgtcgccaacagtaccatccaaacccttctttttcttcaactgttccacaatctcatcaaattcttttttagaaacaaaacccatgtccctaagctcagcaagtgatttatctaatttgtcagtcttgccttctagtgccttcatcttaatctccagcttattacccttgtcttcgaattgcttcgtgatgtccctccttgttttgtcaatctcatttcctagcttcttgtctaaaatatccagctgtacctgaagcatcttggttgtcttcttgaacccttccactttggacagcctgctctccatatccagtgttgtaaatgataaatcaccattttgccatctccagaacagctgccccatccaagcgacagccgaaatgagaaggcaaagtttcatcaacacacttagagcgatttcccacttggccttttcttgcttagcaccactcttcttttgacggtcagcagcagctgcagaggcaattgcatcttttcttgcctccaatggatactttgatttgccaagaactgactctccacggatagtatgactaagatccttcttgtcagtgatcttatcaactgatgaggtaccattgaatccaccatcagcaaggagctcaggtgaggctttcttccttgcaacaactaccgtccgccgcctaacatcttggctggaatgtgagtccatactcaacgcgtggttcccatttgtatttgcggttggaaccgcagcagttgagactgacattgttgtcccctcaaggtacaaacgggagaactatgatgatataagctggaagcaatgatgcacctgaaattgaaaccatagcgaatactacacattcttcccgcaaaaaaaa

SEQ ID NO: 18536 - DNA, 3348 bp, Oryza sativa
ggtgaaggcaaataaagagaaacgcttccagatctagaagagaagattagggttaaggcagagatggatgggaaaggggatgtgcgtaggtacctcaccgccaccggcggcggaagcagtgggaccgctgctcgcgggttgtagatcggcgcaggcgacgggcggccgccggccgggcgaggagacgggagtcgaggcggcgaggcccaagggccaagggaacgggatttacgctgttactatactggagtagtactcttttttcttctcctctctttttacacgattcacgcgagggagaggaaacgggaaggaaggggagagacggcctgacaaggtgggttggccccacatgtaagataccaggggacatagggggtgtttagatacccaaaattttacgccatgtcacattgaacgcttgagcacttattaaatataggcgaaaaaaaactaattacacatattgcgactaatttatgagacaaatcttttaagcctaattgctctatgatttaacaatgtggtgcaacattaaacatttgccatggcggattaatgaggcttaataaattcgtctcgcggtttactgtcggattttttaattagttttttttattattctatgtttaatacatcaaatttgtgtccgtatatccaatgtaacatgccaaaatttttcacccctggatataaacacagccataggcttgtttagttgggaaaaaaaatttggccttgcagattccgtctagaaactacgagacgaatttattaaacctaattaatccgtcattagtaaatgtttactgtagcatcacattatcaagtagcatcatattatcaaatcatggcacaattaggcttaaaagatttgtctcgtaatttacacgcaatctgtgtaattggtttttttgtctatatttaatactccatacatgtgtacaaacattcgatgtgatagcgtgaaaagtttttgtgtggtaactaaacatgcccatattcagagtccacgaaatcgattggattttgaaaaaaaaaacgatgtttcgacgttgctcgacagtagctctcctctaaaattttgatggttctatgaaaatttaaatttgaatagataaaaacgaaaaaataaaagaaatcctataaatagtatggtattattagaacctgttggtatgtaacttttttaaaaaaaatgaatttcgctgatgtaaacattctccaaaaaatgttaaaaaaactatggaggtgttcgtatgctagaagctagaataaaaccccagtattaactttagaccttgtgtattggactataaacttgtaatattagactataatttatatggtaggcattccatttggccaatggttaatgagtgatgccaagatatatattgaattgtgcatgatatgtcatatgtgatctaaattattgtcttttatgaatatgtgtatatgtcaatgtgaagttatcaaatttataagaaagggaatgccaaaatttttagatttttttcaaaattttagcatttttgttctagtattttctacgtttttaggaaacaaaataaaattgaaatttctcgttgatttctcgacaaaatcgacctgttttccttacaaaccaattggtgtttttactttgcttgcacttccaattgccgatcggaatttcaaagtttccatttgaaatttttgataaagttgatcagttttcaacacaagactaaccgaaatgggaatttgaattcaatttttcccaacaaaatttgtttagaatctatcgattttctatcagattccacgaaaatcgatgtgcctccagtgtcaggcatggaaggtagtatcagaattgcaaacaccggatatattcagttaaagccaatgaataaataaaaacctttgaaaacaagacctgaaagttttgtaaagaaagaaaaataattagaagaaagaagaaaaatagcatcataatagccgtttgcaaatatttaaataattcaaatttaaatatctaaaatctagttacgtactcattttaatttcaaatcgagtgaaacttgaattaaaattcatccatgagctaagcgtagcataattggttaggtttttttttaatagaaagtcctatactttaacgtatttatggctaatatagtataggctgtatagctatacaagtcatcccactaagtgaaatggaaaaaatatactttgactccctcaactatggtccgagtatgattcatgacctccaaccataaaaccgggtatattgactcctccaactattaaaaccgatgcaaggtggttttgaaagcggttttggctgacgtagcgctcacgtggcattgttgacctagtcttcgtcccgtgtgtcatcgacgtgtcgcttatctggcacttgtaataaaaaaaaattgtgggaccgacatgtcattcacacaaaaaagaaaatagtgggacccacggacatgtgggcccacatgtcatcctcacctctcccccctctctctttcatcttttccactcctctcaccttccaacagtaaagcggggcgacacgacagcgacgacgcacgggggaggagctcgccggctgtccacgctcgggggaggagcccgccggccgtcccgcgagctcgccggccatccgtgcgcagggggaggagctcgccggccatccgagcgcgggggaggagcccgccggccgtccgcttgccgggtgaggagctcgcgggcgtccgtgcgcgggggaggagctcgccggccgtcctcctgccgggtgaagagctcgccggccgtccacgcacgggggaggagcccgctggccgtcccgcgagctcgccggcgtccgcgcgcgggggaggagctcgcctgtcgtccgcgcgccggggaggagctcgccagcgtcggcgcgcgggtgtggagctcgcttgccgtccgcgcgccgggggaggagctcgccggccgtctgcgcgcctggggtggagctcgccggccgtccgcgcgcgtggggtggagctcgctggccattcgcctgccgggggaggagctagccgtgctttaatttaggcatacgtatatctcgatcgatcgatgcatatgcatgcttgcatatgctttcactgttctggatatggtttcagtctttcagataagctaagtagctcgccgaccgtccacgcgccaccgccttcttcctcctccctcccctgactacggcttcggggaggagctcatgcttcgtgcttccgccggctgatggaaggtgagagaggaaaaaatgtgagagagagaagggggaggtaaggatgaaatgtggggtccacatgtgggtgggtt

SEQ ID NO: 18537 - DNA, 11656 bp, Oryza sativa
aagtatcttttttccaagtggaattaaactattttcatgttttgacagtaagccacatcacctcgattcgttcaagccatcggattgtacataataaacatttgggtagctatcaatcaacacgtagcaatcaacattaaacgttttaccatctcagctaaggcaacgactaatcaaagaggcccaccttgccatctctgagttttgaaacataaagttggaataccaacagcaacgcatgtagcaattaagctcttaatcttccactaaagctattttatctcctgtaacatgcgaatcagatgaacagtcagccttggttcctttatgcgctgttccattcactgggaaagtgggaatgctgttcctcattcatcaatatacccatttatagaccgaatgtaacatttgttgttcaccatcagcgctcggcagttctgctgtgcatatatcgggtgaagatcttctaccataatgtcactatcattacagtcactggtatgtaggtctcacctttctattgatacacatgtcagtgtctataatgatagtatcattatgacagaggatgttaacttattgcattcagttgatgcatctcagtatataccccctccacttcttaggttgatgcttcgacggagcaacgtgcacaatccactttggtcatctctcttgcttgcttgcgcatggctttctttttccttttctttttcttactaatcttactaatttcatttgttgtttagttgtagaatctgagaaaaaggaaggaaggataaagtagcagtttcaatttcttaactttctattgtttgtgaaggttgcaggtatcttataaagagaattaaagggttggtgcattactattttcacggaccggttaaaataaataaggatactttttttttgtcagtaggttatagacatcttcacctgaactttaggaagtttctacttcacaaagactatagtttggaataagcaactacatatatagcatcgttgagtgatcaccatgccgtatattgtctaccaattttatttcttgctacatgctaccattctatttgttgtctctgtgttcaactgagcttggttccacgtaaataggaaatgatctttcacttaaacaaccaagtagaatacaagattaaactgtattccattatgattcaaatttcagttgcttattattataacattgtcaaagtgttcaatgcataacagtacaacgggtgcacatcgtctgccgttcgttgtttcaacggcattgtgccgttggccagtcccaaccgttggtttgaaatggacggataagatcaaaataacccacaaatctatcatcttcataaagcattacgcatatttctctccagggaatacggattactccattcaagaagtgaagaacactcctaatttacgttgaatttgttgttctgtaacttccaccttgacatcaattgatgacaaattaacctatcaaaaatttagctttgttgcatgaggcgacaagctaacagaaaaaaatctttttttttcattttttttgaaaccgatatttttttcacttttacctgtgtcacctggccattttgtttccgtttactcaatgatggaaacattttagcggtgatgccgctctttccttttattcaatcgggacaggtcagaagaagaaaagaggaaagcatcgatcctttagcccgtcggttcgcacatcctgatcatccattcaaagtaacggttgggattgatcaacggcacagtgccgtagaaacagagaatggcagacgatgcgcacccagcaacgtgcggggtatcctctagttattattgtaatggtgtgtatcgatagtgagttacttgatgtaaccatgtgtcacacctagaaatttagcccaaattttcatactattttgtgtaataaatctctatctaggactagccaggtaaacaaaatgataaatataatatacagatccaaacgtaaataaagtaaatacttacagaagaggcatttagtcctcgcaccgaaaagaaagcagcaacagcggaaaagacgatcctagcggcgcttcagctccactccacaagcaaaaactcaactggggtatgagctttattcttttaacatcgtcttcagcttagaagcgctacactctaaaaagtgggaacaataacaaggctaagtacaaccaccatacttagcaagtcacactaatgatgcagacgtgtaaggggatataaggatggcttgtagctatttgcataaaggcagttgtaaagcattttattgagcaaaacagtaaaatagttgagtaattaaggtaatattaaatctccactgatcaatgctacaccacattgaacaagcccaaccatcctacctgaactacaccagttcattaactaattattaaggatgtgactaatcacggtgaatctggccgatcgcccataaccgcgggcacagctatttgaatagttttactctagccagaggtgcacaactgtacccacaagacacaatccaccggcaagtcaccgtgcctgcacagacacgtcaccatgtcgagtgattatgacaagacccttcatataattccctatgaccaatcgatgccgcaccacaggtttcgttcccgcccccagcaggcagcgggcagcctcccctcgtgccacggtgaatccgcaagccgatcaaccaaacaccctagtcgacccaactccatcacgcccaccctagcctgggtacatcagccagaggaaaagctatactacaagtcaagcagttacccattcccgcttgtggcaagcgctgtatgtcttacagggtttcccgtgaaccggtccttaactgccatgggcgcgactagcaaaaccatgcacccacagcccacctttcactcgcattttagttggataattacgaccaatggatcatggccggatgtctcgagcacgcagctcgtcaagatactagatgtctaataatgtaactatcccattatgtgagctagtggtaattaagcatggctaagcatatataattctagctagatcaacataagtatcacgagatagataaagtatcatccaaggttgacaaaggacagatatcaagtaaacatggcacaaatgagcagataggtaaaccctattcccaatgtaattagcaaaagatgcaatttatttgcaaatagtaaatatttataaagtgggctaaatatgctcaaggggaatgtgtgacttgccttgcttcttcactttgatcttttgaactcttttcgtcgcgatcgcggacttccgaaacgatggattctcacgctggcacgcaaaacaaggaaaaacactaataaaaaccaaggaaacagtacatgaaaagtaaacaaacatgtatatctcaattttaaatgaattttgcaagttgaatggctcaattagtagttcgtatgaattagatataaattttagaagttttgagccatttaaatgaatttctagaattaaactgaattattgcgcaaataataattaattttgcaaaggaaaagggactgctgacgtcagcaagggagaggggcgccgcaggcaagcgggccccactggtcagcagcacaagggcgccggtccaaggtaggggatggagctgacaggtggggccgccgggtccacctgtcggcgaaggagggataaaggaggccggttgggggaggaaaagaagacttggggtgaaaggggagccgaggccagctgggccgggagagaaaagggaaggccagccgaagagagagaaaaggggcgcgcgggccgctggatgggagaaggctagggccgaaaacagccaaggaacaagagggaggttttactttgttattcaatttatttaattgatgatatgaacttttgtcacgcccggaaattcactaataatttccgaactaatttgtgcataaaatcctcgtccaggaatcagccgaggtacacaaactgacaatttaatatataaattcatcataataataacgttacatacttataaaagaaaagaaaaacagcagcggaattaacggtctagcgatggcttcagctccactcccacaggcagctcaactggggtataagccaaacgtcttctccttctggatcctttttcttcaactgaggttgattgattattacaagaatgagcatatgacatactgaacaagccacacagcaaatatgcaagtgcacaaggataccaaatgatggcataatataggctcatttgcaaaagcagcatttagcaaaacatttaagagaagtaaaacagtggagtaattaatcagaaattttaatcaatactgaacaacacacccatgctgcacaggcccaaccatcctgaacaaccgtacacggctgtacagatctaactccaaaccaggagctaagcaaattattaccaggtataacatccataattattgtgagaggtgtgagactagtcacgaaaaacattgctcaacccgcccataaccgtgggcacggctattcgaatagttttactctggccagagctgtaccactgtacccacaagacacagcctcaacatcatgtctaccatgcgtcgcgatactggaaagtacccgaatagaggctgtgacaataccctctgcacaacacaactcaccacagtgcaccattcctggatcataatcacccccttataaaacaaggcatggactccccagcgacccccgtgggcttatctccgccacttctcagtctggtgctccgcaatgaaccatgtaatacaaaaggtaaagccgttgcccacgctggcttgtggttggcacggttaatgtttcacaacagtagctcgcgaaccggtccttaattgccatgagcacgactctcaaaaccatgtgctcacaacccaccattatcaagttttagttggcaagtaattaattaaccaatcacgattgaccatcgtgaactatcattaagccatcattaaataatagtgagtcataagttatcctaatagtgtgctaatgtttctaagcatggctaagcaatcataactaatatctaactgaaccaatatataaagcccaactagtcaagttataataacccaaggtatcaaggaataaagtaatcaagaacaaaagggctataacaaacaataggttaattccacccaatgacattcgaaaataaatgcaatagttgaatagaaacaatagctttaaacgggatcaacatgctcaaagggttgtttgggatctgtgtgacttgccttgcaataatcggtcttcaattaatcttctgaacactcctgacgcactcacgaaccttcgcaacgacggaaacgacaagctaacacacaaaacgaagaaaaagactaataaaaccaaataaacagtaaaaaacaagcataaacagtacatgtggatatttttaacatatagatcatgattttagatgaatttagcaacttgaaccactcaaaaccgagttacgatgatttagttatgaatttccgaagatttaatctattagaaaaacaggaaaaagaaaaacgatgatgacgtcatgatgacctcatcaatggccggaccaagatggcgacctcgccggagattggatggtcggctgcgactttggaggacatgaacacgtagaggacgacgagacgaacccaacggtactcacgctcgaaccaaacgacgaacgacgacggccggcgacgaggtctagcggcggcgcggcttcggtcgacggcggcgacggggctccggtgaccggcgacagcggggtcaggcggccgggcttctccaccctcccgcgcacctaacggtggtgacggcgaccggcggcgacgacggaggcggcggcgcgacgcggatggagctcggccggcgacgatggcggggtggagcacgtggcggcggcgctacgaggcacgggagatcacgggagagggggcaaacgaaagaggaggactagggggtcctatttatagccatggaaggccgggatcgagcccacaacgacgggaaaaactcgggaaagtttagatcttcgccggaaaaaggaaaggttgaaccgcgaaattggaaaggatttccatataaacttttggggatttcttggggaaaaggaagaggagattgagaggattccattcccacaactaatttggagaaaggagcaacgatgtggccggattggtgggaggaggcggcggcactgtgcacgggctggagagcttgggctctgtctggaggtagaagaaggagcactgtagcgacagggacaaaaaacagacttctatgcgggctgagaggaagggagagagaaggggaggcaatgggctggattcggcccaagctgaggaggaggatttttattacttttccaaataaattaaccaatgagatgatctttcaattgttaaaaatactttcaatgctcaaacaattccaagaaaaatcttgaacatacttagacactcaaagtatttaatataataatatccagatcatttgctgattaatttattatttaaataattgctaaattgttctttgtattattaacattaggaattgagctccgaaaattccgagaaaatttcagagagtataattaatcatggagaatttaatacaaattaaatccatccatgctttaaattaaggaaattttatttcccacatttaacttcacttgtaaattaatgaacagttaatataaattcgattaataatttattaaataatttataaatcctgaaacggaaattcaggctgtgacaactttgcatcattaaaattagatattgagctctaaacattcactagaaatttcagagagttcattagggcacagagaatattacaaaatatttccggccatgatttttaaaggaaaattttattttcctccagaatttcacttgattaaattgctttaacttttatttaatttctagaaaatgaattattaaatgatttttaatcccgaacgaaaatcggggcgttacaccatggttgctattgatacaaccgttgctcacatcaaagataaaattgtctaagttctggaatccaattcagtcgcttgcaacaatgatttcaaacgactgccaaatgtgcatacgacctccgttctagattcatgagtacttgatagaaagcttttgaagtcctctttccaatgaatccaaccttgtccccaaattccatctcagtcgacgacaaccaaagaaacaaggtgttgtgtcaccagtaatgggcctatggacctttaacgttgtctggggagctcagcccaagtggggtgcgccccaatctggtggagcacgaccctaggaccctcttggtcgtccaaccacctctttaaatagcttggtacccctttagggtttcttgggttttgtttagattaaagtttagccatttctacttgcttgcagcgcgtgtcggctagaccgcacgtctgtttgtcttcgaaaccctaatttatcatttgtattcaatttctatttgcaatatcagattgattttatctcgttctcttgtttgtttgattttcttgcaagaataaggttgatctacatcagctagattaacaaccaacgaagaggtgtatcgatcgctaaggcgcaacacaacaacgtcttggacagttgtagtcggatcattaacgtttcttccaaatcataattatcattaactcactgaaagatcgggctaatcatagccgtgagtgcctcaagtagaactcagggtttatcattacttgttatgatttcatcaatcgccacatataacgtcctagtgtctcggactagtgctcataaggggaggatttgattgtatgttgcaggaagatgcttaatgtgacttcgtcaagatatgtcaatccagattccagactcaaagatgctagtagaagtagcacatataagcatcctcatttgtgctatgttcaagaaaaactatctaacaacaatggctttttttaaataaaacatgaatggattttttttctagcataaatggtaaccctgtactgccttttttttcccctagagctcggtactctgagcacttaaatgtcaatatatttctcaattcgaaaatgacttgagtgattggtttgaatgtcttggatcttattaggaaactggacatctgtaacaagaaatttagatatgtgtatgaggtgttgctcgtcaactagaacaaaatgcgcaatggctatgaaatagaccctccgccagcctttggctttactcctccaaatgcatgaagcaacatataaattatttttctccaataaaggctgcagtgatattgctttctgatccataatgattgatgaactaattttcttgtcataaactcaataatattattgttttacgggtagtataaggtttgctcatctcctcaccataaactcagtattattgttttacggggtagtataaggtttgctcagtattatcgaatttgtacgctgatgacccctctcgctaaaccgtggtgcctgttcgcctgggagtcctcctcgtccgccaacctcgccatctacaaaaggtacaaatcccctcatcctccctccccaccaccatttgcccctttgccacctgatgcgctcaccagttagaggcatagttatattgctcttatttttcttatagaaatcgatgtcttttgcatcacggattcttctttacgtcacgtattgcatgcccctcttattagtgtgcccaatcttggaggtacttgccaatttttgttattgtgggatatagacaaggaaaacactacattaggattgttgctcatgatctgcttggcaaaatgcctctaaggttattacttattacttctgaaattttgagtaccttactttgtatatttttttgacagtatgttaatttgtatctcctagtaacataagattttaatttgattatgttaatttgaagatggtgacattttaactttattagatttccttgtataaagaaataatttttgtttaacactatcattggttcattaatttaatttgtactccctctgcccccaaaatataagcatttttaaaacatttttactttgactattaattaaaaaaataaaaaatatctatcatgtaaaattgatgttactatatttgtcattaaacatagtagatctccatcccatattacttgtctttttaagtttttgtttgtcaatgtttgatcattcgttttattcaaaaaaatttaaaattattatttattttgtttatcatttgctttattatcaaaagtactttacatatgacttatcttttttttatatttgcactaatttttcaaataaaatgaatggtcaaacattgtaaataaaaaatcaaaaatgtcacctattatgggacgaagggagtaatatgcatttctttttatttaaaatagatattgttagttaaagtagtatctcgaatactatgttaaagtaaaaaaatgggtatattttgggatggagggagtacttgtatgtgtagcgttagcaagaggggattatagttgggtttaatttgatgagatatcctcatcgtaacaccaccgctgattaaaaagggcgaaaaaggctaaaagaaagagggcaagaaacgcaagagggatccaagaaacgggaggaggcgtcgaccaagattcgccgcccatggcaacgcgcgcgccggcgaccggatccacgaccgtgacggtggacccctccccgtcctcctcctcctccgcgccggcctcgtcggctcccccgccggcggcggagtcggtggtgctgcggctgaagcggcggccgaagaagaaggtgacctggaaggaggggacggtggacaacgagtccctcggccgcaagagctccaagaagtgctgcatcttccacaaggaggtccccttcgacgaggattgcagcgacgacgagcccgacggcggcggcggccgccggagccctcccggggacgccggcgaggggacaagcggcggcggcggatgctgctcctcgtcctcccatggtcacggccacggccacgaccattgatctttttgattgaattggtacgaattggtgagtcttgatgcttatctttactgattaatttggtgaggtagatttggggaaaacatatttctaggttgtgttgcaatttgcggttaaacatgtttcaatcggcaaatcaaatttgtcgacacatttcagctgccatacatttgatttgttctctggtattaatagctgtaattattctaatatgaaggtataaggactgatttgatgttcagtattctagaaattttgaagcctcaatgatcaaactcttctaacctgcatgtgcaactactccatatatatgtaaacatattttcactagtgaatttgttatgcttgtgttattccgttactgatctttatatgcttggttgcagtcaacttatcgtggaactacgcatcaatgtgtgaagttataacttgaaggggaaaattgcttctctgtgccgaaacagtaggtgaaatgatactgctttgttttgtgttgcgattgtggatgctgtactagctttatttttgtgtggcatttgcaagagagaaacgttgtaccgtatagctgactttattgttggtcatgtgcaattctcttgagatgtatgaagtattgctcctgttgttattgttaccattccatcgcatcaaatatcctcttgttctttattttaatatggtgagttggtagttgtattgtattcacattaatagcagtgtattatgtgatgatgatgaaataccttgccccaaattactaaattagcacccttttatcaacaggttgaggtttattagttaacaaaatcattttgtcgaattcaattattactcactatcaatctcatcttttggcttatgcttatgcttataagccaaattttaaattttcaaccttaaatttgtagttgatgttgggggttttttttcatcgtagtttattttccggcctttgcttttggattgctaagaacacgtatatgaaagttttatttacaaattattttccgtttgcaaatatgccgtttcgcttactctgtcaataagcgaaacgatggagtcctatgccagaaatcaaaattcagacatttgtggaatcaattattaagtgcaaatgcagccatacaaatcatttttgttcattgacaacatcataatactaaacaattcacagatagctctgaagttagttgtcacttatcagtttagtcgacaacagtatggaatttgaaggttgcctgtattcagtcttagcagagagtggattctggttgtgttagcggaagcagataaggccgtgaagctattttgtctatttactaaaggatgattagctgtttatctttgtcagtataaaacaatacatggtatcagtttgataagtattgtcagtataaaagaatacatggtatcaggatgtttagtatgacttggaacttgtctgcgccggtgctcccggtaagccgaaacatttttgattgtcaagcttcgatctggtggtattgtggtgacaatggctgctatattttaagggggaatgtctatctttcta

SEQ ID NO: 18538 - DNA, 2138 bp, Oryza sativa
gaccagtggatccccctgtttaactggatgtacacagaaggtgtaaagagaaaaaaaatgaccagttagcaagccacgcagggcttgtggtcgagaatgacaactgcacatgaatgttagagtttacccttatttacttgcagcctgtgccgttttgttggtaatgacaattgcaccttgagctgtgacttttgattacaggtttttactttgtctcttgcttgatctgaggatgcaacctgcgttgtcttaaatctgatgctcgatgttgtattgcaatcaggagttctatatttctgtttcatataatgaacgaaactggcactccagcagcttgtggttttgtttgccaagtactgaaaccgaaggattcgagatgaagaaaatctctttgaatgacgatgagtaacaagctctttgaatcaatatgcatcatttgagaaaaacaagctcaatgacgatgagtaacagatcagacgaaacaaaatttagtctacctgattccctacagttttatccctgggtctgaatcttctatactgacaggaaatgatgaatacatatatgatacatgagaatccattagctctctaatccttttaatctttgttaaaacagctctccatggtctccacgaacttgggcgtgatacgatcaccagcagccagcttgtaatactcaaactttgcttcttcacactccaacgcagccttcttgcaagccctgatacttcctgaatgaagcaaatgatattgatgattagctatgctcccaggtccccatgggctatggctttgcaaacatttagcttggagaatgcaacaaacaagaataatggcggaaaagtagagcctcgatcatgctagagttaaaatgctggaaaacacaagtagttttgacaaactgtagtgttcatgccatcgtaaattaagagaatgcatttagcaatgctggtagcatatgaacttcaccttacactgaaaatcaggaatggcctgaattcagaaaatcaggactagattcatgtctcacatgttgccacaatccattctccacccactactaatcaaaatttgtactaagatgtgcagacaaagtttttgttgaaatatctaaaagcccactaattcactaattcaaggcacacactaggaataagtggtttatggtgcgaaaacacatgtgaacgaatttggcaatgatattctctaattccacttcaaaaaaactctatactgacacagtgagatgagaatatgaaattgttgctgaaatattgaatttctttttgttacaatggtcattggtagcaattgaacaacagaaccatgtggaagaaccaaatggcatgaaacaatcagctgtagacactacaaacaatacaaatgtggttcagtcacccataatccactcgctgttcaaatccattttgatacagagatgcgcatatgaagttgttgctatagtagtacaatacaatgtgcaattcaaaatcttctttaagttggtagaatcaaagaaaggaaccaggatcacatcatatttaagttgcatgaattcaggtctgacagacaatagggtggagtaaataaagcaacacagaatggtcagatagacagttttatagctgggaattgatttcgcaaactcaggtagcagatcagacggtgaaataaacttattccagaaataaaactaagactaagactactttcttcgaccatgtatataggaagtgatctactcaccactcacatcccgcagattgaatgaaactgggattttcccaatgctcctcaccatggtgatagcagcccacactttctggtgatcttcacgggaaactcggatcacgcaaagcttcgttatcggatttacatacttcactatagatgaatagagctcataaatacctctaaataaagaaaaaaaatgcaagcatctatgacgttgtcggaaaactgtaaggaggttttcgatgtaacaagcaccaaccttgcaacgacccaagacaagctgctaggccacactccccaaagttgatctggatgctgtctctgatagctttggtactattgagctgggtgagaatgagagggtcggactggtccttgcctgccgtatcgatgaatgcctcc

SEQ ID NO: 18539 - DNA, 2736 bp, Oryza sativa
cgccctatcaaagattatagtcatgcagactaataaatacagatgataaatccaactcgaaaccagaaaaaaactgacaaaatgaccataccaaaattattgcacaagtatttgttcatatggcatcaaatcaatcaagccagtgatgatcaagtattgccttgacgactaaaacagagccaaatgaccagtggcatgggacatgggggttcagttgaacccccccaaacctttttgggaaccatcaaactgttactagtattaaggtttaaggtaaatttctagaacagaagctagggttaacgcaaattcgagaaaaagtgcgtgggtagagagagagagagaggtaggtgaaagaggatgtgcgagacggatgcggcggaagcagcaggacgagcgacggcgacccagctcgctcgctcgcgcgatggatggggatcagcacaagcggtggtggtggaggatgtgctcaccaggatggatgcggcggaagcagcaggacgaacgacgaagccctactcgctcgcgggatggatagggatcggcggaggccgagggcaaactcaggaatcaggatgactcgcacatcccacccggattgcttgcacatcccacctcaccctatacaaacggtggtatatgaaaatacaactaataatgcaaaatttgctacaggacaccgaaagattatgatctttactatgagacacccgaagatcgtgtatttgctcgtgcacactgtaaaaaagtggtaatgagctgctgaacactcctctcattattttattattttctatcaaaatggagagagaaactttggttaaagacaaatttgcccatgggctcacttgtcaatctctctttctctgatgttcttcttcctctctttctctctgttcatctcttcctctctctgtcgcaggctcgcggcacaccgggcagagctccacggcgaaggtgtgccagcaaggacgacgaggcggcaacgtgcttggacgcgacgacctgcagtgggtgacggactgcacgatggcgcgggcgcggcgcgcggggtcgccgctcttgaagatgcccgaggcgacgaagacgccgtcgcagccgagctgcatcatgagggcggcatcggcgggtgtggcgacgccgccggccgcgaactgcacgacggggaggcggcccagctgcttggtctgcatgacgaggttgtagggcgcggcgatgcgcttggcgtaggcgaagacctcgtcgtcgtccatgttgcggagcgcgtggatttcgcccatgacggagcgcacgtggccgacggcctcgacgacgttgccagtgcctcacagacgcggtgcgcgacttcctcgatgacgccgatgacgtgctgttcgggcagctcgcggcggagcacgcgacgaggcggcggcgtgcttggacgcgatgacatgggcgggccacggcgaggtgacgaggtcaacgaggcgggtggcgtgggaggctgggagcgcgacgcgaagaagtcgagcccgccgccgccgccgcgcaccgcgccgacgcggagagcgtcgccggcggcaccgtgggcgatgcaccgccgccgccgccccgccgtggctgagccgtcccggctcgggccggctgccgtcgccttctgctcagtgtgaagaagaagaagaaggggaaaataaaagaagtgagaggaagaacactgtacaggggcattttagtacttacataactctttctctcttcatttcaaccagaaataataaaataatgggaggagtgtccagcaactaattaccacttttttacaatgtccacgagcaaatacacgatcttcgggtgtctcatagcaaagactgcaatctttcggtgtcctgtagcaaattttaccttataatatctagcactgctattctaatcctgtcctattcatatcctatatagttatatagtttatccttactttaatgctatttatctcttatctcattaagccacatcactctaattatttctaacctttggatgatagatctatggttcaatttgtctcttctttcttctctcataatatcatgcaatctcaattattttaggctcaaaattcataagtatcaaattattttagttttaataatcatgttgcatattatttgtacatatttaatttcccgcagcaatacgacgaggtatttatctagttttccaaataaagccccctaggttggacctttgagatggtggatttttatttctctttttcgtataaggttaagatgatagataaataataggtatgtttgggcataggccgtgccgtgtcggcctacgtgctgaggttggaacccatgcacgacccagtgagatatcgggtcatgtcatgttggcctggcaagatttggctacgtgggctgtgcagaggccagttagcccaaatttgttatataccaagaaaaaaaatgcgaatagtatgttgcatcctgctgcacaaactttagtgaagctttagtgaggtcctccgctcactgatagcacattccacatcctcctcatcaagcagcgtcgtagcccttcacttcctacttccttcgtcttgagccggtgagtccacaatgaccaaaatgcttagtggttgtcctcatgaatagggtgagcggttggctacactacaacgctaccgtgcatacctacatcgacgagcgtcctccatcgcttcttctgcccttgagcccctggcttacttga

SEQ ID NO: 18540 - DNA, 6090 bp, Oryza sativa
atgccgcaatggagcaaattgtgtgctattcctggaccatgtcgtgctggctcgctacatgcacttgtcatgttagcatgttgggtggtagcaacccaaacatggcgtggctagacgggccatgccagcacgatccacagccaaatagatcatgtttttcctgagctgtgagctgcacatgcgtactcggacagacacggaaggacccaacctatttgacaacctataggagaatttggtaaattcataggcattattatgtttgtacagatgggatcaattaagacacctcagttgcaactaattaatttgtttagtgtcaaattaaagctgtaatagtgattacactccagccaaccagaaaaataacacaccattttcccaaaataacatgtaagcatgatataatctagaaaacatatccattttattcttgtttttattagctcaatttcaagttgtgttgtctaagacaaaatttatttcaatatgcagaatgaggataaaccgatctcatggggatatacacattttcgttgcttatctcattggtgaaaaggaatatattttctcactaaatcaacacttgttaagagttgatacgtcataaaaaaattaagggccatccgatttctgctcttgaagttttaggccattggattctctgaatggtgaaatatctttttcgcccctaaggaaactgctatcaatttctaatgtaagaaatgaaatgagttcactataacaattataataaaatcggtatatgattcctgtaacttgctatagattctcctatatagtacattagattcctgtatacctcgttctttcataagaaacacatgcatgctagtagaaaaacagatataatccatccattccaaaaaaaaaaaaggcaatgtgacccattcagaggattcaccagtggcatttttaccctttttctgcatccaaccatatatacggctatcaaaatagggaacttagccccacaaacaatcaaatctaaattttgttcctatggagatttgaactcaagaccttgagatattacttaggtcattgtaacaactaggctacgttccctttcctggcagccctctatgcacacctcagaaggccattgaaatgcttcgctcacaagaacacctgcagaggcaacttctgctattcaaacactcttttaagatcatcaagaatgtgatagagcacccacatgatatcaagtacaggagactgcgtaaggtatgcttggctgttcttatgctcttttattaggttcctttggtccactaaaataaattcttactgatcctaatttttcaaatatgcagtccaatccacagttccaaaggagtgtggcgagctacaaaggtctctatctcttattcctagatactccctccatccacaacaaaagttacacctatttcacatttgagtttttccaaataaattattcctatttgtagtctttatacatttaagacttaaatgaaaagataaattaaatgttttattagaatccaagaaattatctaaatactcatccttgattgattttgtaacatccaaggtgatttaatttctccttagtcttggtgtcaaaagtaatatgtgtaacttttatggatagagggagtggttgatacccacttcagagcattaacactaaagctgtaaaatcgtgaggccacgtcatctgaaatggtgagccgtccgatctgaacgttccacgccattcgatctgaacgttccaaattccaagctccatgttcagttgccgatcaagcctggcccaaattacccggctagaacagcccatccagtccccattagctgccatcctctcaccgagcattgcacggccgagtaaccgtgcatggtggtggcaagagcaattgattctaatggatgccatcattttcttttttaaaaccgatgttatcatgatggggcagataaggggttactcctaatggattattaatttcccctattctcttcgtatcccctctttcgatactgccaataaatttacataatccttagagcaagtttaatagtttaatagtatagccaactactaactctaatcatctatagccaatctaatagctcatttgtataatagttacatactacactattaatacttgatctcacctgtcatacacacattgtgtcttggagtccgtgctatagctggctacaaatctgtagcccgctgctcttctctctccttatttattttcttaaaatatatttgcagctgacttatagcttgctattgtactgctcttatgcgtcaatataatagggccaatggtgttccatttctgttgctggagtttgctcgctggaatcataagcatccctacgccatcatcttctttaatcactccagcaagctagcataggctatattagccatcaacttcctctttccttttggtaaattgatctgattttttttctgaccacatttcagttcttacatgtatttcaatgtgtaagcatgctccatacataattgtaattgcattagttttccagtttggctatctcgcattttgttacaccagttttaccatatcaattccttctttttactctgcatccccattcgttttcacatgattttagatactaggttactgacttggttaatttcttttggttgtcccgaatcacacatcatttttcattactgcagttgaagcatgtaggaaacaatatcatctagacctacatattcagatctaatatgtatttcaattatgacctttacctggtgaagttatcttaattagtatatatacggtaattaatatgatttcctgaaactccatatcaagaataagggccagcatagatacgctggattggctcctgtcgcagtatatatgttggttcatttcactgtccgagcatcaactacctcttatcatcagtaaaattaaataaacaaggcaccacacatcaaagtcactttcacgaaaaatagtaccagcaacaaatattaaaattaatatccactcctactctactattgatttacctccttttgatttacatcttgctacctccttttgattaacattacttcatgtggtcatatgtatttaatatagttaatatacaagtatattatatatagcaaatagtactaagcatgccttccaatttatcctaaattaagaatttcctcagtaacaagaaaaattgatctccagtcatcattcttaatcattgttctacaattttacgcacgtaacataattttatttatgattttatacagtcccgcagcaacgcgtgggatatcacctagtttgctttataaactcccctcttcttttttccttcaggtcttcgaaaatctactgtaactaacttcctcattttttttgcctccctgaaaacagctgcaatggagttccttgaattgattggtttctgtgaggatgttgtctcggatgagattggtcgtgcagagacttacttggtattgaaaaggaacgatcctagcttgccgtggcttgcaaagtcctctcttgaagtttccacaattgtttcaccaagtaatctcctattgcttccgtatacctgtaaatcattttcattactgttgtgtggatgctcataggcaactgatgtagtatggtcttcctacacgaagattgtttgtacatggaaacaccaaatggtctgtactatctgtccaagcttcatgattttacatcaaatatacacactgcagataaatttcctgacaaaaatacaaaatggacacattttcccttttgtgtggactccgatagaaattgattccagatgctcacaaatgccaaccgtatccacgaataaagtctagactagacggtgcaatccattatcatcgcgaagatgtcaattggaactgaagtatatagagccagatttaatcacaaggtctcatgtttgggaactgaaattaaaaaaaaggggactatagaaaaccgtcacaagttttataagggaaaaactttctaatctaaagtattgaaagaactaatctttcttgtcaccggaatgtgccatgtcatcgagattacaagggccgtcagatgaagtataagttcaatatccaccgttaaatcttggacgagcctctcagtaaagaactaatgaaagcctccagagtctttaataggaagcctcacgaatctggcgtatccacgtgtcatagtagaacgaaaaaaaaaaacaaacgaggaaaggaaaagagagagaagcgtacccatcctttcctcctcacgagtcacgaccgccgcatccttccctccctcctccttcccatccccatctccggcgctgccggatcttctcagcacggcgctagatcaaacttgagacgatggattgaagtaggcaacgaagaaacaaagcggggcttcgaggagaggaattcgagcaggacaatgccgccacctcgtcttccctccagccaccacctccgtacgtccactgcatcagcacccaaggaattcttctcctagtccaccccaactccccaagcgtcgaatcagcggtaagttacatacttatattctcaactcaatgaccatcccctcctgacctctcctctattgtatccgccgccatgccacacctacattgtggggacacaatcacataatagtaggaggtagtgagatcatcccaaacaaggatttagtcatagctgatgataatttggctgcttgcagaatgataagctgaaactgattagtggcatactaattgatatcatctgcattgtcaaattttgtgagcatggtgtaactgcctactcttgtgcactgaaatcttcagactacttacattgcacctgttcagcctcactgcatgactgcatgtgcatgactttagggcactcccaacccataacactagacatggtttccataaactccacatcatcaagaaactagtactagacactactcttccaatgcaaacaccactattccatacttcaatttaatgctacttatctcatatgatatcttggatgttgtgtagaaatcatgtctcatgcaagacatggtttccttctctttcctcatttattcacttgccatattattttttgtcctaagtggcaacttatttaatgctatggacaccatcctagtcattgggttgggaatgcctttaatacactgtgcctagctgaaatcttgtgatcgtattctagaggggtatggctgtttaatttcatgagtaatacaattttatttgtatcgatgtcatagttaatagttagatgcaggtacttcaagcagactgttaaaaaaagaaaaaaaatatattgctcaatctaacgactgaatgattagctgatgagcctgtggcaagcatggaacaagatggagcctgaaacaaaattctcaaaacacctgttgaagtcaatttcagggccatctttttatgcgaacttggagcaggcttctaaagatgcgagacatgaaaatacaggagaaattggatatcctgattgagggaaaggacaatttcatgatatttctatctatatgtctaatactccctctgtttcaaaatgtttgacaccgttgactttttagcacatgtttgactgtttgtcttattaaaaaaatttgtgaaatatgtaaaactatatgtgtacatgaaagtatatttaacattgaatcaaataatatgaaaagaataaataattacttaaattttttgaataagacgaatggtcaaacacgtactaaaaagtaaaaagtcaatgttgtcaaatattttaaaacggagggagtaaaacatagttcatcatacgatatattatgacccataaatatagagcttttctacatgtatctaaccaaatggctagtttaactatagtattgttgtgtattgggcctttccaacctcgaacataattccgggctgtaaatttggtgggcttggtgtctaacaacagcagaaggcccacatgcgtcccatcgcaatatcccctcggccgcttgcttcgatgcgtagcggcagtaacacactctcccacttcgcgct

SEQ ID NO: 18541 - DNA, 1204 bp, Oryza sativa
ggtgggcttcgtctcccagccgcgacctcgcgctgtccgctgcaggcggccgccccatccggatgctcacgcctatgcggcggtgggggcgggggcgaagggggggtgaggctaggggtgtcggggtggagaggaagaggctcgtggtgttcgtgtccggtgggggatccaacttccgggcgatccacgatgccgctctgggtggggacgtgaatggcgttgtggttgcgttggttaccgataaaccaggtgatgacgatgacaacgacgatgctttgcttccttgagctctttgggtggcaatttgggtggaattgttgggatttattgggtattttgatgtggcttgcaggctgtggaggagcagagcatgcgaggggtaatggcataccggtcgttgtgttccctaagttgaagtctgctccagagggggtatctactgatgagctgttgaatggtctgaggttggttgcgttgatctcaggcttgggcattcgattttctagctttatagttcatctgttaggtgttaaataagtccatttgcagaaaaaaatgatcgacacaaggcaacatatgagattcttcacacttgcttttagtcttgtttgcaaaatgcatacattgttgtgtgctgacaaaaaaaaatctaatacatttgtcttgtgtgctgacaaaaaaattctaatcaatttgtctgtttttaagtatggagtaccatggttcgaagctgtcaaatgaagatgaattgatcagtacttcaaagattttagtgtttacttactgaatgtgtgtcactaccctgttggagcgtgttcttcatttgtatggcgtgtccactcagttggtcagattagcttctactgttggagtgttttgttatttcctggctgatatgctttaatgtcccactgttgattttttttaccaatagccactccatctttacttctttactgcgtgtttgtagttcccaattcacttaaatcctcttctataagactggcttgtctacttccgatattttttgttgtcacatgcaacaggtctcaagattctcagcccatccttatttcttctgtgaaacagggaactcagggtagacttcattctacttgctggctacctgaagcttataccggttgagctagttcaggcatatccaaaatccattttgaatattcacccttcactactcccggca

SEQ ID NO: 18542 - DNA, 8425 bp, Oryza sativa
ccccactgctccccagcgacagagctcacagctgctgcccctccccacctctcaagctcaagctgccaactttttgtttcaataacccaatcaccgagcttgcgcccagtacattgctctgctttgctcagaatgggaaaggggaagaaagaagaggaatgtaaggatgacagggctgggttctgtgatgcttgttgcctcaaaagtcaaaacatgaggtttagtgaagcaaacatcataatctggggggtttgaatcttaaaaatatggcatgatattgcacctgttacaatgaaatctagaaaaactccctatggtaacatataaatctttctcacaaatgaaactccaaaccaagtagcatggattaactaaaagccgcttgctaccttacccacatcaaaatttcaccaatgcttccactaaaggaagtcacagttcaacatttagctggcattccatcttaacagcacaatgtgaacagtgataatgcaaatcaaaccaagcactagttttcctccctcagtgttatggcctggtggaagacacatgggctgtatgcagagccctgggccagagtgtggtaggccaatgaagaaaggtgcaccgatactggtgcagaggtttacaggagggatttagctgttcctcctggaatcattcttaggaataatccttattcaaatagtgaatctttttgtaacgaacatatggtagccaaataactatttgttatggacttatgggcgcaaggtctaggctcacaccatgtattgctcatgtggttactgtaacaccacggtgaattttaaattttagagatgacattacattagtatatcatctatttccatagtattggagagaggtttcttaggggtcaatttatcatatctgtggaaggatatgttggcatctcttttcattaaaaaatgaaacatcaataattagtctaacaatcagggagaagcctactagtggctacatgagagaaacacccctggtcttcagaccctaccccaagccctcaccactcatcaaggaaactccccccaagtcccttttcatttctcctttttaacatgtgctactcctggaaacccacactcaagccatctccttcagctcatgctgccacacagcagccccacatcgcaaacaataattcctcatcgtgatggaagaactatcatatgcaatcaaactatagctacatagtttcaccagcttcttaaatagataaatataaaataccactaaatacaagtgaaagagagtaacaagcaactccacagagtaaaaatacagtatgccatggtttctgatttaataatctcaaaggaattcatgaaaaagaaaacaaagcaaattttctgttttgaacacaaaaaaaactagatttgctccaggacactaaatttatggcatttgctctacgacactctagttttgtggatttactataggacactctagttttgtggctttgccaaaagactttcaagccattattttaatatatcatcttccaattaagagatagaactttgcaaaagatgattttagccttggaacaccttgcaaaattaaaatttgaacacatttggctgaactttaaaatattttgcaaaaatcaaaacttgttacaaataacagaaataaaaaaaaactaaacaactttttgtaaaaaaaaaaattagttttggataacttttaaattgtgcaaaatgtttatagttagccaaaatttgttcaaatttaaactttgcaaggtgtcccaagggtaaaatttgcagagttttatctcttcactggaagaggatatattaaaacaaaggcaaattttgcttaaggacatagtaacttcgtggttttagctccaggagacggtaaaagtcgatctttggtggaagatactctcaaacgttgttatttgctgttggacaccgtagtcattaaaatattaatttccggttgaataggagataaacaaaacgaaagatcaaaaatgcccctgagcccacttgtcatattatttctcttcctatctctcttcatcaagcagtggcacaaatgtcagggaccacctctcccatctctcttcggcaagcagcggcatagacgcacggtagtgcaagggggtagctgtggcgagcagaggagctggtggacgcatggcgagtggcagcacataagaggagttgtggcgtcgtcgccgcgggcagccgcacgatgagtggtgaactggtggtgcaggtggcagcgcaagggattttgtttgttcttctcagctttgccatggattggcacattactcatctctgcttgctttaattggattcgcctatacatgcttgcctctgagagaattaaatatgttttgctttagcatagtgagcagtgtgggggtgaagccgtgggggagatgcactcgacctatgggcggtgaccccagatccgtcacagtgacgtgttgtgctcatggacaatgttgtcgacgccactgcgagcaggatggtgccatcaccgaagcttcacctgccactggcattggaccccaatccctaccagaccctaccctgactcgactcgaagagggcagcggggtattgcaaatgggccaaacaaagaggaagaagaagaatataacaagtgggtccaggggcatttttgacctgtcacgttgtttatcactcctattcaatcaggaaataatattttagtgcgtgtagtatccagaagcaaataactacgttttgagagcgtcttcctccaaagatcaacttttatcgtgtcctggagctaaaaccacaaagtcaaggtgtcctacagcaaaatttgccctaaaataatggccagagtgtcttttggcaaaaaacaaaaaaactagtatctcctatagcaaaaccaaaactagagtatcctagagcaaatgccatgaatttagagtgtcctagagcaaatttttcccaaactttttattagaaaaaacataaatggcattctgttgacaagtcacatttaaaggcatttgaagaaaagacaaaaaatgtttgcagtggaccaagatgaaagaagcatcatgcacactccaaatgttttttacttaaatcgaagacctgccactaaagcaacctattatccaggtatcatagtaagaacaacagaaatgaatgcaagagcaaaaaatctaggttcacatttttcagctttataatatctaatatttaatacatctctatatacaccatcccctccatctgaaaataataagacctaacacttcccgtaaatctaatacaactctttggtcatcaaaaagataaatttacaaaattacacagtccgcataactaatagggaacaagacaattaaggctgtgttcttttgctgactttcccaactcaatcccatcgttttccgcgcgcacactttccaaattgctaaacggtgtgttttttgcaaaaaaaaaaaataaataaataaatctatacaaaagttgcttttaaaatcaaatcaatccatttttcaaatcaaaagttagctaataattaattgtgcgctaatgagtcactccgttttgcgtgtcgaatggattagttccccaactcactccaacgaacgtagcctaagattttattttacagaaccatagaccaagtgtaggattgtgaagaaattacaccccatcacatggaacaggttttgacaagacaagccatgtatcagtgtcatggcattccttcaaatgagctggcctgccttgtcagaatcccaacaaccacaatggatatggagttacttgacaactctgaggtaaacatataactctgagaaatgcaatgtcaagtatgcagtttgacaatacttttgccatccaaagtataaattgtaaactaagaattttctctcccctatgtacccttgagaattcgttcaatcccttatgtacccctgaattttgcctcatcccttatatacccctgagtcttcattttgatctcctctatgcccattccgttagttgaccgttaaatgtttttgaaattgtctatattagccctcacttatacttatgtgctagtttaatgataaaacacaattcttatatgaaaaaagaactatttgtaaataaactaagggaatataattatttgacaacaaattttaaaaataaatcaaaaaaaattaaataaattttaaattaacttttatgaaattcatacattgttttcatcaaaatttgaacccaacaaataaataattttggttcataatttctagctaaaactcttatatggattttgtccaaaaaaaataaatttgctcaacaatttatattttcatttcaataaataattatgctccatttgattttatcatgaattacaatttttcacattgtgaattatgaagtagagtagatagcatgtaactgtaagtatgggaaatgggtaatatggtcattttagaaaaatttaacagtcaactcacggtcaactaatggaatagggatagaggagatcaaaatgaaaactcaagggcatgtagggaattttctctaatattagagaaaatcagatggcgaaacttttcaggggcatgtagggaattttctcttaatactactagcagttactactgagtgcaggacttgaacaatagcaattgattaatcaattgtccctttgttttaaatatatgaaataattgttcggttgtctaagtatgaaataaataagtagttaaacgcttcaatcttttgataagttgttcccttctttgtattagttaacaaggagtaagaacgctagattgagtgaagtgttgggtagcacccctctaaaggtgtcctttagaagggctttggtgggggaaaaccttttagattggtataaggtagtggctaaggtggctttgataaagctcttgaacgacccagaccgattcagatggaaagcatgtggaaatagagcatttttcagtaaattccatgtacagatctttaatgtacaggaatgttgtgccaagaaagtcgataatctggaaactaagaattccaactaagattaagattttcttgtggtatattgagaaaggagtgatcctaactaaggacacgtgggtgctccgcagctcgggtgtgcatgaggctagtggtagtctggtggagcttggctgcttgggcacgacagccatagctgctctggtccgaatgggaggtgacacaaggtgacagcaggagaagatggaagagattagagcagatttggtgcttcacacggcactgtggcaaaggagggattaacttgactaggcatttttgcaaagcccacaaactttgtggtaaatataagtacgccctcaactgcattgcgaaggagcaatcttctcttatttaagaccataaaattatttaattggatcagatttacaccctatagttagggttagatgatcgtttcgataacaggaccaaactcatggttgttttgccatacaagaaaccaaattttgcccgtattagaaaattcagctactggacattccaaaataatggtctttgccacaagacaccacaaaaatgtgggtttgctggaagacactctgaaattacagttatttgctggtggatgctgctcacataatttattgtttttactcaagtgaggagagagaacacttgcaaaatgtctatttgcccttggaacatgtattattaatccctttttgctttacatagtggtgcggtgcctgggcccattttgaaaagctaaataaatagagaggggagaaacagattcgaactagatggagaaaacaaaaggtagtgacatcatttttcaaagtttctctctcctaatcatacattattttgattggagaagtgtccaccagcaaattaccacaaacttaagtgtgtcttttagcaaagccacattttccggtgtcttttggcaaagaccacaatttaagaatgtagcaaattttgcctttttctatgtggtccacctcaagaatgttttcatcaacatagttgacctgtttcatctatccgtttaattatgcgctctgtttttactcttttaatcctccatcatcttaccttaattcccaacagcaaataatcaatgttaatgtagccaacatgacaaaataaactggagttcgctcactgctaacaaaacctccaaaaccgccttaaggtttgtttggataagtagggatatctacaatctttaggactggaagagaaattatactgaaataaccaatctgaaaggagttaagaggctttcatattgccaaacaagttcttagggtgtaaactgatccaggtttgtgggcttagggtggtaacaggttttaaaattcaaggcataaaatggactatttgcagaaattacagagttaaaaagtgggcctatttcagtgacaaaaacattgatttaagttgaaagtttattatctacaatcaatcagcaatgtaaagtttgaaattcaaatagcacttctattttggaaggcttactatcaccctacattgtgcaagcatggcaagagtagtgctatatgaacaaaattcatgtaaaatactggtaaacagaactacatgaaatggttaaaggaggtatcttacttaaagataggttttggccaattctgcctgctgcattgctcattaagcttctgtttgcactccctaagctctccaatctcatcccccaatccgttgccaaccccagttgttaacacttgcttctttgcacctgcaagcttccttgttgcatcccgtgcagcattaagcttagcaattaccttctgctccgaggaaccaataccaactagctccccagcaacaaatacattgaccactgtcatcccacctttttgccatgtcttgaattgtgccatcttcccgtgtttctggcatagttcatgcaacatagtcacaggttgctcgtctattgtttctgctgtaataattggctcaaacagccaccttgtgacctaaatcatatacaacacagctattactatcaccaccagtaaatccatctactctatctatctccgtgtatgtgtatgtgatcataaatgttggcttagatatcatgcagttaaatttctccttttcctcaagggaccatcaaaatttcctaactgcacaattgtaggtacatcaatatgatattagtcatatgataaaaaaaataccagacgcttcccataaataaaattgtttatccaatcttttatgttatttgtattaacagtccaccttatttcttggaggccatgtaaccatgtgagtctctgaagaatgtaaagaattgttagcagtagtacaccataaagtaaaagctaagaaccttccagagcttctcaagatcaaatttgcaatcaacatagacagcagcagcaatggcctcaacaatatcagcgagcaccttgggagccttgacaacactaccaccataaggtacagtactaagatcatcctctggctcttgcttcactgtttcaataaactgacctacctgcattattagtagtatagccaattacagaagaatgataattaaaacattaagtccaatatctacctcataaaaatataatgtagatgtaatagcagaaaaacactaacagttcagagcacctattcaaaagcatttctatagtgtcaacaaacaattgatacaaaatgatgcaattcattcgaaaagattaaaatttgcatatcaaattcccgttatgaataagaggtcaaagacaatggaatttgagtcagcatttttttttcatttcaggtagaaaccaactgttgtccagaatcaacattgcttccttttaactacatagtcaagaataaagacatgggcttaatttcaaagttgagaggttgaactttgaactaccactacacctacggtgtccccttctctttttattgctcaaggagataaaacatccagttatagcagtatactaagcattggaatggacacaaaaaatcttctatggttttcacaggtttggaagaatagcacttagtacattcaaaagatatattaatgccattacttgcttctttttctttctataaatgctaaacaccaccaaattgcatataaacagtacaaaggaaggaaatttctaaaaccataagaaagagaatggcgtccatgtggtctaaagtttaagagaaacatatagtacatgaaaactggtcttgacgtttaaaatcaattccgagtgtcaagccgggagacaggaattaaaaattttccaatgggcgattgagcacaccagtttatcccttccttgatataaaccgtgaactcacttatgacgcaatggtctaagcaaagtgaaaggcacaaccatagcatttgtgtgaccacaatcttacttaccatg

SEQ ID NO: 18543 - DNA, 10239 bp, Oryza sativa
aatcaaaaatcgaaattgcatgattctccaataagagaagagatggattgtctcggcacgtacgaggagatcgaggcgggggcagttgcggcggagaagcgggtagaggtcgtggcgcacggcgacgcgcgcgagcttctcggtggagatgttggcggcgcggagcgtggagagcgggccggggccgagggtggggttggtgaggtagaggaagttggagaaggcgaggccgagcgccgagtccccgacgaactcgagccgctggtaggagacggcgtcgtcggcgaaggactggtgcgtgagcgcctcctccagcaggcgcccgtcgcggaactggtagcgcagcagccgctcgacgcgggccgccgcctccgcgcggtccgccacgaagcccggcgggggaagctccaccgggtccggcgccggcggcccgcgcttccgggaggcaggcttcatcgccggtggcggtgccatgccgtcgagcggtttagggtcttaggggttttgggacggcgtgaaatccggagaatttcaagtgctgatatataaaattttccgaaactgcgcagtttgctctcgggagattttcagatttttcgaaaatatttttgaaatttccaaaatgttattttgcctagtttctggaagtctccatgcggggaccgttcggattttctaaaaaacagtaataatgctgtgcaagacacgttttttactatgtactaatatctatatctatatctatatatattgttggcggtatggcatgacgccattcgaccaaacctgccaaaatcatgcgaagagtggggattcaagcccaagacgtcaaaattagttagggcgaagtccccccatagcgaagactatggaacaaggagaggcgaaggatgcagggcgaagagtatatgccgaagggagacgacttcgccatagcaagttcgccctcgcgaggaccgaagaagcctttccggcccatcaagcccaggggctattgggtcgacgatcgcccgacggcccatcaggggaccatgaaccacaattacactgtgtacccatgtaaatgtctctttctaagggcaaccatataaattctccctgtataaccaaaaccctagtagtaagaatctgtaatagtggctataaatagtcttgtagggtcatgtaatagggggatccgaagaaaaattctcaaattagtacagtttacttcttttccaaccactgttgagtaaccacgtctttcgacgaatgcggttgtcgtttcgacaacagctagcgccgaccgtggggatctccgagcgaaaccattgagagcgaatgctaccgaagaaggtcgtgaaggagaaggttacgaggcgaaaggaaagcgaagccagggagatatggccgccgaatagggagcagagccttcggcgcctgtcgccgaagatggaggagcgccatctgcttccgcacctacgccaccactactgccttcggcccctgccgcctctgcgcaggtgctgaacgcggctgacatggcgaaggcggctgcggcggcaagggcactccaaaccagagcagagatcctttcgacaagctaactgctggtgccctaagccgctccgtcgcagccggcagcggcctcaactgcgctcgccgcagtgcaagatcaagtcaatcctgaccccgaaacacaaaccgaaaccaacatggaagccatgcgacataacatgacacgactccaagacatgcttcgccaaatgcaagaacagcagcaagcatacaaggcggcaaggcggtccaaggtcacttcggccccaatcctacagtattcggcaggctatgtcccaccccaagtctatccacaagcaccgacctagccccttcctccaccagttgcacaagcgccaatgtacttcgccggacagccttcgaccgcagcagtgcatccggcccctcacgtgcaactgcaagctcaaccggtcgctacccaagtacatcctcaaccgcctggccaagtgccacaaacaatggcagaaggggcttcggctctgcaggcgcagctccaagctttccttcagcaacccagccaaccccacagcatttcaggtacagccccttcggcccacccggaggggaatacaagtcaaggtgcgcctagttggttgccgtcgaatcagccaggtctgggggcttcaccgtggagtcaaggaccgcagttcgacttcatcaatgcagctcaagcaccagccgttcggccgcaagcaccaacgccaggcttcggattaaaccaagcaccaaactaggtcgccatgacatggtcacaaccaacgttcgacccagccatggcagctcagctagcatcaccaatcggagccgggcagccgaatgccatggcccaacctcacgcgcaagccgtgatttcgcccttcgccacgccgtacccacagcaaggtgccgtgaacagggcagggggtgaaaaggggctaccctgagggcccctttgaatcgtaggaatgaaaaaacagaggaataggaaaaacacagaattctgataggaatacaattgtaaaacagagaattgcaaaacacaggaaaaacacaggaatggccgtttgattggaccacaggaaaaacgcaggaatcagatgagagagatagactcagaggaaatgttccaagaggttagacctcttgctaactttcctccaaaatgtgcataggattacccattccataggaattttaaaggattggataggattcaatcctttgtctcaaaggccttcataggatttttttccataggattgaaatcctccaaaattcctacatttttcctacaaatcaaaggggccctgagtgtgggaatcaagacccatccaatcccgccccagttcaagttcccgcccatcccatgctactcaagcgaaactaacccaaaggaattcctctccatttatgagtccgcgatcgaagcggctcacggcgacgaaaataccaagacaaagataatacatctcgctctagacggcatcgcccgttcttggtatttcaatttgccagccaattgcatttactcatgggagcaattgcgcgacgtctttgttcttaactttcgaggcacctatgaggagccaaagacgcagcaatatctactcggcattcaccagaggccgggggagtcgataagagagtacatgcttcgcttctcgcaagctcggtgccaagtgcaagacataaccgaggcgtctgtcataaacgtcgcttcggccgggctacttaagggcgaactcacaagaaaaatcgccaacaaggagacacagacgcttgagcatttacttcgcatcattgacgggtttgcaaggggcgaagacgattccaagcggcgccaagcaatacaagctgagtacgataaggcttccgtcgccgccgcccaagcccaagcacaatctcaggttgccgaaccaccttctctcgctgttcgccaaggggccgacatgttccgacccaacgaaaagcacacgaagtgacaatgcaaaaatagcgaaaaggaaataaaacgcacctttattgattttgaataaaaatgtatcgaagaatacaaacccgtcacaatggtacaagtgaaaagaaaagagcaatggcgttacagcctagcttacagataaattacatcttcgcccctgcgatcattctttctcactaaggaatgatcaggcgaactaggttcgtcatcgctactaatatcatacacaaccataagaggagaagggggcaaaacacagactagactgtaacgacgttgggagatcgcctcctgccgatcagtcttccgatagtttcgccaaaagcgagccatatcctccaaacgtcttgaatgaacaagatcttagtcttctaaggttcgcccggggtgcgcccacagccacccggcaaccttaaaaaccttatagctgcggccgtttatcaccatttcgcgataaacaggccgaaatgggcatcgcaccttcggcaaatccttcagtgccacaaatttctcgttttggcttcgccaactcccagaagggggccgaatgcacaactttcggcgaacaccttgacagacagtgcaaaaagggcaaaagacgattttcatagtaagaataggcgaaaaaaagagaaagtattgcataatgtgaaatgggcgtaatcataatacgccaaagacttcaaccacaaaaaaaaggtggctaaaagtgagtcgtacattccaaatatccaaggggccctttttcggctacaataaggggggttagcggtggcttgccgaatatacatcgttcgccactcccggcaaacacaaaagaagaagggaaactacaaaaatctaaggaaagggcagagagcctcacacctctgggtgatcctgggcatcgcctccacccgcttcagctgccgcgtcctcttcttcgcaccggtctgccgtctctgccttcgccagttgctccaaaaggcgcgccttggcagtggaccggccgtccttctgccagaactgttttcgccacgcgcgaagagcgggcgaaatgttctgcgcactgatctcccaatcccccttcgcatagttagggaactcgtcgacgtgctcgcagtcgaactgttgcataaggcccatggtaaaggccgccgatacgcgcgcacaacaatcaccgtacgcagtggcgcagtccgaaacagaaccaccagcctgttgggtccactcggagaagtcgaaggccgaggcatcttcgacagggatccctcgcacctttgcacccatgtcagtaagggcgaggcggagagtttggcacgccgttctcgcggattcggtggttttcgccatctcccgcaaaaaccgctgcgactcctccacagcgctcgcttcagccttgctgaccttcaggcgaagagcctccatcttcggctcagtgaggttataataatcggtcagcacggcggaatgagccttttctttctccagctcggccttgaggcgatcaacctcagccctcgcctcttttcctttctccaactcggattagagctgcttgttttcggctttcgcctctttcaaggtgttggcgagggcttccatctccaagttcttgcggcctattttgtcgtccttggcccgaagacggttcttaaatccgtcaagacaggcccgcaaggatctggatgcaagataggagcaggcggagagaccaaatgttagttatgggacatgaaaaaaaagaagaggaaaatcaagaagagagaaaaagcataccagaaccgccaagcttttaatagcagaacaccactcatcgaactcattcaattcggtgaataggctcagggtgctggcaggtaaggcaagattgcttactccctcgacaaagggaataaggtctgcccgggtctcgaaatcgctaggggcgaagtggggcgccgcaagggaatattccgaggtagaagttttgacggccgcacccttccccttcgcattgactagcggtgaaataactggctgacgtcgagggctaccgaagaccctcgccgcagctgtcacgatacgctctgcggaggctgaagccccggcggcggcgctaccgcctgccccatcagcgccgagtgaaagaatgggggtggtcgaaaggtccaggctgcggccagcgggcgaagtcggagtctcgtcagaggactcgtcgtcgctgaaaatgcgagcggcatcgacgagtcctttctttttggagatctttttgaccggacctcccttcgctgccttgcctgccgaaaacgcaactagcagcttcgccccctccaaatcctttcgacaaaggggggagctgttcgactccaccccggtctcgttgtgacctggacttggagtaagagtatagccaggggtgtcgacgcggttttcaacagcctcatccgcggccttttcggccatgacctccgcccctcttcttcctctccttcctcctcaccgtcacgctcttcgacatcgtcctcgtcatcggcgtcggaatcggaggaagcaggaacccttcgcttcctaggtgcaagcttcacttgtccgcgtgttcgctttctcgaaggccctgcatcgtcgtcggctttgtgggggttcgctcggggaggcaattcgccgttgtaaacccggttcgcccggccagctgcttgtcgtgtcagcaactggctatactcgacgactgacatgtcgccgatcatcctgcgggcttcggcgtcagcctggtcgagggtcaacactgcaaaaataaagggtgtagcttcattaagcgtcgaacaaaacaaaataacaaagcgcaggagtgcatagcgaaagagcagtcttaccgttcgttccctcagggataaccaactcagcaaaccgtcaacctcttcgccatgatcaactgcgacttgccatgactaggagaggggaaagatgcgaagcatgcagaattcctccaccaagtcgcgacagctaaggcgagagcaaaccttacgcagcagagcgaaccgcgcctccatagcgccgcccacggcgatcttgggttttcggttcggcgcaatcgccctgcgccggcaccggagggccttcactgagtcagaaccagccttgaaggggatggtgtggcaaaaccaccacgccatccaatggcggtcccacttcgacatggcggcgttcaccggtcagaggtcggaccgctcggtgcgaacattaaagttcacactcccaaacactgttttcttcgttccagccgggataatcaccgtctttgaattcacggtggtgaaaaatatggcaccgaagagttcggcactaggctcaaacccggaagtccggcacgcccagtcgaagatagcgatccggaccagcgccgacgggctcaactgtgggagctccacctagaaaaggcgaaggatctccggcaacaacgcgttgcacagaaactggagccccgcctcaaaaaacacggcgaacaccactgtccagttgtcgacaggcttcggcacaacagctttccccggggcgaaagcctgcccttcgactaacgccccaaagctaaccaactttgccaactcgccgtcgtctatgagtgaaatccctaagtaggcggtggtgtcgtcgtcaatccggccggggtcgggccctttcgccgaagaagggttaggcttgcggggagccatgacgaaggatatatgcagtgacgaaggatatatgcagtggcgaagggtgtgtgcagtggcgaacgaagggggcgagcgaagggtctaaagggccaaggggtgccataaaagcaagaacggaggaagagcgcgtgagcggtgaaagtgacaagtctggtggtgaaaagggaacggggggagaatatatagaccacccaggcgacgtttcgcctacccacaagtaataaagcgccacgtgtcgcgagggtaggcgaaacggtagattcccatcgaccgagttgcacagtaaaaagcccacaaagggagggcccattactattcctttcggcccgggaaaaataaaaataatataccaccgtccgcaggaggcgaagagcggcaaaacaataccagccgcacagacaacaaactctatttgcaggaacaatgtagatttcggcaggagcatcggtcgaaagggggcgccacataccataccacatgatttgcacggtctcggccgaagctccaatctcacccttgcccatgaggggcttgttggcggtatggcatgacgcccttcgaccaaacctgccgaaaccatgcgaaaagtggggattcaagcccgagacgtcaaggttagtcagggcgaagtccccccaaagcgaagactatggaacaaggagaggcgaaggatgcagggcgaagagtatatgccgaagggagacgacttcgccatagcaagttcgccctcgcgaggaccgaagaagcctttccggcccatcaagcccaggggctattaggccgacgatcgcccgatggcccatcaggggcccatgaaccacaattacactgtgtacccatgtaaatgtccctttctaagggcaaccatgtaaattcccccgtataaccaaaaccctagtagtaagaatctgtaatggcggctataaatagtctcatagggtcatgtaatagggggatcggaagaaatattctcaaattagtacactttacttcttttccaaccactgttgagtgaccacgtctttcgacgaatgtggttgtcgtttcgacaatatatatatatatatatacatatgtatatatatatatatacatatgtatacatatgtatatatatatatatacttatatatatatatatatatatatatatatatatatatatatatatatatatgtatatatatatatatatatgtatatatatatatatatatgtatatatatatatatgtatatatatatatatatatatatatatatatatgtatatatatttatgtatatatgtatatatatgtatatatgtatatatatgtatgtatatatatatatatatatatatatatctttatctttatctctactacttaaaaaataagagatgtttccatcgtccgtcaaaaaaaccagacgaaaaaaaccgagtgaaaaaaaccggaataagaaaagaaaaaacaaacataaaaaaacgcaaaaaaacaaatatgtctgataaaaaaacccaggcaaaaaaaactcttaaaaaataagaggtgtttccatcgtccatcaaaaaaaccggacgaaaaaaagggaaaaagaaaagaaaaaccaaaagataaaaaaacaggcaaaaaaaagaaaaaaagaaatatgtccgataataaaacccgggccaaaaaaaaccagaaaaagaaaagaaaaaccaaatctgtccgatccaaaaaaaaaaggcgaaaataagggaaaagaaaaatgaatccgactccgtcaacgcggtaaaaaaaaggcaaaaaaaaattaaaaaaaaatctctccgattctctatctctatctctatctctatctctttttttaaaaaaaaatagatgcttccttcatccgtaaaaaaagatagcgaaaaaaataaaataaaaaagtccaactcatatatccgattccctcttacaaacaaaaaaaaaagtccaactctagattggtgaaaaaaattgatgcgccggattgaagatctgtttgcaaaaacagaacctccaggtcgacgagagcattccatttttatatgtttttaatttttgagtttgtacttttgcatttgagtccctgtaatttttatatttacatttgagtccctaaaatcttgcaataaggtatttgaggttgtttttgttaaaaaaataatataagagagagaacaaaggcagaaaggtgcataaaaagaaaaagaaaagccgcacaaaaaagaaaataaagaaaaacaacaacaacaaaagtctttttcccctaagtggtgaaaaaaaatgtagatccgaacggaaaaaaaaatctgattcatataaaaggcaaaaaaaaagtgatgaaaaaaaaaggctagatccgattcctttaaaaacggaaaaaaagtctgattcctataaaggcgaaaaaaatctgaaaaaacatctaaaaaagttcgtccgattccttaagaaagtggtgaaacaaaatccgatttctaactgtcgacgtttgatgtcgcgattccggtatttgcatagtatggggatcactggtactaggatatatgtgagactgaggtaaaagagacggaggcgaggatttttataccctacatcctgttggccgaaaccggtcgttgctcttattcatcataatcacaccagtacaatatttggggtagcctatctaactgttgtcgacatgacggttcgaaggtctgactcgtagtcgacagcagggtagccttcctcctcgaatgtgtgcccggcgagatcaaagataacgctttcgtctctcctgacagtatccggagacaccgtaggggactagccatgcttatccctgaagtcgatatccgacggcttgtcttggcgtatattggcttgtatgttgatcttctgtcttgatctattgttccgtatcttctatggttgtggtgggtgtgtcccctttcctcctagggggccttgtatttatactcataggtatccccttgtccaagtagaactagggaaaccaatatggatagaatccgagtagtccttgtcgtttcatgtagaactctagttgtctttc

SEQ ID NO: 18544 - DNA, 11750 bp, Oryza sativa
tacatacatacactttagtcaatattatctactatataattatatagccaataaccccttacgtgatacttaggcactgagaacccgctgttcccagatgtcgctctactacatacccggacatggaggacttaagtactcttaagggctgtcaccacctctatatccacctcaaacataatgtgggatacgcaacaattactgaatattaattacctaaacaccacgtctaatcaattaataataactattatagtatttataactcactaaagtaatcactatattttagttgattatagtgaacaataatcgcgtatgctgattaggaactaaccaagaggtaattctcacaagtaaatctaaattactcagaaagatatttctattgaaaacagagtaattaacagaataaaagaaatatgacataattaccgacaactatggaattcctccgacttcttctactctactctcttcatctcttcatatttctagtatacaaagtggtacaatatagcctcttataattcagctcaagcttggaagtgtgtgttgagagtgaaggagtggagctcttaaataggcaggtaatgatggttgtggaacgggaaatgtccgaagtgccctccaaccgccatcaggaatgcatctgggatgtccatgccaaaccacaggatcaacggtggagatcctggttcggccaaacctgggctagcccacttggcccccagctttggccggtggtctcctcctgttctgccacatctaattctatgagttttgggctgattttttgggagtttaagagcccattcttgaatggatggattccctcttcactttaatctgaatttcctcccaacttcggtggtctatgacctgcatcaaataaacaccaacatttgtagaatattttaaaaataaaccctatcactatgttggttgttttattatctaagttttatgtagatgttggcggtataaaatttgcatttaacagctgccaacaaaacccccacacttagctctttactcatccctaagtaaaggttaagaataaggctccgtttgacagcggcagttcggaacctggggttggggtagggaaccagtggcactgttcatataccgtagcacatactgtagattgatgtgaggacgcacgcacgtgacggcaccgtttcgaccactgacaatttctgtcaaacgcatcgtgagacattgccgtcgtgaggagtcctgctcggactctgagatgggaaaaaaaatcagcttgtgcaagccgtcatgtggcagtagtttagggtgatattttgttacacgttttgaagaaaaaaacatatgagcagtaatattggaaaattaaaatagagcatcagcttgtgcaaggcttttttaacgttcgtcgatctggtaaataaattgaaaaatatttggtgattatatttgactacattttttacatctttccactatgcttatttattttatatggcacgtgtaagcatgtttattaaatttgtacaaggcacatgtatttcatttttattgtgaaccgggaattattatagttcaaccgggtaactctttttgtatttgaatggccacatatttcttttagttgttcaatttaattaattcattccggacacatgccaaatcgctttcaacatattccgataacacgtgggaaaaaacatagcacataatggagatgactcagttgaaacatgattgtacataaacagataacgataaaagaaatacaaacactctaatttaataaataacagatactggtctgaatggagatgacatgcgcggctcatatcacctaccgatagtgattgtagacagcatcagcaatgcagtcacgcaatgcgctcatagcttgctcgctatttgttgcgtagtacatatgaatgaagtatggatgctcctgtacaatgggattaccgttgtacagaggatgattatgccggtagttcacatcgcgactatccttcttgaaattgtgtaaagcaaaagctgcttgtatgatgcgtgtgtgaactagatcgtcgtcgttttgtggtatttctttgaggattttccattgttttttaatgatcccaaatgttgtttcaataatacttcacaatgaggagtgtcgatggttaaatgtctcttcctgtccaactggttgcggtgcacggactccaccaagaacatccctgtggtaccgtacatgtgggtacggtgtcaaaaaacccattctactaggaaatccatagtccgcaagtaaatactttcctgcaaaacatatgataaacatgatcgcataaatgctcaattattaggagtggaaataaatgctctcttatttcaaaattttggatactcactttgcgataacctggggaaattgtctagataatattgtattgcttgattcaaaaccctttgatcgtgcactgagcctggccatccagcatcaaggaacataactcgaccgtcgtgatcacatacaactagaacatttctcgtcgtcaagtggtgtcggttcctgttgtcgatagatgtggctactgatgccacgatggacacatgcgtgccatccacagcaccaactgactcatagaatggtcagaatttgttcccttcaagcagcctaggatgagtgtacgtgaagttgggatcaacaggcttcaatatattcctagacaacgcgtgcatagtgttcaacactcggttaaaatagagcgagactgttgagctcgagcggacccaccggttgttggtgtctctgtttggacgatttcctgccatatatacaagaacatcccaagtgcctcaataccacatacctcccatgatccgtgaaggtggtatttactactcaggagatcatgtaaactatgtatctgctcagccttcaatcggaacatggccttgcattgcctcggattcgccatcgtctccagcatccaactaataccagtctgaaccggaactcgtcgtgcagctctctgattgagctcaagactgcaggctagcacgttgattatggcatcatcctcctcgctccaatcttgctctcctgtgccgtgtgaattccaatcatcgttactcatcgccgttggccttattatcaacagcaaagattacaatacattgaagcatgcacaaatattatattaaatcaaacatatttaattacctagaaaattgtatttaattcatacaaagttaatagtagcacatactcacgtgcactcactacttacgaaatggtagcatgcaaagttgaacttactgaacacatgcttatttaaagtaaacactcaacatgcaacattattacactcaacacattgaaattaaatgtccactgccatgagcactacatgccacacctaacgaaccaagtcctggagcactagaaccagcaccaccatgccaacctccaaacccagttgtgccctgtgaccatggtaccgctggcaacgattgggccatcatcaagatgtacacagaacgagcttcagcggtcgggagtttcatgaagcacgagcagtagtgcggataggtgaacactcgaaccgcagcgtgccaaaccggtccgggaacagggtgaccatcagcttccaccaactccatgcaagcctctgaacctttagacttcgcctcaaccttcgccctagccaggcgctccatcgactccatccatagtgatacaagcctttcaagggcttccccggcggagttgccgcgggacttctttgaacacccctctgaggcagcagtagaagtggcagccctttttcccttacccctcactgcactcgctggtgcggacggaggtggcaatggtggactgtacgctgctgtgagctgagcaatgtcaatggtttctcactgctgttgatcctgtgtaggggctggtactgctccggcgacatcggagtggttcccaacaacagtgcatcctttaaaaaccgcgtggtaagaatcaatgtattttagaggatcatttctaaagcaggcaacgcctttatacacctgccaaaattaatcaagtatgggctgtacattagaggtgttccgaaacatattaccaaaaaataaaaggcaaagtaaagtatatgttgtgatgcatttgtaaaatcagtaatcagtattcaaaataaaacaagaaaattaaattgaactattggcacagtcgttgtgatgctccaatctttgtgtgtgataatggtggatctgctctaatggtcatcttgatgacataagtaatctgaacaaaaactaatcttctacttatcgtatagacacataaatttatatcgtactagttgcacatactgttgtgaagccaaaactagtaataggattcattgtttactgaatctgagatgctcttgttcatattctaatggatgcaaatgcaaaacacaagaaaccaattatgctagcgcttactacaacctaatgacataaggaatacaactagttttcacccaggcttacttaatctgacatgatactaaggtaccagcaaagggaatcttttcacccaggtttttaaaacaagtgccattcagaatccatcaatttagcactactaatatttagctctggttatccattgcttgaaaatttatgtgtcactttctatcttatacaaggataactatcaactatgaatcacagaacatgacgctggccttgatcctttctaccaaattgcttgattggtttctggattggtttaacatacatagataaagccctcttctaatatttcataactgctgcagttcataaaaaatggaactattggcacacatatgtgttggcattagtatgaattacggagaagttatgctatttgttgcattatgaaaaaatgttcaagaagtcacatactacgttttttgatttccaccagtaggcgtcggcaacaatggccgatgttaccggatcacgaccgaggccagtagcctgtccttccagccacacccacatgttcaaccgcttgcgacactcgccccaaaaatacttaacttgatccccggttacccctttgcggcacttctcatacattttcttggccaagttgtcgtaagcctaggccttgggggtgttgaaggtgatggcgtaagcttgaatctcctccaagcagctttaaggaacacgcgtgtctccaaatcggtctagcgggatcgggggacagacatctaccaatcgaaggaaatgaaaattgatgcaacaaaaacataagcaacaagctagcattaccttggtggaatcaccgtcgcggacgatgtcccaattcagcgaacgaacggcggttgcagggctcactcggcaaacgaaatcgatgaccgcttctggagatttggcgcacaccatggttagggcattggcagcatttaggacatcgtcgtcgcaaccttggcggtgctggcgttggaggtgttggagtcgcaagaatcctcacccgactccagcttgtgtgcccggatacagggtgggaggtgtatccaaggggattgaacacgagccggagaggatgggatggccaacagctcgcgctctcgcttccgcttcttcccccttgtctccatcggcgcacccacaggctcggcctcaaatagagggcagctgagcacaccaccagctttgcctccttcttgcaacgaatctcgccacttctgtgccacacgggatgtacgaccacgcgcgccaaggacgatgcgtgcagcgagcacgccggccagcttgtaccatcttggaggatgacgcgacagatcaagagcactatgcactgctccgatgcagctcgaccgaatcgaaggaggacacgacgcttccggcagctttaggcatgcagctacttggaagagtacccgctctagccctagggaagattcgtttgggggcaggaggggttgcaggcgaggggaatcgattcctgccgccttggattcctctgctcacctcgacgaccgccgattcagggggaggaagaaaggggatcgaagggagtcgagagactggttgggggtggcgttctctcggatgaaaaacgcgaggtagggggtgatggatattgacggaaatcgtgggcctccaaaacggcaacgtgggaaacagttttcggtcgaaacagtgccgtcacgtgcatgcgtcctcacgtcaatctacagtacatgaacagtgccactagttcccaaccccaaccccaggttcccaactgccgctgttgaacggagcctaactgtagaatgaaatcttccaagatataattcgagcacataaattattcaaaactatacctgtacctgtgaactttagcaatggctaacttaccatcttgggtaattgataaatggaactgtcttgattcctgtccttcttactccttctatcagactcctggggtttttataaatttttgcaatagcacaaagatttaactcatctagttaaatcttgggtaatcggtagagttccccaagtcctcaatagtagtaggtgcacaaagatttaaaacattaagaacagctcgacggtgctattgggaagaagaggcgcgaggagtgcaagatggttgggccgggccggcagggtggtcgaaccgacggtagaccatagagcttggacatttagcagtggtggagccagcggcatccttaagcccgggcgactaataatgttttccgataatcgattatttttataggtgtcgatggctattggtagtggagacggcaacgatggagcctgggcggtcgcctgacctgcccaggtggttcaacagacggatggttattgcaggaacttgtggatgggtccaagagaaggacaagaaggttctacggtttggatagttcacaaatgtgaagggcgagtagactggtgacgacaggttagccaggtcgcttataaaattatctggcggagacatgatatatcagggacttgacgaggagttgagatatatgaagttagaccagaactgaagaaatgatcctggaccacagtgggggaaatcgttgagggtgtcaagaatttgcaaggtctgcatgatggggatatatagaatctgcgtcactgaagaggaagagcaagcgctatggtggtgttactgtgaaaacacgacagcttgggagatctgcttaactccagtataagtccaaggcttgcctcgagttctaatagcgtgccagctagtttgatcatgcaatcagcaaggaaacaacaagcaggattagtcagccgatagccgatcggccaaaaggccgatagcgtatatttagtagtcttagctgatggagttagactgaattggctatgggctggatagatcagagaatataaaaccttaaatatgccctatcggctgtaatactgtctagcaagattaataaaggaatttaagacaatattatgaaaagagctgatataacaatattcaaagcataaaagataatgtccagctaatactcttgtacagatctatataggcaaatcaatctataataatatatcaagtagagatcaatagtcaatattgatagcccagccgatatgacctaaacttgagatattactattaagtgatccgtctatatagatggcaaatatacatggaacagataaggaaacatgcatattaggtaagttcggctgaaaccccgatattgcccatattattagtcaaaataggctagatattatggttctaaacacgacttagtaagttgaatgtacttatgcaacactaagtatgaaaaaaacacaatatctagacaatcaagccgttgactaacttttcagggtggtggatgtctaaactaatctaatctagcaagaggatttagccgatgccggtagaaaccataaagggagaagcaaccgatagagctaaatcgatatgctgagactagattaacagaatgatagcaattgtcatgaaacaaggactaaaatatctaaaatgacataatagccccgatagcacaagctatcgagacgggttacctctgcaaagagaactcaccgaaaaaacaagtaaaagaaaagggtggcgatacgccgaaattaaattggagttcgtcctctattacaatgctatgggattcatatttataccctgagtacaaacttagtccattatggacacgactcaaaccttcctaaagctaagatatgaacaagaccatatacagcggtctcttaccaaaactatcaaaaccgacatattaatatataccattgccttaattgagctttatctctgattggcaatgacggttagtccaatctaggcccatgccgatcccaaataataccatatcggctgcatcggccatcagccttatcaaccctgatcatcatcaacttatgtattccagccgatacgatctccaaccgatgcgcgaatccgactctgagtccaattcgattcaacaccaaatttgtttcaatcttcttccttcttctccgtatctgatgccaaattccgctgttaacaggtggtaacttctttaggtgattcaagacaacagtgattttttcaaagtatcatggggttcagtcaacagatgcgaaaagcgtggatgttggatttattagctcggttcataagatgataaggaagaaagggttctcttcatgtctgatgagtttgatttgttatttggtaatgacgcgagttatctggccatgaattagataaaatcaaatttaagacaagagatgaaggtgaacatggttttcgaggagtctgtgatacgacagctaaggaggagttcaatttcgcttggtaagacgactatgaagataggagcgaaggtggagcattgttacaggtggagtccagaggaagaagttacatggatgaagttacatggataacagagtctctgatgagatggtgagtctggtgtaggctcgtcgggcggcttgtggtgaagctgcaaaagaagacaacccaagtctgaaggacaagtggatcggtaaggtgattctattacttctgggtggcgtatattcgccaaggtggagtttgttagaataggtgtcgaatatactagttctatttggttacagttgaacttagagttgtaataggtgataagggggtggagttagagtcggactctgtaacccggcaactcttttaaatagagagggggcaccacaatgtaactatagcgactacaatgtagcatagacacgcaaggagatgatcacaacgaggccatggactcagtagcggccaggagctatatattggttagagaggaacgcccataatcagagccccatggatataggcttcagctgaaccttgttaataaatatcgtgtgttcctatgtcgtcatctggcatatcttgggtgattaatgactgaagagatcaagaagtttaatcatcgttccggttccgctatatcgactagctttttaacagactcgaagtatcaaatgtttaggtcaagacttttaatattgtgcaggacaagtctaggtcgttttgcagtgcacaatttaattggcctgagttaggccatgtgtaattcagcgtagtagtcagttttgttcagaagctcatcattttggctgaagtttcctcctctttaatgagagaggggccagccatggtagaccgtcggacaatataaataaatcaactctttgttagagttcaaactttatctaaaataaataaacttaccttcttattgcccttcatccaataatcgagaaattttatcaacttaataatctatccaccaactaatactatttttctattaatatgagatattttagtcatttcaactcaactaaatatgcattagtacgttagtacttacgagttgattttttacgtgacaggaagtggtacaccctatggcacaacattgtgggtatcctcccgcatgtatagctgggccgcacatgctcttctgcctgggccatggatgtggacctgcatgtagctaggccatgggtgtgtggacctttgcccccgctaccgctagcatgacaaatttaaaacgagtgtactcactgtcgtatgctatctgtatcactgtaataaaacgagtaaaattatcaaagttttatcttagatcatctttcgaactagttaattttactctcttatactttggaccaactcaattcccttatctatccatatctagccacttcttcgataatgatatggctttgggcatggttgagggagtttaccttgtttggtttttactttgttgaggatactttattctattatcttaaaaaatggtcgagggagttcatcaacgcaatggaccacttaagaggtctacatgggaaaaaatcgatttttctatatgggcgtcttatgtagccgtatgcgaaaatacctcttgattttttccagacgtgacaagtcatggtccttttgcaacctatcgagggtctcgctcacaaaaatcgtttcggtttgtcaagtcattagagttccaataccattggcattgagctctatactgaactaaaacaaagcgtaggccttttataacaacatggaacgtataagttcaactccccaatctgcatctttttttagttttttttcccaatgattgcttactcttttttgttcctttcaaaattgtcatgtcatgtttgttaatttgttttattttagatttgaaaaaaggtgaaacgaagaataatatattatttaaaatttgtgttcttttcatattaaaagatgtatattatgtgctcttttaaaattttcatcaaggaaagaagcatattaaaaatgtgacatctttaaagggttttttccctcgtgactacttactctctcctttttcttcacaaaagcacgtaccttgtttgtaataatttgttttcttttcaatttgataaaataaactgaaaatgaaagtatgttatatgttttttggtcaaaattatgttcttttcgtatcaaaagaagtatattatatatgaaaaaaaagtatattgtatttttcatctgaaaagaacataaaaatacgaaaaacacatatattatacttcttttcacatcttttccaaattcaaaaaagaaacaattttacaaacaagacatgtcaataaaaggtatcagcagagtaagtagtcaagagagagagaaacggtgcattttttgaaaaaactttctatagaaaagttattttaaaaaatcatattaatctatttttcaagtttaaaataattaatacttaattaatcacgtttgcatattgcgtatcttctcaatcttctctattctcctcttctcaaacacaaaatgatgcaatgactaggacttgaacccaacactcagactcaggatgtgttgggttcaaactgtgacaagtcctacactcaggttgattaaacttgtataatctttgacatggcaaactgtcacaaggtgtggccggtaaatgacttgtggtttttgaatctcctaaagatgaaagatgaagataaagattaagtgtttcacacaaaatgaggtggtaataacgtgtgattaatctgatattttaataattacaaacttgaaaaatggattaatctgatattttagaataacttttatatagaaagttttcgcacgaaacgcaccatttaacagtttgaaaagcgtaccacgagtatcttaaaagtttatctaacttttgttggaaaaaagaacagggccttagtagtaaatgcatacg

SEQ ID NO: 18545 - DNA, 5485 bp, Oryza sativa
ccggccggcgccttggcaagacctaaggtgcagcctgaaatgtctctatatatgtacctcactcctcaggaatgggtattatatttgcatacacgcactcggcacttttagttggagatggagaaggtgccagcaaccaagagagaggcgaaactgtgcgtggtacttgccgcgttgctgctgctgctgggcgcccccggcgtagcaacggcagatgctgtagccacatcggggagtggccgtggcggctgcacgcggagcagcggcaacatcagcatcgagtacccgttcggcatggagcccggctgctactacgtggtcggcttcaacctcacctgcgacactcgtaccacccacccaggctgttcctcggtgggtgctcgatatctccatccccaatggaacagtgcgcatcaacagcatcagaatgaggcgcctcgagaataatggccgtggcgcgaatcggacatggggtggcggcctcccaaaggcgggccattcttcctgtcggagtcggagagcagcctagtgttgatgggttgcgactcccaggtccttgtccgggagctgggaggggacaacacattggttgcctcttgtagtgccatctgcctattgtcatggccctcacaacaggaggacgcttcttaggaatttcagggaaaggtgcatgctcgagcattggttgttgtcaaataaacatcgttttaggctactcgtcctatctcatccagattcacgggatggatcaattggggatggatctgcttgcggatatctacatggtcgaccaaggattcaactatactaccgatacattctattctaattccaccgagtatcctcctcgagcattgccagccttgctgaagtgggtaatcattactctgacaagtaattgtcctagaaatttatctgccccaagtgtcgcagtgcccatagctcttgccaagacacggatgctaaggcacgggggtatcgatgcgagtgctcttatggttatcaaggcaatccatacatcatgtatgatggatgcataggtatttacattgtatatgttatgaacataggtccttaattaaactttgcattcacatggatcattgatttatataagaatcatattgaaaatcatgtgcagtcaaccatcaagtgattttatttttcatacatacttttacacaaatgaactatcagatttataggccttgtttagtttccaattttttttcaaaaacgtcacattgaatctttagacacatgcatagagcattattaaatatagatgaaaaagaaactaattgcacagttatgatggaaattacgagacgaatcttttgagcctaattagtccatgattagccataagtgctacagtaacctacatgtgctaatgacagattaattaggctcaaaagattcatctcgcggtttccagacgagttatgaaattatttttttcattcgtgtctgaaaaccctttctgacatccaatcaaacatccgatgtgacacccaaaaattttcttttcgcgaactaaacaaggccacaattaccaacatacaaaagaaatttctagaagtgaccgatgatgccagaagtggtcccatatacgtggatattttttaaaaaagggtaaattttgggcatttccttacatattttcttcaaagtatggttctatgatcgttttgcaaagatacctatagttctaatcacaattatattttccatcctagacttcttcattatctaaaaagaagatttttcccctctactgaccattacaattttgcatgtctagatatcgatgagtgtaattctcccaatatatagccatgtttcggcgaatgcaataacacacaaggaggatataactattggtgcctagatggcttaaagagcaacgctactcagccaaaaggatgcgatggtatgtagataattatatgagtgtttcaacttaacgacatgtataacaaaacaagtacttgcttagattgatacataatcgactatactagctaatcggtaaccctaatatattcgcacaaacaatttattttacatacttttgcacccacttttatttaaaagttttataaatttgttttaagcactcaagaacaaaacaatttaatttattaatagttcaaaaaaattaaaatttatatttttaaaattttatatataatccacactaccagagaaccgcacaactagataatttatcccttgatttctcaacattgttttagatctccttcctaggtgtgtaccttcaggtgtaagttttattgtttgtgtagacattgatgagtgtgcggtaacatgtagccacatcaaggagtggccgtggcggctgcatgaggagttgcggcaacatcagcatcgagtacccgttcggcgtggagcccggctgctaccatgcagtcggtttcaacctgacctgcaaccactcgtaccagctgcccaggctgttcctcgacgatggcacggtgcaggtgctcaacatctccatccccaatggaaccgtgcgaatcaacagcggccgaatcaatctcgaggacaatggccttggaagcacaaacgggacatgggggcggtggccccccaattggcgggccgttctttctgtcggagtcggagagcagactggtgttgatgggctgcaactcctaggtcgttgtctgggagctaagaggaaactaattggttgcctcttgcagtgtcatctgcccatcattgccctcacaaggacgcttcttaggaattttcaggacaagtgcgtgctcgggcattgcttgttgtcaaacaaacatcattttaggcaaaaatacacttgggtcatttcattgtcaatgtcaagatggagcaaatggggatccctttaaaaaggggatgcatcacatccaagaattctttgacatgtgacaattcactcaagagcagatatcttaccatatttatgtatttgtgtctttgcatggttatacagactcagtatatatacgagtctatggtagtttgatcatcattccaaaatttatagcttaggtctttcttagtctaacatatctcaaaactttatccaatagatttgtctcttcatggatcttccttttcagggttaagcatagctctaataatttctggtggatcaattgttcttattctggtatacttgctactcccctagtagcacggtcaagcaacgcagggttaaaaaactgaaagagaagttctttaagcaaaatcatggattgctattgcagcagctaatatcaaaaaacacaaattttggtgagcgaatgataattaccttagaggagctccagaaggccacaaacaattttgatagatctcgtcaggtcggagatggagggcatggagtcatgtttaaggggattctggacctaaacgttgtggccataaaaaaaatcaaagattatagttcaaagagaaatcggagaattcataaatgaagtcgcaatactttctcaaatcaaccatagaaacgtggtgaagctcctagggtgttgccttgagatagaagtcccattgttggtttatgaattcatttcacatgggaccctttaacatcatcttcatatcgatggtccaatctcactgtcatgggatgatcgattaagaatttcacttgaggttgctagagctttgtcctatctacactcagcttcttcaatgccaatttatcagagatattaagtcctccaatctacttcttgatgatagtttaacagcaaaggtatcggattttggggaatagatcgatctgaaataactacagttgttcagggaacaattggttgcttagatcccatgtactattatactggctgattaactgacaagaacgatgtttttagttttggagttcttcttgtggagttgcttactcaaaagaaacctgttgctgatacatttgatggagatagccttgtttcacattttgtttcactgttattagagggaaaccttattgacataataaatcctcaagtcaaggaggaggaaggtggagaagtccatgaagtagctgcactagcggcactgtgtactaaattgaaaggagaagagtggccttcaacgagagaagtacagatggcactggaaaacatattatcaaaaaagggccccttccataagggaaatagggaatcaagtagacccagtaaaaattaaatatcagctctctacatgtcaattgaaggagttgccacagaagcaagtagacaatctatggaagaggaaatgctattgtttcctcgataattatgctctggcttcagctaggacactagcaagcttgcaattgacccaataacttatgtactgacgtatatttctcttgttctgttataagtaattcctaagatattttgctttgagacaataatgcataagaaaattgcaagtcataactcaagaaattgcaatcggtttgggcttattgagtttgctttacataaccgactacttagcttcgtcctgtttcgttatctaattaatgtgattgatttactgaatcatggtgttgagggatattaggaattacagctgagcattacagtgtcactgttctaatgcaataatgcaactgcattgttctctccagtcatggacctcatggttgtgtatagtcacggatggtgactctaaaatgtagccgtcttaaatcgggaacgctaaaatgtaggtatccacaaccgcaatctgcacatataggaaagaaatgcagcttgacggtatattaaccacccgcccatcttcctctgaacatagagcgaattgagaggggaaaccaacacaagaaacaaccttagttgattcaagaatcatataacaacccaaactcaatacaaaaatgtagtatttaaaaaacaaaatggaggaagagttggcaggaaccttctgtccgagagggttctctaagaatggctgtcatttcgaccatccccttcttctatccctctcgcatactgaaattttgcaagagaacttttaaaatctctaagaaaacttcagttgcatgaaacattaacagaccaaacaagaatggaatatatgggaagcatggcaatcaaattacacattgaaaacctgtgtgatctgaccagtttttattccctctttgatcggcttggcctaaggccctgttcaatctctcgtgttggagatggatttttgttgcacgcaaaacgagaaacctcaaacctcattagcacatgatcaattaagtattaactattataaatttgaaaaattgatttatttgcttttttaaaaaaaacaacttttatatagaaacttttttgaaaagaacacaccatttaacaatttgaaaagcgtgctaacggaaaacgaagaagttgaagaatagaacagaaccaccccccccccccaaaaaaaaaaaaaagaaagaacaacacttgtgtatgcagcaaccagtatgcttccgcaa

SEQ ID NO: 18546 - DNA, 1975 bp, Oryza sativa
  unsure (1)..(1975): unsure at all n locations
gcatctggagatagaatttgctgacgtgtgaaagtcagggaaaggtgagatggacagcaccaagcatgttggattggcctcatctcttctttatatcatcaattgacaccatcttatatattcttatcccaagattatacaatccattcaatttggttctaatgcactctcactcctcgcttttcttgccaagattttgccagagaaaaaaaaaggacatttgagtgatttgttcattctgaaatgaatggtgggcaagcacgcgcaatcccagaaagtaacatttcatgcttaaatctgtcccttattggggcatttgacttaagtttgtcgcttattggatggagctttataatcataaaaaggagggaaacgatatggtgtccatgggatcatcaatggatgggcccgatcgatccaaacctatccttccaaatccctatccaacacataagcaggtagaacagcacaatgcataatgcacagcactctgctaaaatggatcacatattactgttactataaagacccaaaccttatcatacagctcaagtgttcaactagcccaagtacaaatatcgcaggaatttcacacgaaacagaactcgattccgctaataattgagcctacatacaaatggcagcattatctttttttaagaaaaaagaaagaaaagagaaaaacaaggtattctaaatggcaactcgaattttaccagaaacagaacttaagcctacggatgaacaaacgcaagaatttcacaggaaatagaacaaattcgagctggacggaggatcatgtcccggccatgcgtgcgtgcatggggatagctgaccttttggtccctggaaagccaggccaagaagatggatggatagatagataggctaccagcagtagtagcagagaaatgctgggtgccattgccacttgcacaggtacccttgctttgcctttccatctgccaaaaacgtgccgtctcatgtacacgcatgtcatttgctttcctgtgccagcacaacacatccaaagggagctacagatctagcagtacaggccaaaggtcaaacaaaaaaattgccagcattggaggaggcagtgcaacttgacgatgcaaaggtaatgggcagaatagtagttgtgggggaatgacatgggagcaactgggcagcacactcactactgggttctggaaactacatgttttatctgaagtcgccgcgattcatgagtcattcatgggcagcaaaggagactaattcttgacactagaagtatcggctgagatcatcacagcaggaaacatcatcttccctaacgaaacagtcaccaaatggtgtgaatatgatacatgatgaacaaattcaacagaagtgctatcatagttgatccataacaagaaagaagtcagttcaattgaagttgagcctgggtaagatcatgattcattgacccaagtgttgggaactatagaagcaatcaaatatcagcactacaaagtgccttaggcagcaggaaagctggtggccaacaagggaaagaaacagatcacctccagccatcatttgaagccactatatcagattcaaacttatttaggcagagcagcattcttatcgagtagcttgagctcagctctttccactctcctcctctttcatctttttctcccatctacgtttctgaagaaacaaaaaaatcaagtacacaagagcaaagaacagccagttagatattcaatatttttgccaaggcatattacagtaatactccctccgccccattttaagtgcagttgtgggtntntatgtncancgtttgactgtccgtnttatttgaaatttttttatgaatagtatttttattgttattagatgataaaacatgaatagtactttatgtgttacttttttttaaattttttataagtttttcaaataagacggatgacaaacattggacacggaaacccac

SEQ ID NO: 18547 - DNA, 1793 bp, Oryza sativa
ccatttttttaaaaaaatagctaatacttaattaatcacgcgctaatggaccgctctgtttgccgtgtgcactgttaaagttgggaaccaggctgtccgaacacagcctaattgggcttattcaagtccgatagcatcaacaataataaatttacaagaccacaaagccactcccagcagctgatttttttttatctggatatggacttatgcttagcttaggtattagaactaagctgatccgaattcagttttttatacttggagaagaaagcttatgtttaacttaggtacgggaactatgctgatctgaatgataagctaggtatcaaggacctgaactatgccacaaactgtacctagatgcctcatgtttagttgaaggggcttttttgggctttaagtagatgggtttttacgttacaaggttgataggcgcagcttcttatgattatgcttgcaactgattaggcacaaatactaacactctctgaatttcattatgccagtaatacaagctagctacagaaccaaagtatattgcaaaacaatctctagattttcttttacaaggtgtaagagagggcctaaattagaactgaacaacttgtgcatataagacaaattaagaaatccagctaggccaaacaggccctgatacaaggcaaacaagtcctagcatcttctcaatatagggtataacatataagcaacatcatcatgtgttatacaagaaattaaggatcaaaaggcaggaaaaataggcccttatgttagacaagccagacatgagtgacatgacaggttctcaaatatgtatcagaattagtgaactatgaaactccatgtttttctccacagctcatatataagactatactagataaaagaacccaaaggaatgaatttgtactttgtagtaatacgatcaagactgacactgagatactgcgccatctatagacaaatagaaaagattatgcaaaataccgcagccaaatgttaacattggcagataaaacaatacacctaaactggagccatgcaaatgcatagctagacatgataatgagctcggaaatgcatactacaatatacgaagattagtaataccaatgcaaagcgtggagaatggaaaagaacaggcaagatgaggaatcaaaccttgtagtcaaggagcatctggggcatcttcttcatcagctcaaccgtgttcgcacgcctggaaaaccacgggatcaaaacaacaaaacaaatcaagccacggggcaacaaattcaagcaatcgaaaaggaggagggatccaggggatgcgcgcgcgtacttctcggcggagatgcggtcgcacttgtggcccttccgcttggtgcgcatctcgccgcggggagggtcgtaggtccagtcctcgccggcgaggaggacctccttcctgaggcgcgcccgcttccgggcgctgaggccgagcggcttccatgccccgagctcccagtacccccacacccccttcgtcagctcccccttgtactttgcaagcttctccctccacgggtaaaccctcgccgccgcctccgccgccgtcgccgtcgccgccttcccggccatcgcctccacccgcgctagggttttgcctctcccacctcggcttggtacacttcacccactggacccaattaaatgggccaaaatatcatccggcccaacttaaatgggcccaattgttatgggccgcgtgaggcccggcccattagaaacccttcttcttccccgagaggaagagagagaaaaacctcgca

SEQ ID NO: 18548 - DNA, 1863 bp, Oryza sativa
ggagggaggagaggaggaaggtgaagaaggagaagaggcggattaggaggttgatggagacggaggcggcgggcgaagtgggtgaggcggcggcggaggaggaggaggaggaacatgaggcggaaacggagggtgaggaagaggcggcggcggaggagcaagttccggccaaggtggttgagaaacgcaagcccaagtcggagcccaaggtgaagaaccagaagcagctgcaagtagctgaccatgcagttggatctgacgatcccgtcttgtcggaggagaggtgagtaatcggtgcttcaaaagattgtgtccttttcgtattccaattcattgtttgtattgccgcttgtatgtcatggcgattggtattgatggtgagatgccgttcttgtcaaaagataagagaaaatagcatagcgcatgtcggtctgatgtgaatgtgagcatgcaaacagtctaataggagtggtgttaattacagttattaataataaattgtttttgtgaaaatatagcatgacatgctgatttgctgtggttgtttgcgtagaaatggtctaataggcaatgtaaaaatctagtggttgttcctagattaccattattttgatttgtcatggcttgaagtataggttgttccacaattcagaataaattatgtgaccgtttgggttggttatgatcaaacaagtctgtttataaaagtatattctttaagaagcccaaccattttttaactctgacatggagctgtaaaatgattgctttggagtttagaaaggtggtttctttgtagcggaatcttcatcgaattgataagaagtgcgatggagctatttaactgcttgctgtctgtcggacttattgagattagctctgtaatggtattgcattcttgtttcagcgagaaaaatgcgaagaaggtgtatgttgggggcatcccatactattcctccgaggatgacataagaagtttctttgaagcatgtggcagcatcacatcagtggattgcatgacatttcccgagagcgggaaattcaggggcattgccattctcacgtttaaggtcagcctcaaaaccttgtttgcttccttttagcccattgtttatgttctaggaaggatgtcaactcacaaatttaacggataacttaagataattgttgatccagtaaatgtctgaatgtgcatagttttgatggtactggaagagtttgcttcaactaactacattccaatgcagtctcgcttgttttcagcactgttatagtcttgtagaaattaatgatttagtttcagaataatgtaagaaattcctctctgtggtcttgtagtaactaatatggtaacaatgcatctcgttgtcacctcatagtattgttttgaccaagtttgccgcttggtttaatttcatacaatggatcaaaaccatctagatgcaagcactgggtgctcctttaatctgttactactgccaatcatgcacatggcttgttggctgtggcaacatgctttttgccatttttccttaaacggtaatttaaacctgaccgatttttcttgttcagactgatgctgccgcacaaagggcattggctcttgatggtgcagatatgtaagcacatctgcttctgaactttacttcttccttttttgttttcaccataagcgataaccttcttgttgactacacaggggaggattttttttgaaaattcaaccatacaaatctgtccgtgaaaaggaagattttgcaccaaagatgatagagggatacaatagggtttatgttggaaacctggcatgggacataacagaggatgacttgaagaagttcttttctgattgcaaaatctcat

SEQ ID NO: 18549 - DNA, 6242 bp, Oryza sativa
acaacttgagagttattcatgatttatattcgcaaagtttgacttaaacattgtcctaaatgacttcctttatgagtacggaggaagtatttgaataagataaatggtcaaacatatatataaaaaaatcaacggcgtcatatattaaaaaataaaggaaatactacgtaacaccaaataaggtgatgcaccaatacaccaaaaatcgccagacatgtgaggcctttcctgtacgttcaccctaagtcatacagaaggcgaaagatgagaagtgacactttgatttgttgttggtagatatatcaagattgctatacactgattgacagggcggaaccaggagtagggcagctagggctagagccttactcctggtcctaaatacccattgaaagcactccaaatttaagaatttagaaaaaaaaagaaagtaaacctataaaaattacatcaattgagccctactcttgagaaatttttggctccgccaccacccattgttactatctaaccccgcgcatatcgtgagccgttgttggtgcttctgaaacgttggagacagagagagaaaaaaaaaggtgatctaggacctgttagtcgtggcagtgagaggcgacaaatgtgaaatcaccaacactagaagcagcagaagaagaagaattcgaagaaatgggttgttgaacacgcatatgacagcaacaatactgcagatagttgcaaatggtccttggaggtatatacgacaaagaggcaaagcaaacaagcacgatattgggaaatagaagtgtcacattggggaattgaagggtcagaaatggccggggcacgagccaggcacgctcaaattaattgcagccatcgatcgatcaatccatggatgcagcatgcagcgatggatcgatcgccatcatactctccagctagctagctcgtcgatcgttgcaatcatggaccaatatagatagatcgatgtgcattgcactagctatagcttttgctaagctgcagacatcacggcgcactgatgatgtgagatgatatgatacagacggcaatgcacctggcacttggcacttggttaattccactcactcatcacttaatttgctagctagtagcttatttgtagtcgattgaggtttgccaattgtccatgtctgcttgtcctcttcctccaccctctatatatatcccaagtggccactacagagcctccattattaatcatagctaacaagtatatcctctcttcttcttcttcctcctcacaactcacaatatttcagagtagtatacctttcttgctagctagctagcttgttcatcgatcttgttttgaggtgttgagatagctaggatggtggtgaagaaggcggcgacgatggcggaggcggaagcggaggaggagatgatgatgaggatgatgtgtggttcaggaggcaacgagatgatgaagacgaagatgaagaagaagaatagagaaggggaagaagaagaagaagtaagtggaggaggtaggatgaggaaggggccatggacggagcaggaggacgtccaactggtatggttcgtgcgcttgttcggggaacgtcgttgggatttcttagcaaaggtctcaggtttgcgcggtggcgggtgacctagctacatgcactgcatgcctccctctctctctatatatatctccttcccatcaaacatccatccatccatcgactgcttctttttctttctttttttttctcttcttgattgttcttgttcttgttcttctttctctctctcttatcatgcaacacccacacatgcatatatccatccatccatctatccccttatcacatttaatttcttcttcatatataccaatttggcaacagctaatgattctttttttatttgaaactctgaatgaattgatttagatgcatgcatcaatacaaataattgatttctttttatctggagctctgaaattgatttagatatgcatattgataaaacaaaatttgatattcatctgaaactctgaattggttaagatgcctacacataaatgttccattttcagttgtggggatcgatgtgatggcttttacatatatgcatgcgtaaattaacatgcggtgttgcatgatcgaagttaattaatctagaggcggtcgatgatcgatggatgatacagtacttaactaggagatggaggcatgcatgcatgagcttagaacgcacgggaaactgaggtgttaaccatctgcttcttcttcttcttcttcttcctcctcctctggatggctgtctccctggcacatgttggccttggtggtttcacctttcaggtttgaagcgcacaggcaagagctgccgtctccggtgggtgaactacctccaccccggcctcaagcgcggccgcatcaccgccgacgaggagcgcctcatcctccacctccactcccagtggggcagccgctggtcccgcatcgcccgcagcctccccggccgcaccgacaacgagatcaagaacttctggcgaacccacatgcgcaagatcgcccaccacgccaagaagaagaccaattcaccatcgcgggcgccgacgacctcctccggttccttgtcctcctcgctcaccacggcgacgacgacgatggcgacggctgcggcgctgcaagaaagcagcagctgcggcggcgacgacgaggccgtcgaccagctggtggcggcggccaccacgccggcgagccagctgctgacgatggactacaccatggaccagctctggaacgacatcgcggcggcggaagccgatacgagctgctacgacgcggcggcgatggcctcgccgccgtcgccggtctgggaattctgcaccgactactcgctgtggaggatcgacgacgaggagtactacaagaagatgctcgatgcctcgcaatagtactactcaaattgcaaacaagcaacgccttaattcaattgctgctcttagcttaattagctgacgatcgatcgacgacgactctcatcatctgatgaacgaactgcgaaatctatatttgcactgcatatccttgcatctgtctactgtaattacacctgatgatgcacgtattatgcattgcttgtcagacaactctgctttatatatatctagctatagcttgatcaatcagcatgcctagcttgtgtacatgtaggggagagagtattagtagttaagactgatgggatcaagtgctatatgtatattgctttaatttcatggtatatgtactatgattgtactatgtgtcatatattcagtgtaagcagtggtttgcaattaacctgttctacctcgtaaaaaccggccttctgtgactggttttaatttgcttgtattggtgcagtgctaatgaggtttttcagatgagagtggacccattattaagtgcttaacagagtttgacatatttgaagaagtagaatttcaattgtaccaaaatacagtcaaaagtagactcatgcaattaatatattctattccattatctaaaaatatatgaagagaccatattcaaagaaaattatgtatatgaagagctcattccagggacttttttttccagtgattcactaattaatactttaacatctcataattaaacttcccctaatttacatgaggagttaattccagggtggttagctgtgcaaattatgttcgtcaccaagcatcaaacaagtactcatggtgctgccatatcagatgacctagatatcatctgaaacttggttctatatatcccaagaaattaacacaaaagaatcttgactctctcccaacaacattgagagcgcatatagagcatgcacaatatacagaatcttcaccccccaaaaaattttatatattccaagataccagcaagcaatcacagtatagctagtgcatggcggcagtggtttcatgggaatctaataatacaactctctccaagcaacacacaagtcaagagagagtaactcaaaaagatatatgccaagctcagatcaagaggccatgagcagcaggttgaaatggtagggaaggaattcagaagccagggataatacatccatccattcatcaccatgcatccccaatatgccatatattgtgcatgtccctttccagcttttcctcacatctaacttttccatccctccaatagttcaaaccacatctcatacagctgtttttaatctcactgtcattaggagagtggattaatggctgatctacaccgtctattgggctatgggcaccaaaaattgctacgcgcgctagcaaaaaaactcggtcgcttatatatatatatatatatatatatatatatatatatatatatatatatatatatatatatatatatatatatatatataaaatctatcctaactaacggccgcaatatatatatttattttctcttctttggtgaataattagttctagtttttgaagaattgatcagataacatgtcttcacattgcaaataattaattgttagttattagaatatggcatatatgacatttacggagccatcgtttcgcttgttcgtggaataagcgaaatggtataatagcaaacgaaaagtaatttgtgaataaaacttttatatatgtgttcttagcgatctaaaagcaaatgttggaaaataaacttcgatgaaaaaaaatcttaaaatcaactccaaatttaaggttaaaaattcaaattttggttgataaatataagcataagcgaaaagatagtgcccttaaattgaaaaccacaaaaccaagccctatctagttagcctaaaatccagttaattaatttgcaactcatgcttagaattttctaaaatccaaaatctcacgcagcaacacgctgagtttccacctagtagtcatatcaagagctagcttccctttaaaatgctccactgacagagtgtgtgttactgttgacaactcactgagaggaatttcatgccctatcctatgagtttattttgtaggtgtagctctagcataactctccacggttgatgcaacttgcaagaaaggaaaaatgccaagtggctttggtgataagggatgaattgaataaaaatttatggtgggaaaggtggtgataaggaggcaggccaaggcctttcttttctccttttgcaatcactttatgctcctaattctgattaacctagcattatctctgtgatttgtttacaccactagtggttaaccacaatggcattaattagctagtgacaaagtgtgtcagtaaccccacacaagatcagtgagctcacctccgttaattatgttcccccacggtccactgttttttttttttggctatcaaattctccaattattttgtgttttttgagagtaacatcacattgatattttctgatggcccctggtagagagagcaagaatcatgcctgcccttgtttctctcttaccggtacatcataaagtagagctagtgttattttttttgtgggaagaaacatgttacataaagctgaatattcttggcttattattcatcaaatgtacacagattctgtcagttgttgcagctgaataaattccccccctacgcgtttataaacttttcatcctccatcgatgctctactttctgttactgaaagatgtgcgtgatgaccttacttgtactagtagtatatattgttttttaaataatggttgtgttcgaaagtcacagcgctataccgcaagtctgcaataactggatcagcaatagagacactgtttaagatgctgcagtcttgccacaataactggcttccaaacaaagggtgtgtttagttccatgctgaaattagaagctcgattgaaattggaaatatatgacgaaaaagttggaagtttatgtgtgtagaaaagtttgatgtgacttttttttttcaaacttgggaactaaacacgggcatagccaatagaaactaactcctataataaatttatgatacaaggagacacgatatggtattgtcagtatagctagatataggagtttattgcccatgtttcagtttttatttttttttaacaaaagggataatgatggatcacacagtctacaacagatacagctgacatcagcgagcaaattagagggtccttttgattcaaacaaattaattatctcatcctgggtctgtggatagcatagtaagattagatgcgtcagtgag

SEQ ID NO: 18550 - DNA, 1639 bp, Oryza sativa
cagcatgaggccttttgttccttgcaaataacgcaagactttctataccaatttccagtgctctgggcctggattactctgaaatctaccaagtaacccggtaacaaatgccaagtcaggttgtgtgcacacttgcgcatactgtaggcttcttacaactgatgcatatggctttgttttcatttcattgagctcatactgatttctaggacattgcgccccatacttttcgcctttcactataggagcaggtgtagcactgcatctgtacatgttgaatttcttcaacaccttttctatatatgccttttgagaaagtcccaatgcatactatgttctatctcggtgaatctctatgcccaaaacatatgaagcctcaccgaggtctttcatgtcaaactttgaggacaagaatttctttgtttcctgcagtagactgacatcactactagccagtagaatgtcatctacatacataattaggaaaatgaatctcccattcttaactttgaatcaatacagttgtcctcgatattctcttgaaaacccaaatttctttattgtcccatcaaacttcaagtaccactgtctcgaagcttgttctaatccataaatggatctctttagatgacatcccatatttttgtttcctttcatgacgaaacctttcagttgtgccatgtatacttttcctccaaatctccatttagaaatgtcgtttttacatccaactgatgtaattctaaatcataatgtgccaccagtgccattataattctgaaggaaactttacaagagactgaagaaaatgtctcattgtaatcaatcccttctcttttgcgtgaagccttttgccacaagtcgcactttaaacttttctatattccctctggagtcatatttggctttgtagacccatttacagcctactgttttggctcctttaggaatttcttctaaatcccagacaccatttaatttcattgatttcatttcatctttcatggcttccaaccattcagatgagcgagcgcttctcatggcttcttcatatgaggtgggatcatcctccatatgcgactcttctatattataaacttgatagtcatcacggataaccgatcttctgactctttcaggccttctaggggtctcctattctggcacattatctgtttgaggctgttgcagctcctcctctggtgtggcaataatttctgttgaatcctgtaaaacaagttcctcactttcattcattgttgccacaggagagataacaacaggtgttggtactgcaacatcatgcattgcaagcacaacattaacaggtagagagaagaaggctcttgaatcgactgagagggctcagacacccacctctcatcaagatcaatttctcgaactaccgagctccccctaatcatttcgtcttccaagaagacggcatgtctcgtttctacaaactttgtataactgtttggacagtagaaacaataaccctttgatctttcaggatagccaataaaatggcagctgactgttttggggtccaacttcccaatatttgggttaaatactttaacctctgcaggactcccccacacacggaggatccatagctcatacggtgttttgggca

SEQ ID NO: 18551 - DNA, 2758 bp, Oryza sativa
attattataccatagttcacattttccatttccaaaatggcaatcatatccatcaaaatccaatttgggtacacttatttctttgcaaagaagggacataaaaaacatctcgaaataaaagtgtgaagccattcgcgagctctaggcaaagatctccagcaacttcaacttttgcttcactccattggcaactctaatggatctttcgcttctttgcatagtcctcattgaacggaatccctttaaacaattacacatatgaatagttgctctagaatcaatccaccatgtggatctataataactaatcataatgagattcatttacaaatgtaataatgttctcacctttttttgccatgatcactatcaggaagtcaggatgatctttcttggaatgtcttgtcttcttgcagtggagacactaatcctgtctcaactgtgaactgttgttgttgaggcagatactgaggctgttttgcttttgaggagggtgacctgtggctcttttccttgatatctttaacaaggttaatggagtcaccattggtctctttgattctttcctcctcttgaaccaccattgatctctttgattctttcctcctcttgcacacaattagagatgagctcttcaagattccatttttctggacttattttgtaattgacaacaaagttgtcaaaatgctttggcaatgaggttataaccagatggaccagaaagtcatctgagatgcccaaatctttttgcttcaacttggaagccatgttgctcatcctaagaatgtagtcttttacaccatcaccatggtacctctctgtcacaagctgctttattagctgtgtcgcataaaactttgaagaaccagtaaactggctctttatactctcgaggtacttagagacggtgtcatactctgggattgagcccaatatggttggctcaatcatgttctttaccgcagccaaacagttcttgttggctgaggaccatttcgcatgctcaatgtcatacgacatgatgagggaagcattgtccctctctctcttttgccattcagcatctaactctttttcacctttgaaaagtttagcaggttctacaggacatggggtagtcaacacccagtccacctctcccaagataaaagcaaggtcgagttctcttttctattctccgtagttatctcctgtcagggtcagaatatctttaatgtaacccatcaaggagtaccacctgagataatcatgtattgtgagaacaaaattaacattaaaatatatgtattaagtctacatcaccgttgggcagaaaatagacataacacatagagccataactataacattgcaatttatcaacgttggtcagaaaattacaacatcatagcacataattaatgttcctaaaattaaattctcccgttggttcgaaatttaattttagaaacactaatttttcatcaatttcatctatttgcagcggaagatctatatacaattcatataaacagtaacaacactctgttatttactctctgtaaaaattctcccgttggttcaaatttaaacagaggtaaaacatgcaaaaacaattcaaaattctattgtaatttgcatgaaaatatacaaaatacatgttcagaagcatttctcacatttatctattctctaaacaattttcacgttgaagaaataaacacatttaataactataattgtaaatgcttctgaaacagggacctagaccgaacttcttttcttttgattcggccccaagggacctaatatagacttatttaggcgcagccggtcggcccacggccggctttcgcgcgcgcggttgccccctccccccaggctgcaacctgggcctgggctgagaaaggagcccccggcgcgcgccctcttgggccaaaatcagcccagccatcgccggccgtccgatcttaggttttcgatcggacggccgggcacctctttcggggtaacaaaaaccccaagccgccaaagacgccgtccgaaaccctagccgcttgctggccggaaccctagccacggcggcacggcacggcggcagggcggcacggcgcggcggcgccgtcgcacccccctttgccggcgcgcgcactcacccgagagtgagtgcgccgccgtcgagcggctgtgcagcggcgcccggcaagccggcggcgcggcgccgccccctcttttctctcccgcgtcggcgtgaggacgaccggtggtggcatgactcccgcgcgcgtcggcggcggccggcggcggcggtaggtgagtcttttcttttcgacccgtgcggatcgtgtgctgttctttcttttgctcttttccggggatcaattcccctcttctttttatttggatttctatccccgaaccgatctaagccctagggttggtctgataccattgttagagttctctgttggatcacctaggtttagatctagtcgggttgtctctattgggttgatgaacgacattgtagatgaaagggagagggtttagataccgaccggttgaggtgttcgtggaggaaagggcgccggacatcgtcgctgtcgttgcggctcgacgtggacggcggcgacggtgtgcttggtgccaatggcggtgatgcagcagcggtcgcaggcagtgacgcggttgcggcagcgatggtgtcgacgacgaggcgtggcgcggcggtggacttcccgtcactggctacgcccccctcgagatcggtttaggg

SEQ ID NO: 18552 - DNA, 571 bp, Oryza sativa
ccattttatgcacttacaacagtatatatatatatatatagagagagaggggtctagatcatttctaggcagaaatctataggaacatcagcgcttatcataccttcacatcctatattaattaatttgatcggaccgaaaagagagttcatatcagcttataagaaaaatcggacctaaaatcattccaccttcacaattaatttaagaaaaataaaaaaactacaatagaacctgttagagttctctgttagatcacctagatttagatctagtcgggttgtctctattgggttgatgaacgacattgtagatgaaagggagagggtttagataccgaccgattgatgtgttcgtggaggaaagggcgccggacatcgtcgttgtcgttgtggctcgacgtggacagcggcgacggtgtgcttggtgccgatggcggtgatgcagcggcggtcgcaggcagtgacgcggttgcggcagcaatggtgtcgacgacgaggcgtggcgcggcggtggacttcccgtcactggctacgcccccctcgagatcggtttagggtttgtggggtgg

SEQ ID NO: 18553 - DNA, 3958 bp, Oryza sativa
caaggagcttaggtgagtcgacatgaatacacatactacgactacatgtattcatttcagaattcagattgcgtgtaccgatggagagtgcatttcttacatcaccacactgcatacatcatccagaggtatggagctagccagtgagatgaacaagaaacaaaaataacaggctgtgggatgcatgaacacgttctgaatttctcttcctgtcatgtcaacgggagagcaagattcagcacgcactttgttcagagactgtgtcgagttcagttcaaacgaattgatcggttagggctatgtttagttcacactgaagtatagaagtttagttgaaattagtacgatgtgatagaaaaattatgtgtgtatgaaaggtttgatgtgatggaaagttggaagtttggaaaaaaaaaaactttggaactaaacagggcctagatagctagctggaatatcgaattagtggataacatttgggaatattttggggctggcatctcgtggctatcttggttgtttaatccatggacagtagtacacactacacacagtatagttagctgcagtaagacagttttgtagtccaactgaacctagctgatgggtctagataatgtgttaatgatggtgttagatgcgtgtattgtactacttgtacatcgaagatgcgtgtattgtactacttgtacatcgtgcgtatgaaagtataattatttatgtatgtacgtataaatatacaggatgttcgtggggacgtggaacgtgggaggaagagcaccggatcaagggctggacatctcaagctggctcctggaccagcaacctgcatcctcccctgctcacatctatgttcttgggtatgcactcatctagttgctgtagtattatcatcagtgatttgcatttgcatctttatatcttatcttcaatcctactaattcactgcatgtaattaagtttgtttaattacctcggattctaggatggaacacactgctttcagaaactggtaggacaaactggtaggatggagtagtattgacttgtgaagatgggcagcaaaaatagtgggctgcccatattcagaagtgaacctcaaaaaattctactgatgattcagatcatgaaacagtgtgctagcaggttaattaaactgctatggatttcagtgtaaacccatactccgtactgaccagaattatggcattctgttacttcttttaacataggaacggtcacctgaagctgtaggttagcatagctgcagagctatggccatgggtttcagtgttttggatttcaggacctaatcatgattattccatcacctggagtattcaccaggagatgtaattatactaacggtgctactagtaattaatttgcttccttccattcctgacatatgccttgatcaacataaacaagacggcattgttccatgaaacagtgacacaatgatgcatttccatttgaccaacagctatgactccagagggattttactaattaatcatttaatctgtctgtgtatcggtaagcctaaagtttgattatcctaagtaagtgttctttactatcatgccacaggttccaggaaatagtgccgttgaatgcgggaaatgtccttggggctgaggataaggggcccacatacaagtggctcgatctcattcgccgagctctaaacccttcctcctctgaaagaagccatagttttcctagcaattacccatatgccactgaagcaagtcctgagcgacccaaaaacgatagggtcagcttctcggacttgctagcgatggaggacagactcagcatggtatcagagctagacgacgacagcgagccgtcgacctcgaacccagaatcgagcagcgaggaggaaacgacggatgtcgcgacgcgatacctgaggtcggcggggcaagggtaccggctagctgccagcaagcagatggtggggatcttcctctgcgtgtgggtcctggctgacctgatgccatgtatcacaagtctcagggtgtcttgtgttggcaggggcatcatgggttacatgggtaataaggtaattaaactgtgaacttattacttgccgatcaatttcatcaattcataagatgatgatcaaattgtggcgtaattaatttgtttttaatttggaattggtttgtgatgatgaaggggtcgatatcgataagcctgacggtgcaagggagcacgacgatgtgcttcgtgtgcacgcacctggcgtccggcgagaaggacggcgacgaggtgcgtaggaacagcgacgtcgtcgagatcctcaagaggacgcgcttcacgcggcggcgccggctgtccgcgccggcggcggcggtgccgtcgccggagaccatcttggagcatgagtaagacactgaacaattccatctgtcgtccctgaccctgatcgacttgatcttgtatggatgtatgtctgaatgatttttgaactgcatgattatatttgcagcaagatcatatggctcggtgatctgaattaccggctgacgggcagcggcagcggcgacacgcaggagctgctcgacaagaacgactggcaagcattgctgcagaaggatcaggtgcgaatcaatgacagtaaatctgaagctcagaactgaagcagtacaaattcagagatgaataatcgtgcatgcatgtaagctaaaaatttgatggctgcgtgaatctgctgcagttgcgagtggagcagagagccgggcgggtgttcgggggatgggaggaagggcagataagcttcccgccgacgtacaaatacctcgccgactccgacacctacgccgccgccgccgccttcacctcctccgccagcaagaagcgcaccccggcatggtatgtaaatgtaattaaatttctcctaccattactgtcacaaacaaaattactcttgttatgttcagacaaattaactaacattaataacccctgcaatagggatcagataggatttagctagagatcacatgcatggttcacgatcgatccaaaaaaaagaatgcatgagaataatgatgcagtagctagggcgggctgaatgcaatgaatcattaagtcagtcattcatgtgactacgtgaggtagctgctacgcaggcacatgcatactgattcctgcatatattcctccttaatagctagatcgtgcacagttttgacttaatccatccgcaatactctccatcaccattgcatgttgatatgcatgatatatgatgatatgcatgtttccgtcaccattgcaacaattaagaatgagattctacaaatcgtgaccaatcaatcgagttactgtcgagtactacagaattgggaatattcagagcaacagaaggttatatatatatatatatatatatatatatatatgccctccatccaactgaatttgattagcacgtatactagctatacacacagaatgttagcactagcttaattatattccagtatacaattgatcagacctggggtagagtagagtagactccatggtgtgcagtccttgtcacgctctgctaattaatctgcctctaaatattgctatactcctaattagtattaaaatgtatggtataaaatataatattttttagtactatgagtctagaagtaacacgaagaatttggcttaactgaccctaaaaatgcaggtgtgaccgcatcctgtggcgcggttcggggatggagcaggtgcggtacgcgcgcggggagtcgcggttctccgaccaccgccccgtcaactccctcttctccgtgcagctcgccgccggcggtaacaacgccaagtccgaccacctccacctcctgctcctccgcccacgggccgccggacctgaagcagcagctggcatcggcctccgctcatccagattctgacacacacacgtagatgagcatgtagtatgcct

SEQ ID NO: 18554 - DNA, 4736 bp, Oryza sativa
atgagcaggctaaatgcgaagaaccggcaaccactgcttcagctagctctcgatcgttaattaaacaaatgcttcatgcatacacttttctgccacgtaaccacacttccattcactaccattagtactccaatatataacggcatgctaaatatatgttttgccactaaattaaataagaaaagttgctagctgatcgatgtccgatcgatcgatcaacacctgtacacgacagccataacgcatttctttattgtttatttctttgggggaaaaatggcatagtgctttaatgatgctttcgccttctggctgggctaccctctctctcccgtggcagctggtttcagggctggtggccgagcaccagggcctgcttaacttagcatctccacgctggctcgaccccctggtgttgttggtttcttggcagttgtggaaggaacggaacgctagggttttcgactctgcgctctcttctatctcagtggttctggagtccatccactcggagggccgtcctgtggtctttagctggcgttgccgcttttggagacttgttgggagtgtagcgtgactctgcccattcccactgtttgaagtcttgtttctctagccgcagtagttttctaagtttcagccttttattttgccttttctcccttcccctggcataagccggtctggctgattgcgttatataactataacttttttcttctaatatattgacgtgcaatccttttgcgttttcgtgaaaaattaatcattaattttagtacggagagagagaggggggggtaatgattgaccagccagctatctgtgttttcgttgcgaaacacatacacttatcctaatataattaatatccatttcctaattaatatccgaaagggattcggcatcggggcttctagccaccagagaagatgttaattaagaggagaagaagcacctcatctagacttcaccatgatagctagcagttgtggattatatcttacactagaaaagagttattagtcaagtcaaggagaattctttgcatgcatatggagtgagctcgatctttgttttgaaaatgatcgatgttgagacattcaatgcatttagttgctcaaactcaaagcaatatccttaattaattaaataccgtgccgatcagttagacttagatcgttacttgatcgaccacatgtataagttttactccacaaaataaagtgtatgggaattattatacgactatgtcgaactatgaattgaacaacttccatctctcttgtttcttttgggtggaatcttcctagtcactgacacgtgggccgtctatgtatttaaccagtctctctcactctgccaatactctgaacctccattaattctctctaccgtaaagcttttctgtttgaaagtttctcaatgaaaattttccagtctatattttgaattttttttgcaacaaatgttttctataaagttttaaaataaactttttctcatattcttttagattttagttgtatgtcaagttttcctataaacagttttcaatttaatttttcagtttctacttaaaggttttcttatagaaaataagtctatattttaaaatctaataattaagctgatgtgataaataatttgacggtatagacaagaggccagggtggggacctcgagagatgccaacacagcggcagtgctctagcatggtgacaacaacactgtctttattatctatcagatgggtttaatttttcttttcttttgtttcttggcgctagaattgtaaccgtttagagaaggcgttatgtaatgtgataagctagatttgaacttttcaagatcctttgtcactgtttagacgggactaaaacttttaagtccctatcacatcagatgtttggacactaattataaatattaagcgtagactcactactacagaatctctaaacggtgccggttgggaaccccccttcggtaccagttttcccaaccggcatccaggaggcggcactgttaacccaaccggcactgtttgccggttttggaaccggcacctttgaggtgcccatgagccaaaaaaaaatcggctcaatgcatcgagccgagtgcattgagctgtcaagccgatcccatctacacccaaatcccaaaatttcctcaaattcatcaatcaaacacatcaacatcacattcatcaagaacacattcatcaagaacacacattcatcaagaataaattggagaggagaaggaggaggaggagccggatggagaggacgaggcgccaccaccaccaccattgtcgatgaagccaccgtcgccacctcccgccgccgagccgccgtcgccgccacctcccctctcgccagatctggcggaggggagggcgccgccaccgggccgtcggaccgccgccgccaactcttccgccgtggggccaccgatgcggcgacaccacctccccccctgccagatctggcggaggggagggcgccgcccgccgctgtcgcctctcctcttggcgccgcctgctgcagccgctacctcccgccgccgcctccccctcctgccgccggcaggggatcaggctcaacccgcggatgcaccccttgctcctacagtgggcctcccctcccgccggatctggcggaggggagggctcccctccagctgccaagtcgtcgcctccgcctccacggcagcgcgcaggagaggagggagagagagagagagagaagatagcgaggtgagagagaagggagagagagagagagaggagaggagaggctgagcgagatgaccttatccgatggttgtggggcccgccggtcggctcagccggctcggctcgatccgtaaaggtgttggttttttttacccaaaaccggtacctttaatttattataggtgtcggtttttaaaaaaccggcacctttgtcttaaaaccgacacctatgtgcagggcccaccaacagcagtgtgggaggtagaagattaaaggtgctggttttgggtctagaaccggcacctttctctgacacaagttttaggtaccgtttttttttaaaaaaaccggcacctatttggacataaaggtaccggtttttgaatatgtggcgtgtggaggtgggtgtatgggcggggaaggcattattggtgccgggttttggtgtgccggcacctatagtggcgacacctatttacctttttgtagtagtgatattaataaaacccatccataatcttggactaattcgcgagacgaatctattgaacctaattaatccatggttaacctatgtgatgctacagtaaacattctctaattatggattaattaggcttaaaaaaattgtctcgcaaattagctttcatttatgtaaatagttttgtaagtagtctatatttaatactctaaattagtgtctaaatacagagactaaagttaagtccctagatccaaataccagatgacggttaggatcatctatagagggtgtttgtctgtggtagtttgggtcgcaatcaactcactctttttattatcaggaaaaagaaaagaaaaacatatatcgccaactaccggtccacagatcaatttccttatggtcgatggtgtagctaacattgtgtactatcttccatgagaacgccactatttgagtgaagaaatatattgcaagacatgaaaagatcgagagggcccaatgcaaggtgtgtgcatatatatatgcatgatgaatgcatgtcacaaccaaaagacagtgatacgaaaaagaaaggatgtttgtctccttttagcttcttgtagcgccgttcatagtctaatttgttttatatagtgcttctgaatcttgatagatcacaattttattgaagattttgtcaaaaccgtgttcaaatcagtcatatatggccaagctgggtatatatagagttagcttcgtaggctaattaggatgcgagacttttggtcttatacacatcatgctccaattaaagaagctagatcccaatggatgtgcaagttgtggatgcatgcttgcattgtgttccttgtggcctagaccagaggccatgcaggtctccatccaagataggaaaaatgaaactcaattctttgcaatacacatgtccctaatcaacatatatacatggatgcatgcatgcataaatgtactaattactacactagctaccatgcatgatccctagagcattttttactgactattgttgtgaaaactaagataaataaaccgcaaatgtaactcaataagtacaacaacataaaaataagagcattgggataaactttcctgccataaaaccatggtggtttattgactatacactcccaccgcttcatattataagttgtcttaccttttttatagtcatattttttcctagtttatagaaacattagccaaaatctatgacattaaatgagtttcaataaatctaacattgaatatgttatgataatatgtttgttttgtcttaaaaatactagtaatatatttttctataaacttgatcaatcttaaataagtttaagtagaaaaagtcaaaatgtcttataacatgtatatgaatatgatcgttaactggcgaccggacccattgtaaaagaagatatataaaccattgccgtggtggatctagctagattaagattgagtgttagcttttataatgaattatgtgttaaacactag

SEQ ID NO: 18555 - DNA, 5395 bp, Oryza sativa
tcggtgtacgtgccgccgcggctgtcctcccgaatgtgccacctcgccaacctcgacggctcgctgtgcgccgtgttcgacaaccgcgtcgaaggcgacgtctacgggctgttcacgtgcagcgagccctcggcgtcgccgtcgccgtcgtggtcggtgcgttgctccatctacctgaataggctgccgcgagaggtgagcgacgagctgatggaggagcgcgtgatcgtgccgctctgcaccgccggaggcaagatcctgctcgccacggggcaccacaaggtgttcgcctacgacgccgagcggaacaccgtggagcgcgtgttccgcatgcaggagttcgtcgatctacggcatgactacatcaaggcccccctgctgatcaacattggtctccacgacgaatgcatcgccgacgttcacaatggcgacggcggcggcgagaggatgctgcgtgtgaacatgggacgccgcgacaacatggtggtgaagcaagaggtggccgtcgagtaccacgacgctagcaatcgtcaattcaacgtccttttgaaggatttaaagaggatagctgcctgcttccgccgcacatgaacatggtttttgaaaatcaaataccacatccatttcatattataagtcgtttgactttaactttctctagtcaaaatttgttcagtttaaccaaatttataaaaaaaattagcaatatctagaatatcaaatcaattttattaaatttactattaaatatattttgataatgtgtttgttttgtactgaaaatagtattatgttttcctataaatttgatcaaatttaaagaaaattgagggagggagtaacactttatacccgatttcaattttatggtagaacgtgacattatggtagatatcctcacccccggtggtggggttttagttattatgattttatgtgttgcgggagtgaataaaactgaaagcatataataactaaagatacataaagtggactttccccctcattgctatctttccccaactcaaccttcgacgcggttgtcgaacacggcgcaaagcgagccgtcgaggttggtgaggtggcgcatgcgggacgacagccgcggcggcatgtacaccgacccgaactgctcggcgccgacggagaacgacaggatccgccggatctgccagtcgccgggggcggctggctggagcagccagtagaggtagccgttgacgaacaccggtggcaagccggggaggaagttggccgcggacgccggcactcggccggtgcaggggcgccacccgccgggctttcccagggtatacacctagcagacgtgctccccgttgcgtttcttgaagagcctgaccaccttgtgctcgccggtcgccgcgtcgaagccaagcccggtggtcgagagctcgaaggggtcccatggcgacatcgacgggagataactcgtgatgccgccgggtaataccctggctattggttccgagtgtagctccgcggccggctggcacggcggcagcgtgacgtgatcgccggtggacaggttgaggaggtgataccgcggctcgcggccgtcggagacgagggtgaggcccctgcacggcctgggcgacgtgacggcgtgcttggcgctgaagcagtcgatggtgaggagctcgcgggcggcggccggcgcctcgccgccgcggagcgagcaggcgtagaaggtggtggtgctgctggttctgcggggttccggcggcgcgaagaagagaagctccgggtggcggcgcgcggcggcggccctggcgcggtgggcgaggatgaagtagtcggaggtgagggcggcgttccagtcgcgggagacggcgcggagtcggacggcggcggcgatggggaggcgcgtgaggatctcgtcgacgaggaggtggtcgggagagctcgagctcgggctcggtggcgagcggcgtagcctcttggcgtctggcggagaagagtcgttagacgccatgtgtgattagtttttgattaatgcgtgtcacacgtgcaccatcatcaagcagataatgcatatatgtatagagagagagagagagagatcgcgcggggttaatctaattaagctgacaatgaaagcggcgaccttgtaggattcggaattgtcctcatacagatcggccattgcgttgctttggatgcgacgacgacgacttgggtggcgggcctggcggcggcgtcagatgcggaacgtttcgggacggcgggggccgtgtgaaagcccatgcggcccatctctctctgcctcccgcggcccgagcaccccatggcccatgaacaagtagaaggcctacgaataatagatgaacttattcctaatagagtgggaccacctatacatttgttgacaaattttctcctaaaaattgataaatgtaattataatacaatcgtagtgtaattacactgtaacttgtatggaatgacactgtagcttacatttaactatagtgtaacttgtacgtaagtttcacgtaattttgaatcgttagatctattataagatttgttttggtgaggaagaaaaaaaatcacaacacaccatatgtgaaagaatttgttcccacaacctctattttaccgaaataacatgttatggagagatttttgaaagttacatacaagttacattatagttacagtgtaattatatgcaagttacagtgtaattacactacgattgtactgtaattacatatgtcaaatttttaggggaaaatttgtcgacaaatatatagcaaaattgaatagagtagggttaattggatgaataccactattataaaggtgtcattttataaaaatgccattcctatttttgtctatttgtatttatgtcatccgaatacgtataaagttggaaccatgacatttccatcaagtttttaaattagttgtgtgtggttatgattaagaatttttatggtacgatataatgatagcatatactgctagtataaatgatccaacggtatgaatcgatttggtttcccatttaaatagattttaggtttgtattataaaatttagaggggtaaaattgcctgggtgtccctgggtgtgcccctggctcacgccgtccgtcgcccgtccgcaaggcatgcccatggagggaggcgcgacccccacgaggggaacgcgcgcctccacaccctttacctgaggagcagctcatggtccccgtctcccccacctcctccctctatatttttcccttcttgctcctcttgcctcggccgcagtcggaatgtgagttccaagatatgtcattgttaagtgtgagttccataaaatgtcatcgtacaagcaactttgtcccaataatgtgagttctatgaaatgtcatcgtacaagcaactttgtcccaaaaataccatcaccgttagggttctattagcaaccctctgttaagtgctataggatgaacagtgtatttaacagcgcgggatagacggaaccgtaacagcaatggcatttctaggataaaatcacttgtatgatgatattttatagaactcgcacttgtcgatgtcattttttggaattgggcgcttgtcaaaagcatttcttatattttcttttttttaaaaaaaatcaaagataggccaaagccctctctcatttccatgatgagaaacgtcaggtttagcactacaggttcaacagagaaagaaaacaacgccaacacagcagggaagggtgagatgagatctagcgccaacccacttggtcagctccaagcctccccctgcagcaactaccactacaaactatcgatcaacattactcaggggactcaacacatggtcccagctcccaggagtctcaaaagaacttcagcatgaaccttttctccacgttttctcacattttcgatcctcttgaacttcatttgtcagcttcaaccccatcagtcagtcctccagcccgctcctatcatgtcgctgtccatacttcgagttgtatacttcaccgaccacccgtttcagcagttgcgttcccaacagagttcttctttgtatttcttccgacttctgcaacacacccccaagacataagcaaagaacaaacaaaatgtatcacttcagctggatattttggcaactcattctgaaaacaggctttatttctggccttccaaatagcccagatgacagtcacaattcccaccatcaccatcctttgtctctttatcaaatctccccaagcccccaaacaaatggtcaaacactgtaaattgctttcagattaataaaggcacatttcaccacattccaaacaaaacgagctagcaatggccataaacatatactataaaatttgacaatctgacggctatgcacacacacacaaccttgcaaggtatagtaaaaaaaaatagcataccacaattactagctcagatattagggcacatataaaatttcaactatattatgacatataatagcataccacgactgccggtacctcacctccagatgttctacctcctctgcttctgggtccaatggaaccattgccacgacgtggtcttcaggaatcagtccttccgttggaaatgcaccaacgagctgcgttgatgaggcaggcctatgggctgatcgactacctagaaaggacagaatggtgatttcagtttgtaaaaatatgttttcttccccctcaacaatctaactgaactgtaaaactccctgtactaccctgaactcgttgcgatgatatgaatacatatacaggtggggaactctacacttcagcgaattgttaaaagaaagaaagaaaaccctttgtggatttcaagtcggatgcctgtttcccagaaaacaagaagtatgcatctcccaaagaagaaaagaaagaacaaaaagacttacatttatttttttgcctttcttctccagcttgagattcacatttcctgttcttctccagattcaggttcaggtcaagttggcgcagcttccttcatataagaatcaatgatccatacacgtaacgtacatgggaccgcgacgggagatctccctccaactcccgccgttgcttgctactccgcaaaagaaaagagaagcttcacactcacacaaccagcttgaactccctccaactcactgcaggcaaattgctaagccgctagggatccattcctggttgaagaaatgcctgcctctgcctgctcccaaatatcaaatcggctggctctcctagtcctaatacgatggagtgggggctctttggcaccatcagcaggaggcatcgagctcgaccatcgccgccgaccgatcgaccggcggcggcggcggcggcggagtggggaaaagataactgaccgacgaagacgaagagagaagaa

SEQ ID NO: 18556 - DNA, 3949 bp, Oryza sativa
ttttgtatttccgttattcttggcttcttcttcttcctcctcctcctcctctcatttcttgatttcttgggctccttttctttcttggcatcttcttcccggttcttgatttctacttccagttcttgatttcttggcatctcctcttctttcagggatcgcccgtctcggacaggtggttcatgtttggggacgcacgccaggcgcggtgcccggcgctcctggcaggtgcgtgcgcggttgtgctcgacgccacgcgccctgacggcttcgccatggtcggtcccgagggagacgtcttcgccgtcagcagcgacatcggtggtgctgggtctgatccggccggcggcgcacgggagatatcctggcgcgttgccctcttcatagaccccaacgccgccggcgttctccccttgccagacgggccctacctcgtccacagcacgaggagagggggtcgctggcgcgtgttcgtccgcacctcccccgacgaggcctccggcgtgcgcgtctacgtcgttgggacacgttcccgggaagacttggctgactctttgcacatcgccgtcgacaccacggacgacggcggagaggacggattggcccgtacgtggcgcgtcatggtggagtcggggctggacggggacacaggctcttggcgtaccaccgtccacaccggcggcagagccacagcgacggcctcggtaagaaatctcttttttcttgccaagcagtctgggcagccaatcgttcatgcaagaatctaaaattttgttaaggagacaagcagtttcatagttcttaggaactccagttctttaacaagtgctttcaatcatgagtagtagtttgcaatgcgaatgcccaagtgtaaaaaagaaaaaatggaacaacttattagcagtagtagtttgcaatgcgtatacccaagtgtaaaaaaaaagaacaacttattagctccagcactatatgctatacaacgctatgttggagagaagtcaaaaacgatggtttcttaatacaaaactggaattcactaatacagtttaatttctgcagcacgagcacgtctccagacccatctctggcgtcatacgcagcagctcgtccagctcccattcccgatcccgatcatcggagggcagcagcagcggccagcatcagcgccagagcaggtgggaccagccaccaccgcctccttgttgctccggctgtggcaccacccaccgcgtggagtgggtcatgacgtgctgccacaggctgctgtgcgtcggctgcgcggaggtcaatccatgcggatgcccagagtggcagaacaggcgggggttcgccgttcccatactgcctcagcttgcgcttgaggaggaatgcgtggtcgagggagccatcgttccacagctgccgaggtggcagatcttctacgccaggcgcaccggatcggaggtataccacgccttcttccgagtgcaggacgtcatccacgacagaggcagcgtgctctgccagctctttttctacgagatggacggggatagcagacgttggcaccaggtccgctttgagatagtggaacttccatctcgatacacatggatgagatttcctcccatgaccgaggaggatacactggcttttgagttcttggttatacagtacaggcaccgccgtcgtcagtagtccgttcgtatgtcacgctctgccctgcacatagtgtcaatctgtgtgtctgtcctgattttctgactccattttatcccatgtctatagtatatagaactgagccttgagatatggtagtatgcatgattgcatcctcagtttccaccgaatagttatggtggtgctagattctattctgtccatgccatcttttctttacaactttgtaaatcatcatccagagcagttgaaccagaactatgtgtgttgcttgctcgagacaaatcggatatgaagatactatgccttgctttttctgaagttacatgaatctcgttcacaggtagcatgtttttcttgccagcttggatgatagattcatagatctcccctttttctgctttgtttttcaaaatggtgatctactattgacatggtcacttccagattcattagtgcctcagtgggtgcattcaataaatatttccgaatgggcaggttacaaattggtgtagattgtttccttccctgtaattttgcactgttggtatctgaggtctggagaaactacgacctagaaaatttcctcaatgagacagctcttgaatcttctttacagtgaatccctgccttccaaccataatacctgccttctgtacattatcatgattgtagtttgtttctgatgaaatcttgtgggtggttacttttgctgcatctctggctcctttggtacattaaacaacccgtcatgttcaacacccatgctagagcagttgtcttgctcaaacaatttggagtacagcaatccactgtgaccaaggatgtgccctgagaatcctggaaatgcaccactgttctcctgaaggattttagggaaaacatcctttttggagtacagtaactcaagtgcctcactaaactccttagaattcctatgggcttcatctgcggaaagacgctttgcatgtggatccaagaacttatgcctcacaaattacaaatcatccttgtcactcctgggaaaagcctactcgttccctgactgcaaccccatgcacatatcattattttccatctccgtgacctcgaaaacatccttagtcctgggagatggtcagcactgctgctacatggttgatcctcagatgaagcatcatagacttgatcacttctagataagtgccgctgcatgttgcacagaatgtcactttggcattggtcaagagctttattgggctgaggcacaatgtcaagtcccaagagtcaggcaacaataccaggtgaacaatgtgtgaactccaactgttgtggtactctccccttggcagatggtgtatttgcaggaaccagatttcttttgctagagaaaccctgcaaaacacggaaaggaaacagacaattagcctcagtcgggagctcatcaagcaaatggttttcctgcagtaatgcagcattgttttgttgcctctttttttttttttggggggggggggaataattttgttggctcttttagaccctcgattgatttcaaaggcgaactgttgtaaggaagtaaacatcgggacaatgaggacgcacggtgaatcttagcaacattatttgctactaaaaaaaatctgaaacttgagaatgcaattaagcctactggaacagagctagcagaagcacaggtaaatcaaatcatacaccatacatagctgaaagctcgaatacatgacatgtaaactaaacagtgtcaataacatggtcgaaaccaccggatcctcctcctcctccctagctgacacgcccttgggttcggggtgggggggtgaatcaccagaacccaagcgagccccagaaccagtgaacaactcgcacctcggcgcgacggagcaggcgaagacaggggggggggggggggcttcgggcgacggtgcctcgccgcgggtcgcgagccaccggtggcgccgccgccttttcctctcgaggcttcgcggcgcaggccttctgttctgcccttctctctctgtctccactgactggtgggggcagtcggggtggtgggtccccccatgagaatgggcggtggtgcgctggatttttttgcacgcgacgcgggtagataactcaactgcgtgttgtcagtcaatgtggagtcgagagggctgccgcctgccggtggtggggttgagttggggagggaggccatatgatatgatactctacttctgattgagatccttctatcttaagacagtagtttctgttagatcaaatattacaaatattacatagagattaa

SEQ ID NO: 18557 - DNA, 4952 bp, Oryza sativa
caattttggcatgaactaaacacagcctaaactcggctgaaaccatacttagaattgtaatcctatctttctatatagttaaggcccacaaaattctaaaactcaacatataaagatgccatatcatccaaaaacaattattacatctcaaatctcatgcaagcatgataatttattaagttcaagaactttataagacttggtacatggtgggtcctgccgagcttagtcaactattattagatatgtggtatctataaccaagacacatcccacataattcatacgatattccatcacttcttgtaatatcctatatggctatacagttcatcctcactcaaattttagacctttaaaattccaagcatgttaaatcatcattccacataattctcaaaatatttcaatacatctctccatccttttatataatatctatatgcatatacaattcattctcaattagttaatgttatttcactattctctcattaagttatattatctcaattatttgtatccctcaaatgattaatctatagttggaattatcgtcctccttttcttctctcataaagccacatcatacaacttttacatatcaaaaatgatttagcaatcccgtatttataaacaaaactaaatctaatataaatatgcaaatagtatcaactaaatttgggcagccatcgtggccaaatccttgaaaaatacattgaaacgacgatcgctgtcgtcgtggtactcgacgggcacctctcgcttgaccaccgtgttgccgcggcgtcccgtgttcacaaaaagcatcctctcgccgccggcgcccgggtgaaggtcggcgatgcattcgtcgtggaggccaacgctgagcagcaggcgagcctcgcggcagtcattcggcacatcgacgaactcctgcatgcggaacacgcgctcgacggcgttccggccggcgtcgtaggcgaacacctcgtggcgccccgtggcgagcaggatcctgcctccggcggtgcagagcggcacgatcacgcgctcctccatcagctcgtcgctcacctctcgcggcagcctattcaggtagatggagcaacgcaccgaccacgacggcgacggcgacgccgagggctcgctgcacgtgaacagcccgtagacgccgccggcgccgcggtagtcgaagacggcgcacagcgagccgtcgaggttggcgaggtggcacattcgggaggacagccgcggcggcacgtacaccgacccgaactgctcggcgccgatggagaacgataggattcgccggatctgctcgtcgccgggggcggctggctggagcagccagtagaggtagccgttgacgaacaccggcggcatggctgggaggatgctggccgcggacgccggcactctcccggcgcaggggcgccacccgccgggctttcccagggtgtacacctcgcaggcgtgctccccgttgcgtctcttgaagagcctgaccaccttgtgctcgtcggtcgccgtgtcgagccgagcccggtggtcgagagctcgaaggggcgccatggcgtcatcgacgggagataactcgtggtgccacggggtaaccatgctagcggatcagggtgcgccttcgcggccggctggcacggcggcagcgcgacgtgatcgccggtggagaggttgaggaggtaataccgcggcgcgcggccgtcggagacgagggtgaggcccctgcacggcgtgggcgacatgacggcgtgcttggcgctgaagtagtcgatggttaggagctcgcgtgcggcggccggcggctcgcagccgcggagcgagcaggcgtagaaggtggtggtgttgcggtggtccggcggcgcgaagaagagcagctccgggtggcgcgcggcggcggccctggcgcggtgggcgaggatgaagtggtcggtggtgagggcggcgttccagtcgcgggagacggcgcggaggcggacggcggcggcgatggggaggcgcgtgaggatctcgtcgacgaggaggtggtcgggagaggtggaggtcggcggcgagcggcgtagcctcttggcgtctggcggagaagagtcgtcggacgccatttgtgattagtttttgattaatgcatacacacgtgcaccatcatcaaccagataatgcatagtatatgcctatatagagagatcgcgcggggttaatcgaatcggataatgacagcggcgaccttgtaggattcggaatcgtcctcatgcagatcggccatgacgttgctttggatgcggaggcgtcagatgcggtaggacgcttcggagccgacgggggccgtgcgaaagcccatgcggcccacctctctctgcctcacgcggtccgagcacccatggcccagggcccagcaacaaacagaaggcccgcggataatagaatagggtttattggatctactaaggcctcatatagttcgcgaatagaaaaattttggggtcacatcgaacgtttgatcgaatgtcagaagaagttttcggatacgaatgaaaaaactaatttcataattcgcttggaaaccgcaagacaattttattaagcctaattaatccgtcattagcacatgtgggttactgtaactcttatggctaatcatgccctaattaggctcaaaagatttgtctcgcaatttacatgcaaactgtgcaactagtttttcattttatctatatttaatgctccatgcatgtgtctaaagattcaatgtaatgtttttgggggaaaaattttgggaagtaaacaaggcctaaatgtgctgttttataaaaatgtcattactatttttgtctatctgtattcatgccatccgaatacgtataaaatgaaaatcatgccatttctgtcaagttttgaattttgttatgtttggttatgattgagaacttttatggtacgatatacttgtagcattatatcatgtaatgctgatataaatgatctaatggtatgaatcgatgtggttttccatttaaatatatcgtaagtttgtagtataaaatttaaaggggtaaaattgtctttctttgttatttagtgaggtcgtttttgttaaaaaataaagcagttaatgtagatcaaacaaatccgataccattgtggaggttatacgaatgtgttaacctaacaaacattcaaaataaagcggttattacttattagtagtcattgtttgcttaatgtatatctaccatatctaccatcggataagaagggattcgttcaaataccattatttagatgggcttcgctagaataccacccctaactacgacatctttgccaaaatagcattccggacaaaaatacctctatttcttcttcctcctcccttttgtgcttgaagaggttgctggtggccaccggggcgaggttgtcgccggccaatgagtcggggtgggccagcggctgagatgacgtaagcgacgtcacacacgagacgcatcctgggtgctgccccctctcccgacacgagcgacggtggccatggacggcgcgagcaggcacagacacgaccaccgtcgccgcgcggagcgagcgtgtggcggggatcgtggtaggatgagcttgatggagatgggagttggtgcggatgtccttgtcgccctgggaccatgccgacgagtgcttgcaccatcacttcatcctcccggcgtgctcgcgtggcggcgccgccggagctgctcaccacaccctgatggcgccgccatcgttcttttctggagttggaagaggcagaggtaagggtatttctgtccacgatggtattttgactaagatgcactagttgacgatggtattatagtgaaacccaattaaacaatggtattcgagcgaatcccatcctatgcaatggtagatatgtaattttctcaatgcaaacacacttgcagcatcaagcaactattcagagagagagagagcgctcttagttaaatttactgctgatgtgaatgtttttagcccgcagccggttactctaaggattcaaattagtatcatattatctttttttaaaaagaaagttttcaaataatcaaaatttcggagagtattctatagagtccctattctataccgtaggctttgtgtgtttcctcctcgggtgttgggggccctcacgagccagaaagaggtgggccgcccgccgcatgggctttcgcgcctccccgtgctcaccttttccaactccaacccccaccacccacacatccccaccaactctcccccctccacagtcactgacaaacatacccgactttcccctatggcccacccgcagtgacctgtgtctattcacccccacgtatcaaaagcctccgaacccaccgccccagccttgcgggtcccaccacactttgaactttgaattgcttcctcaatcctcatcagtggagagagagacgagcaaagcagagcagagagagagaaggcctgcgccggcgaagcctcgagaggaaaaggatgctgcgcggcggcggcaccaccggtggctcgcgacccgcggcgaagcaccaccgccgctcgaggccgccgtcttcgccggctccgtcgtcgcggcgaggtgaggagttgttgaccgattcgtgcgtgctcgcttccggttttttttttttttctgttcgactgagcaaactggtttcgccattgcccttggtgatcgattcagcggcacggacggcaaccacctcaccggagtcgaagggcgcgacggcgttgcaggatccggtggtttcctccatggaagagacctctgtaagcacaccatttttcatttgagttttaccttcccactgtgctgcgtgttgttgccgtaagcttactatgagtagtacgtgctaatgtcggcgagcgagtatggcgtatgctttgattcgtttgatttgcctgtacttttgagtagctctgtttca

SEQ ID NO: 18558 - DNA, 3448 bp, Oryza sativa
tgccatgctctgttgtattaggaactaatatattctaccgctacaaaatgtggatttctcaacaagaagaagaagaaatgaaaagaaaaagaaaaggtaaaagagaaattgcaccaagattaatcggtgcatataagtattgtagtatccggcaaaaatccggcaaagagagctagtagccgacgcagtcaacggccatggctccggtatccaagaactggtggaacgtgatgccggcgccggcggcattgtggccgcactcggcgtcgtcgtcgccggcgtcgtcgcagggtggatggttcaggtcgagccacaggccgccgcgcttgatgccgccgtcgtcgtcgtggccgtggacgtggacgtcgacgacgtcgggcttcttgtcgacgacgatcgcccgcggcatgccgccggtcatggcgcggtggcgcctcatgtggccgccgagagcctggccaatggcgaactcgaggccgcagatggagcagccgtggagcttgggcttggacagggagaggtcgccgtcgccgtcgagcctcggcttcttgtggctggcacggtggccgccgagcgcctggaacgacgggaacacgcggttgcacgtcttgcagacgaacgcgcgctccggggcgcggtcgccgcgcgcggcggcgagcggcagctgcaccggcaccggcagagccagcgcctgctcctgctgcccgtgcgacgacatgagcatcagcacgcgcgccatatcgctgtcctcgaatgcaaacctcttcatgatctgaatgaatgctttacttactgaaactttgtgaaccaacctctctgttgtctgaagactgaagctgatcgaaatctgaagcaagcttgagatgtatgactctccaatggagaagaagcacacccaggaggagtatttataggctggatatcatctcagctcactgtgataaatgcaacataaactaattgaccaatggcagtagtagtaaccagttggtgattaaacaaagcacaagttggctttatgagaagccaagaaccagtttaccttttgctttttattactaatctgttgcaagaaagagtcactactctgtgagaggaatactaataactatattattctacattgattcgatcatgaattgtaagagctagctatagctagcaatgcatgatgcatctgctgttggtgaggatgattggaattggagaagcaggagaccgtagacggcgtcgagttttcgccgtgccgacagctgttgcttggatcgatgcaagcgtcggaatgaccttgggatcggacacttttgttttgggtcatttcagacacggtgtcagtgcctcgttgacttgatttatgcgtcccttggttcatggagaaacaaaattctgaatctcactcactcagtctgctgctgaccttgttcatgcatgcgtgcagttcatctcatcagtgtctgtactttgtagattctgggtcaactcattcttttcttgaaagaaaaaagaaagtttgagatcaagtaggaatcacatgtgagtttcaatattttcactacaaatgtagaatcttcataaagcatggtaaactgacaagaagataacagcaacaccatttcagaaaacaaaacatatgacaatatgacaagaaacagattgtagcacaagctgagagtagtagtacactaccactagactaaatatatgtagatcattgaagaaaatgtagataatggcataatgctacatgtagtactttgtttgttactatgaggatatcttctttttttcatccactggaatatatgatgtcccattggactagttgcagtactgtagagcttaccttctgacagttcagtttggttagatttttttttttctgttcgtactatatgtttagtgttaatcaggaccgtacttacttctgaataccttgcaaggaccggagataaactcgtttgattatgcctagacatatgctgctgaatcttggaacgacaactgtacatcttccaaacgatgatcacctgcttgcttgatgagtgatttttttttagacaatgttgattgatgaatgatgagctcatgaaacgtctcatggctaatccaaatggcacatggaacagtatcttgcacctaatactaacttttgcactcactcactgtgcatgctgttgctgctgacagtatcagaaacgactcttccttatttgcatctgagtgaaacttcgtcagcacgaacagccatcttaaacaaaaatccagtagtggcaaatgaggctgaaactcgacgaagacaattgtaccagttcaataagagaaattattcctgttaaaataagcagttcctgactataattggttcttgaatagttggattgcttgcattggcaccgcacttgtctattggactgaactgatcaattattgctgcttgatgtaagcagaaaaggaagttgggggcaaagttattgtgttgtttacttctgctttctgtaacttgcattccgaactagtgctttgctgttttgatggattattatgatctaagagtttatgccttctgcaattgttccacacaatgtcagtgtttgatggggatcaaatggaatcttgcctctgttctgttgacatttacagggaagaaatgtagacaggagagaatattaggtcaataacctggctaatttgatcaaactccatgtgtatgtctgactgcaactctgaactctgcaagaagtatgactgaatcctagattaaaaatgtctctggcaagtaagtacttctgagacttggacattcagaaaagtactaactaattacagaaagatcagaaaaaaaaaagcttcatctgtttgctgcatctcatcatgttggcagcacatacaaggagcacaaacaatttgcaaaggccagttggcaaaggtggtcctttgtgaatcctgaagcaacataatccttttcctttctgttcgcggcgatacgatcaagccaatatagaaaaacaggaggaacaactgttcagtcagttgctctaaaagattcatggagctttgtgtgcacagcatgatgtccttttgccagagacacagatgagcaatttgcagtttcttgccaagaagctactgttcagcaactgcagatgattggtagcttgaattgggagttcaacttgtccctgcaacttcttctcattggtgcagcaaccctaatcagtatgaacttgtcagaggagacaagccatgaacatgactcattgcatgattataatttataagtagactttgtgtcactttcactccgacgctgcatcttgtgttgcgcctgccgttctccgcataaaagatccaaaatagaagtttgccttcattgtttgcctggagattcagcaacagttgcatcaggaatctcaaaaacttgccatcatgtcaaacttgtcctaagttg

SEQ ID NO: 18559 - DNA, 9639 bp, Oryza sativa
ggtcctcagggtgatccaactcctcgggcccgaggggtgtgacggggcaccccgagcccgaggggaggggaagaaagcggaagctctctttccgagggcgtggcccattcagggggactgggcccaccgtatccgccacacgagaagggctttcttttcccctagaccagggacccccgggcccatatcactgacaacacccaaaatttgattttgatcccttccatacccctcccttcagttgaccgtctaatttctataaaaatgaccattttaccctttagatgaacatagaaatttatgaattatattattaaaaatataaaagtttgtcacatgagactattatagttatgagttttttttatgatgcattattcatcacaaaaattatttttagataatgtgtggaggagtgatcctctctagcgaatggtcgtgagacccccccccccctttgtgagttcggccgggggagatggcacgatgatcaagggcctacttccgcttggcgtttaactgctaaatcgctctcggggatgtgtggaagacgtgtgattatacaggttcgggccgctatggagcgtaataccctactcctgtgtgtatgaaattatgattaactttcacaagaggtcatgtgctctggagggtaatctagatgttcttcttctaaagctcaagctatccaagagtcgtcccctttcctggggagtgaggtcctccttttatagttcaaggggataccacatgcaacgtccatgcctacccctccacgggagggggacccaccctgacgggattaggccaccatccatgtcttcagtcggacgtatgatggtcgcgcgtcctcgggtggggcccagtgctgacccccgcttgacacgggggtcacctctgtcattcccctttaaatgaatggagattttggtggctcaccacgcgcagaggttactcctgatagtgctaagatgggacggggcatacctaactccactccgcctgacatagggcggaatatgggggcactgcggcccgtccaatctcctgtgaccagtcatagaccggtcatgcccgactgacaggggtcagtcgcgctgcgccgcacgtccacccacaccgcattaaatgcggtgagggatggttggggcgccgcgcattgaaggcgctgaaccgcgccttccgcgcgcccgctctcctcaccacatggtggccgggcgagggcctcggggtagtatgcttcaaaagcccgaggggtgtgacgtggtaccccgaggccccttggccacttcagcgccatccgaggggcggggaaaggcgaggccgcgtggccacgtgaccagagggaaggatacttccctccgctatgtatacccccgagtccatatcaccgacataatgaaaaaaatatgtatttatttttaaaaaagtcataaaaaactaggagcattcatacaaagataggactaccaatgcttgcaataatttttttatgaatgctcccgataaaaaaatccattgtcctattaaaattttaaataaatattttaatttattacatttttttattttcaaaatttatgtaaaaattttctgcaataattatttagtctcactagtttcataaaatacacatactgtatactcaaaccaaattttcaatcggatttcaagtttaaattcaaacctaaaacatcaagggcaaaaaagatatttgcagccaaacgtaatagtgaaatgaaggaaaatgtaacggtaagggcatggaagggatcaagttgaaatttgaagggtatagaagggatcgggtaaatttcagaggtatgaaagggattaagtgagttttctggagtacatagtgaatttactcttgattttattattagctactaattcatgatcagtgcactcttcattaatttcagcatgcatgtgattaaccagtttgccatcagaagaatgtacagattcttttgctgatggtaatgagatacacatagctagactagtgacacatgcacacacatataatccaagtagtaatatagaaatgaggacagtccagggtccaagtaattgggaggtggtggttggcttccaagaaaccagcaaacaaatcatgcattgttaatttcttaattacatatatatcagacggagtcactagttagttaattaattaattaggtagtgactgtgaggtaatgtgaaagtatacaaaatggctttaatcaattggtgggctcacatgctaatcaacttttgtgatggcgagatgtgcgagtcctacttagctgtaggttgaaattagcttaattaagcttgcttgcttaattaatatagtaaattgattaaccatgcctgcatgacgatatatacatgaggtagcttgatagctggtcggcgtggtgcacgcgggcggtgtgttaaaataaatctctgaatgtttcagtcatcgatcgtcgtctctactcttgtttcataccaatgacttcattaattacctccttgatttgcctttttgagcttgtaattaagataatggttttttgttacgaaaaggaagaggtgaaggctgaagagatctgggttggttgagcatttttgatcgccttgctgtggccatcggaagcatcggtacatctcccagcagcaaaatatatctgaacgtacatgtgagcatcgtgtcgcaattcgattcctgcgagaatcctgtctcgatcgtgagttaagttcatccatgcagcagcatgtctgaatatataagttctccacttgtcgtatcctttactcaatactccgtagtaaggaacaactgatgtttttttttatttttttaataatggatttcaattaatccggcctttatattcacgagggatatacacaaccaaaaagagaaaatccatgaaatgccattgacaagcaccctaatcccagaaatgccatcgacaagcacaacttcccagaaatgccattgtacaagcctatttgtcccagaaatgccatcacagtcaatgtaccgtttagtccacaccgttagaacaaaaattttataaaaacgaccaaattgccctcactccaaattatactatctcagtccggtaaaagaaaagaaattgggaaaatcagagacaaccctaaacctaaccctatgggcgacggggacgatgcggcggacctataggaggcggcgtgggggcccccggcggcggcgcggctcccaggcggtggcagggcgacccctggtggcggcgcgacactcctaggccgcggcgatgcggcgctccaggccgcgccgtggtggcgcgagggctcccgacggcggcgcgcggctcccaggcgacggcacggcggcccctggcggcaatgcggcgctctaggccgcggcgtggcggcgcggggcccccaggcagcggcgcgtggctcccaagcagcggcgcgtcggccctaggcggcggcatgtcggcaacagcctctcaggcgacgagcggcgagaagatagcaaaatttctgaaataattttgatgccaaaatttgtgaatgtaattttggaataatttgattgatagcaaaataattatgtctgaatttaaatatgcatcaatgcaaaataatgttgcatgagcaaacaatacagaatgatgtgtgagcaaatgtttgcctagtggtaagattgtctttccatacaacctaacggagaggagttaacagcagttcggctgtgatggtatttctgggacaaataggcttgtacgatggtattttcgagaagttgcgcttgtcgatggtatttctgggattagggtgcttgtcaatggcattttatggattttctcaaaagatataagagtacttagactcacacctcaacaagaaggagaacgcacaaccgaaaaagaaaagaaaaccaaacgacctcaacacatccctgcttctctgcttcccgtcatattctcctgaaacggccaaatttgacgagtgaaagtcatctagtcgcctctagtgcgccgtgcaaacctccgttggtgccatctttatccgtttcaggtgagttgacgccacgcgccgccaattagcccactttcaactatcatcattcatcgtttagttagaactagccaactagacacgagctgatgggatcggtttttacttcgtcgcatttctaaacatccactattcatagtgcttagacctccgccgtcccgggccgtcgacgccgacgttgaccgggtgttttttttataccaagaacaaaagttattgatgccatatgcatttactgtcccacataagtttcagtccaaactcgagatcatgaaattctatcatgaaggtcggcagtacgagcactaaatttgtttttttttttttgggtgagattgtctggcctgaatctggtcaaacgctataaggtccaaagtgatccagcatatagtatcataggccaaatgtttaggcttccaatatgggctgcaaaggccgataagacgggctacgtgagcccattattgtggcccacatattggtgccgggccggcggcaggttcaggtccagccaaccctgcgtacttgggcctcacgatagcgaaatcccaatacggtccaacaaaaaatgggccgcgcgaaactccaaataccccgttctttgggggaataagttcacttagtgacccttaaagtgatcgaaatcacaaaaccggatatctcgacctccaaactcttaaaatcggtataatttgactcccttaacggttttggaggacggttttgctgacgtggcgcctatgtggtggtaattatcgggtctcctttacacgtgatgttgaggtggcatttagaatttaaaaatatatgtgggatccatttgtcagcgacacataaaaaaaattgtgggacacgtctctcccctccctctccctccagttccttctctctcctcgccagtcgccactccctctctctctctccctctctcctgcggcagtctggcggacggcgagggccggagcagcggcgggcggagacggcggcgagcggcggaggcgcgggcgtggcgcggcggcctgcgactgcgagcggcggagatgcgggaatggcggcggcggcgcccggccctcgccgcccgcggtgggaggcacacgctccctcctcgccgctccctctctttctctctctctctctttctctctctcccgcagcgggcggcgagggccggagcggcggcgggcggagatggcggcggaggcgcgggcgtgacgcggcggcctgcgactgtgagcggcggagacacgggagtggaggcggcaggcactgaacgacgggcgtcagcggcgcctaggcggagcttcaccgcctcctcgccgacggcgaccaggcgttcgagcaggaggacgacggtgggaggcacacgcggcctccctatatacatggcctaccgtccagatacgcgacaagaacgccgcaccggaagacgtcgagagcggcgagcacgagcggaaaggtgcgtacgtgttcgtcctcgctggttcctgatttcttctccccggtttttttggggggttttcttttgactggttacggcgtgcatgccgcatggatgatcggctatttgttttcttgggacaccttgcgagttgggttgagattgagaattgtttggttcgtttgcgccggtgacgattccggttaactgggtcttttttgcaggcacggtatggacggagacggcacacattgttacggcggtgatcggctccggcgtgctggcactggcgtggagcgtggcagctgggttgggtggccgggccgctcgccctcgccggcttcgcctgcgggcaccggcatcgacttggaccgcgtcgacatgagcggcggcggtgacggtggaggacgtcgtcgtcgtcgacccagccacgtgtgccttccgccgccgtcctcctgctcgaacgactggtcgccgtcggtgaggaggcggtggagctcgggccgggcgccaccgccgccactcccgcatctctgtcgctcgcagtcgcaggccgccgcgtcacgcccgcgcctccgccgctcgccaccgtctccgcccgccgctccggccctcgccgtccgccgcaggagatagagggagagagagagggagcggcgaggagggagaaggaactggaggggaggggagagagaagtgacacgtgggtcccacaaatgttttttagtaccaccgacaaatgggtcccacacatatttttaaattctaaatgccacctcaatgccacgtgtaaaggagacccggtcaataccgccatgtaggcgccacgtcagcaaaaccgccctccaaaaccaccaagagagtcaaattgtaccggttttaagagtttaggggtcgagatatccggtcttgtggtttagggtcacggattagatttcaatcactttcgagggtcactaagtgaactttttccttctttgggccgcccgaaatggaaatcccgttccggcccaactagtacggtcgcacgtaagttccggtccaacaagaaacgagccgcatgtaaatggaaaaagtacactgaaggtccctcaagttgtcatcgtgtcagtgcggccacatcatcctcctctctcctttcccctcttctcacccttcctcatctctatctctctcccttctctgcgagacggcagaggaaaagggcgtcggcgaccggcgacgggcgatgagccgcggggcgggcagcgggggaggggcggcgggggaaggagcggcgggcgggctcccccgccggccgtcgccttgaggaacctgcacgtcgcccaccccatctcgagcaccacctcgcgcggcttctcccccagccgcgtcggcccgaggtccggcaccgccgccgtcgccgtcttgtcagcggtgtccgagcactccaccaccctcgtcgccgcctccgctacggggcgcagcgcaggtgacgtcgtgctgaccccctgctcggctggcggcggcggccgtgtacttgtcggcaagcaacgacaacgccaacgccgacgaggcgcgctggcccagcgccgccggattgtgcagcgtgtatgccgccggagtggctgcgtgagctgcgagcccctcgcaatcctcgaccacgccatctgcttcccttccccccccccccccaccacacacacacacacacacgaacaactcaaaaaaacaattacagaattaccaccagaacctgcagatcaattcacagaattgtcaatttgaatctcacataactgatttgatggcaacaacagcatgagggatatatatacacacaagaaagtgaccccaaaaacatgatacacgaacgagacttggcttcgcttttccttggaaaatggagcccagtgagaaaagagagctactagaagcacatcgcttttcctcagagttggacgacaagacggcgacggcgacggcggcggtgctggacctcaggccgacgcagccgggggagaagccgcgcgtggtggtgctcaggacggggtgggcggtgtgcaggttcctcaaggacgtggacacgagcgcctacgacgacatgcaggttccaccaccgccgccgtcgccggcggccaactggaagcgggacgtgcaggttccatcgtcgacctcctctgggtctctgctgggtctaacggcgacggcaacttcgctgggtctaagccgaccgccaccgccaccgccgcccaactccacttccccagccgccgctcctctcccccggccaccattcctctccctcgtgggcctcatgggcgacggccggcgggggagcccactcgccgctcctcctttcgccgcccatgcgctgttcctccgttgcccgcgcgcggcctctacaccgccgccgccccacagctcctccccctgccggccgagttagagaagagaagacaaagagaagagtgagagagagataaggagagagatgtgggtcccacgctgactcagccgccacgtaggacaaaaccgggtcaaaaccaccgaaggacctattgtgatcggttttgattagttaagggacggcggatatctggttttacggttgggggacaattttgtaactcgatgacaagttgagggacctttcgtgtactttttcccatgtaaattgaaatccacggcataagtcaacttaccatccctcatctatgcgtcgagttcaattgacatccctaaaccataataccgaaaatctttatcccccatcttaaaaaaatcattcaagtcggatccaacataagttgatagctgatttcgctgacgtggcatccttgtggtggagtggggccacggtgtgtcgaacaaatccatatatttttttttctttttcttgattaggatactgcgtcaatgaaatcagctatctatagtgctacaggatctaacttcgatgattttgttaagataggggatgaagatttcagatattatggtatagggatatcaattaaagccgacgaaaagataagggaaggtaagtgaacgtactactacttaactgcaccgttcttgggccgcacgaaattgacaccccgttttcggcccaagtgattaatacgggcgtcccggcacaaaacgttaagtcgaatcccgtttcggcccaataaacgtgcattgcatttgcatgggccgtttctagcacgcacaccatcgatctctcgccgtcgccttccccgtctgcgacggcgaactcccggccgcgaggtgcgacgccggcgtgcccctgcccagcagcgagtgcaccgccgccttggacgcgcagttcgccggccacgatgcggctgcgacgttcacctcgtgccctgccggctgcgcggccgatagctaggtgccctgtgccaacgcgaccagctagctgtgatcggagatctcgccaatttcgccatgatccaaagctccctcatgctcatgcgtcgtcgtcgccgctgccggccaccttcagctccagcttccaataacctcttcctccattaattaagcaattaagcacgggataatgggctagctactagctagcaagctgatccgatccaatcaaatatctgattaattaattaattactactcgattcacaaatggatattcgtaaagattcttgctggattctcacagtagtactagtagatgactgtggaacggtgtgctcgcatgcgatcagaacaagggtatgcatgcatgaatcatgatgaattcatgacgatcgtgcattatgattaactgccagcgtgcattagggttaggactgagattatttagctataaaatcaacttgtacaaacttaattactactactactactgaattaattatacctcaaagttgccagctttaggggttagctatgggcggttcaatgggaggctggatactgtattcttctcttcgggtgcagtgtgatagtatcaatttaagaagaaccagttgattacgctagctaagctagctcaccgctgtttcacttcttaattaattaattacaattaacacgctgacccctctgcaagaaacggcgacgaaactagcatattactccctccgtttcgaaatatttgacaccgttgactttttatcacatgtttgaccgttcgtcttattaaaaaa

SEQ ID NO: 18560 - DNA, 992 bp, Oryza sativa
caaaattcaaaaagaatttgaatccaaaacttaaaacagccaaacatatccactggtatccatccacctgccccacggtttcatcggccgagctaaaatccaaatcgaactcaggtcgcccactgacatgcgggccccactaaggtgacggagagatctcaaccaacccctcccacgcgtctggctcgttcggttgccgccatttccgtgagggaaagggaggaaagcagttaagctcaggataaaccgcctcctaatttgagataaatccgttaatccgactcattaatccacggataatcactgcggcatcgtaggccttttttgagctataaatagagctcctgatcccctcctccactccacaccaaaacctctccaatccccaaatcctcctcatctcctcttccagaacctttctttttcgatttcgtgttcgagttctttgtgattgcagcgatggcgtccgtggatctgaccccgaggcaggcgaggaaggcgtacggcggcgatggtgggacctactacgagtggagccccgcagacctgcccatgctggaactcgccaacatcggcggcgccaagctgtcgctcaacgccggtggcctcgccctgcccagcttttccgactccggaaaggttgcgtatgttcttcaaggtattcttacatcgatcgcccaaaccctctacccccatagatgatcttgcggttctgattgcgatttgagggatctaaaaaattttcgaagattgaagtggaattgtggttattttgggtagtattgttttgatcgtggttataatctggctactgtgtgatgtaaaaaactcaaatattagggaaggatctcatattaaataattagaaggggtgaggctttgaacccaggtcgtctagcgcatcatcttgtggagctagctggaagatcgctgagcatttcttagctactgtgtgatgtgaccaatgcagttttgtcgttttggtttaatct

SEQ ID NO: 18561 - DNA, 3008 bp, Oryza sativa
ttaactgatatgttgtgctgtacttagttgactgatgtactagtaattttctattcctacatttgttctatttggaattacttgaaaattaatttatcccctgcaataatgatgacttttttctatttggaattacttgaaaattaatttatcccctgcaataatgatgattttgcttagtatatttcaagatgaatttgactgatgtatcacagtatagtaattttcttttcctacatttgttctgtttgaaataattacttgaaaaattatttatctccttcactaatgatgaatttgcttagtatctctcaagatgaatttgactaatgatgtttcactgtgtttgaccccttctcaggcaagggcacttgtggcattgtcctgccggaggcgagcaaggagaaggtgatcgccgtgaaggagggagactccctggcactcccctttggcgtggtgacatggtggcataacctcccggagtccccaatcgagctcgtcatcctcttcctcggcgacacatcgaaggcgcacaaggccggccaattcacaaacatgcagctcaccggtgccaccggcatcttcaccggcttctccacggagttcgtcggccgcgcatgggacctcgccgagtccgacgccgtcaagctcgtgtccagccagcctgcctccggcatcgtcaagatcaagtccggccagaagctccccgagccgtcggccgccgaccgcgagggcatggcgctcaactgcctggaggcgccgctcgacgtggacatcaagaacggcggccgcgtggtggtgctcaacacggcgaacctgccgatggtgaaggaggtcgggctcggcgccgacctggtgaggatcgacggccactccatgtgctcgccggggttctcgtgcgactcggcgtaccaggtcacctacttcatccgcggcagcggccgcgtccaggtggtcggcgccgacgggaagcgcgtgctggacacccacgtcgagggcggcaacctgttcatcgtgccgcgcttctgcgtcgtctccaagatcgccgacgcctccggcctgcagtggttctccattatcaccacaccaaagtaagcaatctccaaatccaatcaaaactattgatagaataatcaaaaccattgatagaatattagaatcagcattgcatttgtgtaaatccaatcaaaaccatggatagaatattggaatcagcattgcatttgtgtaattccaatcaaaacactgatagaatattagaatcagcattgcatttgtgtaagtccaatcgaaaccatggatagaatattagaatcagcattgcatttgtgtataattgtgctcatcgattgatgaatttgtgcagcccgatcttcagtcacctggcggggaagacgtcggtgtggaaggcgatctcgccggaggtgctggaggcgtcgttcaacgcgacgccggagatggagaagctgttccggtccaaaaggatcgactcggagatcttcttcgcgcccaactgagcagcttccctttgccattgcgtcgtcgcgtcggtgtcgtcttaaattaggattaagtcattaataatttcatctcttatcatgagatgttactaccttctgtcagtcttatgctattgcggttgaactgtggtgattcgccacttaaaattctattctattcgagagtgccttctggtgcaaatttgctctgctttgtttcatctgcaatttgctttgctttgctctgtttttgttttgttttatctggaatgcttgaatgcttgaggtgattgattcagagaagaggagaacagctgcgctggcaaaacaatggatggaaactggataaagaggaccttatattggaatgagatgcaacaactagtcttcatctctctttgctttctctgtttaatattttgctctctctgcttaatgggttgatttgcagctatcattgttgtgtttatttttattgattttccttcagacttcagaatcgacaagattagcacatacaatttaccttttagtaccacataccttaattaattctttaaagtcaacttctcttatgctttgttactcttgttttctatgttaaatctttagtcagtggagaatatttaggagacatgacaagcttttttttttatatagttttgttctaccaaaagttttgttcctattttgtttgaagtattattaaaaaatcaaattaatccatttttaaaaaaattagctattaattacgtgctaatggactgttccgtttttcgtgcggaggagatgggttttccgtgcgacgtgtatcatgctcatggacgcatctcttggggcctgttcactttgatgccatttttaaccttaccaaattttggtaaagttaaaaaaaatatgcctacatttaatttgctgccaaattttggtaaatttgttaaggtttttttttggcatcaaagtgaacagtcccttgattttcgtgctcatgtagccaacacaacgctcgtttcttgtgaagtcaaccatccaattagcaagcagattaagacaactttaaaatactaatcctactcatcttctgctgcaatatggatattgctggtgataacgtgcagccatggggattaaacaaaatgcaagtggagtgctccacatgatatgatattcgtttgatgctatcaatagtcttgtggattttgtaatgattttacaagaactaagctgggacaagtgcagctcacctactgctatgctatctccagccttcactccaaaggatgcctaaccttatcactaatttgcttcaagcgtgaatatacttgggttccactttgcagcaatacaaactttttaagcacatagatgtactatcaatggctaaccaatccatccattcaaatgatcataaaaaattttatcaaaattcaacttcttttttaccaggaacaggccaaaaattactgatcagaaaagggaacacaaactgcactacagaacaagaagagc

SEQ ID NO: 18562 - DNA, 2207 bp, Oryza sativa
catatcatcgacgagcaatcttttccattagaagtaccatcatatccaaaactatggaagggttcatattcaaaattggagcgctacactgtggaagatgcacgtgatattgtcaggtatcaagtttatcatttgcctttcgcattctctgtatcttctttatattctattgccaagttctttcagttcacttataaaaggtgttctctgatttcacgtctgaaacttcccgactctaaagctatgctaggaaaagaggtatgcttatttccaattacatatattttctttcatctagctgggtgtagtatcgttctattttagttggaagtttgggactctcagccgcaggggattgtatgatactcatgcaattacatgtttattgaactctttgtcacagtttccctagttgttgtttgtctagaatgttattgctctacaaggaatgtgttctgattattatttacatctgttaggtatccatgtcatggctgaaattgacgtgcctggccatgcagaatcatggtgagtttgcacgtacaatttcctattctgttagatttctgcttgtgcatcagtgaggtttgtcccagttgcttttcacgtgcaacagaattatcttatgtgcaaatcaacaaataatcacatgctgtttctttgtgtcgcttagagttgcaatattatgtgattaatccaagctcttagctctagcatttcagccgttatgttacagtaattcaagtgtcactacgttccatttgatccagtgatttaattgagtacattgtatatttgtgtacataaccaagcaactgggattcagttactaccttatatgctgtagcaagcatttcagatttggttttgccctgttgttttgctctgttgtgcttattatatgaagttgacttgttatctactcagagatacttatgcaaatattaatttctgcaggggaaagggatatccaaagctctggccttctcctaagtgcagagaaccgttagatgttactagcaatttcacatttgaagttatttctggaattttgtctggttagttcctctttccttcttaagaaaaaactggctcaatttagggattggttgttactcagagacacatgccttcatattttcatttatagtcaaactcaaatattttttgttttcatggagagtggatgcaaaatcactatagtaatgaattgtgacatgtgaaataggtaaggcactatcaaaatgggtgtacttaccccttagtgctttatctactagcgctgcaccaaaatggactgatcaattcaaattttggccatgtttgattactcatcactgtaaactcaaaacacaaagggattcacatgattagtccttctgcaggacagccagtaattctatattcctatattaggttcagcattttttcggtcactttagcatgcaactgtttgacaactgggtgtctgaatcactacagcagagcaagatgtgcaaaattattagccagagtaggaccatccttctgtacaatatcttcccactaaatattcattataatgttacatgataagcagcgagccaacgacagagagtgcaagttatacagcattctgtctttcctgcaatttaaccaaattaacttcttgcccttttcagatatgagaaaaatctttccatttgggctcttccacttgggtggtgatgaagtatatacaggttagcctgcttctcttgtttaataggaggcacttcattaataagagtgtaagatgctgggatgttgcaaacttttggatttgagtgtgagccaactatcttccattaaactgatatgttagaagctagatcttttatttctaggaagaaaatcttgtctctaatactccctccagtcaaatatatttgatgttgggacttgggagagctaagtcaaatgtatttgacattgggtgagctaaacttaggtctcccaacatcagatatatttgacttgagtgagtaatacttttgccaaacaaggctcgctgtgttgtaagttacaactacaatttatgtccgctttcctttaatgttagtttaaactgtaagctatatattattatccagaatatttattcgtaatctgtgcctacttcataccaaatccagtagagtatcttgtaaccgataaatacattatgttcattgatgtgactggtgaca

SEQ ID NO: 18563 - DNA, 2447 bp, Oryza sativa
tttcctgagtttggctttgacctgatacttatgctccacttgctggtccaagatttcatttatgggggcgggtaagttacgaccacctgttgctgcttggtgatctagatgagagatgagaacaagttttggtcatttgttacaggtcactgtcctccaatgtcaccatccttggccatacatatctacagctgctgtttttttctctctatccagagctcagttttttcgtaaggtgggcagtgaatgtgaagaaaggaataccacctataataagcagctgtgtgaaactttttcgttaaaaggaagagaaaaagattggccctttggactgagaccagtgactgtgactcttgaggcagactggagaatggccttttgtattgatgttcttcattgcactattgcggtacatatatttttcttcctatgtgaatcactgatgtgactgctggatgatccgtagaatacctatggactatgtgggtaccatgtaggagactagtagtcgatctgtagtacatgttgtgcaagttgagatctttttgtccctgggagtatttgtagtaatttcctgctacaaagtgtgtgcttgtgctctttcacagaatcatgtaaacctgtgtttactcgatctacaactgtagctccttacacaggaagcaagggatcctgtgtgacaccgagattaacattactatatgatatagttgaaacaatgttgcactcaacttagactgtgggccttgaccaatggactggtattgttatatgtacaaaaacaaagggtaccccgtggttgtaatgcaacgagcacaaatggactctttcattatgttgtactatgtaaaactatttttttaagaaacaccactcatgcacaagcgcgcacgcctgtctatgtaaatgtatacatgcacactttactcctataaacactttcgaggaccggcctggtcagtatatcttgaaattaataaagctataatggttacctcactatattgtgataataattaaccgtaaatacgagcacatattttatcacaatgaatctaacgaatgtaatagtaatattatgctttgggaatagaagtttaattggataacatttttggtgtgtatagaaaaccaccctttcctataaacttgggattaaacacctattcgattagcacagctacatataataaaattattttacaaaactcttacaaatgatcgtatcaaccaatcaaatctagaatcactcgtagcgtgaaacatcaatgttattaagagtttagtaagataattctagtacgtatagactgttcactatatacgcataccatccccctaccaccaccaacacctccatgactatcaacatcaccaccatgtgttcttcctaagattacatacaatcacatttcgtatgcatgaattaatattcaatttagaaaactgctctatatgcttctattaaatccacaaatctatgatatatttacgggcctgattggtagagctctaattcttaaatttagctctaggagttgagcatggagtggagctgtggagctgtctaaactcagctccgtctctctaattcattttgtaagagagctccacctagctctgctcttatttttggtggagttaaaactgtttggctgagagctggagctggagttgtaccaaaacaggcccacgcgtacttatcttaaatcattgcaaagttagcaaccgcctttcatccaacacatgtccagttcctgagtgtcagtgtccaaagagcaggtgtacctaacattatagccaagccaaggagaaagagagagtggccgttttatgtttttccgttccgttcccctagcgcttaggcttagcgctccatgtaagaccaagacccccgcgtcaaaccgcgggccccaccgcgcagccgcacgcacgaatctcggcgcggatcggacggcctctcccgccctcaaaaccctcacccacttcccctcctctcctctcctctcttctcctctcacccgcgacctcgctgctcgcctcgatctcccgatctgctcgtccccaagcgccgcgattcgccgcgggtggatccgacgccgccggatttgagcgtgggattcgactcactcggatcaggttgggggttcttctacttttgtttttttttctgattttttttggaatttttttggggggtgtggaatggcgtgagaatcaccatgcgggtttggtgcgatttcgtgtaggtttgcgtcgccggtggtccgattcgggtggccatggccacgcccgacgacggcggagggggtgtcggcggcggcgcggggaagaagttctggcgctccgcgtcgtggtccgcctcccgggacacgccgcccgatgcggcgacgcctgcgggggcgggcggcggttcctgggcggcggcactcgacgcggtgcgcctg

SEQ ID NO: 18564 - DNA, 3012 bp, Oryza sativa
catcctgcgcaagaacgggatcacccacgtgctcaattgtgtcggcttcgtttgtcctgagtacttcaagtcggacctcgtctaccggacgctttggcttcaggacagcccgacggaggacatcaccagcatcttgtatgatgtgtttgattactttgaggacgtcagggagcagggtgggcgtgtcttcgtacattgttgccagggggtatcaaggtctacatcgctggtgatagcgtacttgatgtggagggaagggcagagctttgacgatgcgttccagcttgtgaaagctgcccgggggatcgcaaatccaaatatggggttcgcttgccagctactccagtgccagaagcgggttcatgcgattccgctatctccaaactcggttctgcggatgtaccggatggcacctcactcaccttatgcgccgctgcatttagtacccaaaatgctgaacgaaccctcacctgctgccctggactctaggggtgcattcatcgttcatgtgctctcatcgatctatgtttgggttggaatgaagtgtgatcaagtaatggagaaggatgcaagagcagcggcgttccaggtggtgaggtatgagaaggtgcaggggcatatcaaagttgtcagggaaggaagtgaggtaccagaattttgggacgccttttcaagtgcacctgttaattcagacagcaatacaaagattagcaaggatcagattgattcagcatccaagactggcccggggaaccgtagggtggaatcttatgatgctgattttgagcttgtatacaaagcaatcactgggggtgttgtgccagcattctcttcttcaggtgctggtgatgagacccatcttccagcaagagaaagtacctggagttcactaaggcgcaagttcatctctaggtcgttagctcgagtctattcagattctgctttaatcagggacttggatccgcgggtggaccgagtacaacacctggctgcagaggcatcaacatcaccacctttcctatctccgagctctttgtcatcagattcaagcatcagttcaaagtatagttcagactcaccctcactgtcaccttcaactagctcgccaacatcacttggtctttcgcccgcttcatctaatttttcccacactttggtgccatcatctaggtccccccttcaccaatcatctaacgaggaaccttcaaaatctggcctggggtcaatacgctctccctccaagacctcttctatagcagaaagaagaggagggttttcatctctgaagttaccatcattccaaaaggatctagtattaccaccaagggtaccgaccagccttcgcagagaagaggaagtcacagataagagtaataataatagtgtaaaacagcttactggtgtgtgttgcccagagaaatgcactggcaatacttcaacagtgcacactaaaactggaataactgagcgtactgacagtatctcagaggcttgcggtaatttacaactattagtctaccgttggcccagcaaggaaaagctaactactttcactcgcaaggatcttgacccaaaatcagttttgatttttgttactcctgaagacagcagaagtgaagcagttaaaacggtacacatttgggtaggaggtgaatatgagagcagcaaatgtgttgacactgttgattggcagcaagttgttggtgatttttttcatctaaaggagctcggcaatactcttcctgttaaggtgcctacacttatactatacaatatctattttgtttactctactttgcttttaaaggttcagtgctagttgaattttatgctctgtaagaggttagagaatactaaattctaactttacgaagctagttgaattttatataccgaggatactaaattctagctttactaccatctcagatagttttccaccactgccgaaactttgctagcagccacccattatttatcattgctttgagctcactgcgcacactagtctgccttgaactctttgccttttgcgcgttgcagttatggaccaaatattttagtggaatacagaaatacagaatcatatgttatgctattactgtgtagaaatattgcaaataggtgaaccattttgtggctcattgagaattatatattcagaacattttcaatttgcatagactccaaatatgtttaagtccgataattagttactggacatggactttttttctttcatttatggaccatgacttcacaatcttctcctagattattggaccatcttaggaagggaaaatggaaacatgaaagcttgactttttttttcgccggtatgtagagtgcctagtgcggtagtgccagacaactttatcagatattttatcctctggattatattatgtcatgattcatgaccatatacctctagttttgtagtatatgcccatatgaacctaacaggcatagccatgcgtatactacaaaactgatgcgcatatgaacctagcaggcataaccacgcattggttgactcttctagcgagaagcacatggtgaatccttccatatcatcttacaaatggaatctataatttctgttttctatgaggcttcacattccattccatcttcttgtgaaataatattatgtatgaactggcatggtccgtaaacttactgtagaaaaaaaaagactaatacttctcttgattatttttcatatcggtttactgtagtagcacatggaagtatggaacttaggttgatgtttcatttattgggccacaccacaattctgtgcacttctggcattcactataaatcctcataaatttggcatgaattgtgtgaaccactgaaccttgcctagaattaccttctcttacttctacttggctggtggtttctcctgtccttacaaatgtcacgaataccaatcagcatctgtggatttatgttataaagaaatgttacaaattccacacctaagtgcaatacttcttcatg

SEQ ID NO: 18565 - DNA, 3694 bp, Oryza sativa
atacttcttcatgccatgcaacattttgttctgcctggaaatgtataactggacactaattggatcggaataatgcaggttttcaaagagcatgaaacggagaatcttttggaagtgctgaatgctcgttaatggtaggctcaggctgtaggtatcagcatattgtagtagcttaacaaagtcagccgtgaagtatgattgaatgaaggcatctcctccagaatcgctccatgcggtggtgattttcagcgaggtataagccgttacaactattccccttgaacatatagaccacagattccatttagtagaactgatgatggattggcaattgtgcctacctcatatgatttgcttatggtcagaaaatgggcaggaggctgccagaacgttgtatctgtgagttaaaacacacatggatcaggttttggcacaatttgggtgtatattctccgctcccctgtaatgtaagctcagaaactgggaggcaacggtgtcgttttcaccctaaaaatttcttgtacatctcgaaaaagaaacagatcagatgtgtaatcctcttgtcttataagtccctccattggtcttaacttttaagctaacacttggttgttgggtgtaccttctctgattgtgatttagtactcgatgatctcccatgtttattagtcaaaaatcattgcacgataaagggaaatttggttgaagtgctgacgtccattttactgtagaaaatcactttcatgggcttcacgttccggcccaatataaaaggcccccccgcaagtggtccacagtaccgttcctgcctgtaaatgggccaaattctctcgcgtgacgcctgtttacagttgggccggaaagaaatatggctgcgcgtgacccgagcggcagaagccacggccaacaaacaagacggcgtccagcactatattagtacttgtaatctaatgactgcaaagataattttacattttatatatcaagcacctgcagtgcagagaacggcctggataaagcctcaaaaacggcagccaagtcatttcactaccagcaggctgggcttcctcaactatttgccactggatcctcctaagctaatagcctaataacccttgagccttctgagctccatgttaacacaaccctacaacctgtcgtccagttaactcatcaggatgtcttcattcatatctcacaccaagactttggtgtttggtccggtgcagcaaggcaacaaatggggtggatctcttcttatgtcgtttggtcagctgttgttagcagaattcgacgggtttgcagcggctggcttctgcggtttacttctcaagaagctttttgtgtacagggctccgaatacaatggcctgttaccgaaaacatgttaatcataactgaaacgaacaatgtgtaatatcatggaatgatttacgaaggctaagacagatgacttacggcgccaacccactgcatccagctaagaggatgtacaaaccacacacaggacaataatatactcaccagctacaacaatacatggaaaataactgttatggaaaggttaaataacacatctatacacatttaaggatgataaaaacagcattcacctgtctagtcgtcattatcgtagcaaatgtgagagccccaaatgttcgtatggtgtacgatatgaagaactgactagctgttgcaacctggaatttgaaacacagtaaaacaatatatcgtactaattatgcaaacagtcacaatctagcttcaatttgtgggttaagtgccaaatatttaaaatttgagacagttcagaagattattttttgtcctaatttaatgtcccaccagacgtactagttagtattaaatttcatctccatttacagcttatgtggagaggtggtgacatggaaacaaggaacaagcaacaaaattgcacgttaaaatatcaaaaggttagtcttacactggataggattatgacgtcgtagaagcaatctggatgacgaaacataaagtccacagctggaatcatctgattctggagaataagtcctgtaatagaattacagcaacagagatataaaatcatgaccgtagcagttgttaataatgtactccctccgtactcgtaaaggaagtcgttttgaacagcgacatggtctccaaaacacaactttgacttcctgtttctataaaagtatttattgaaaagtgatatatgtatacttttatgaaagtatttttcaagacaaatctattcatatattttttacattttcaaactcaacaacttaagagttattcatgatttatattcccaaggtttgacttaaacattgtcctaaacgacttcctttacaagtacggagggagtattgcgctgtacagtgcagatgtacagggaaaacattgatagaatcatgaaagcaaagaattgcaggccaaatttctgcagcacataataaaagaaaatacagcaaccataagggcaagcagttaccgctcaaactaagaacacaggagcacattgtcgtgtagaatatttgattgtgtatttccatgtcataccctttaaagagtttatcttggaaggtgcttgtgaaaccatcaaatctaaaatcaacaaggaaatttgatccaattagatagaagtctgagggtcagagctgatcaagagaaagtaaaaagggaaagaaaacacaacagtgaattttaactgacaataatgtaactgtactaatactccaataccactgtagtaaactcattttaggggattgaactgcttatacttttgtattccacgaacgatattgaatcatacagtggaaagattttatatttcctagcccagattttttatgtgccagcaaacatgtattggtgtatatatataacaaaagaaaatagttctaacatggcaaaattatttaattgtattttgaatgtaacagtgtgttatatgattgatgagtgcaagcaaaagcagatttgcatgccaaatagagctgagtaatcataagatttcataaatgtaaactgttatagaatgctatgatttgcctcgctgagtttaagataagaaggattacccaagataaccaagcatgagtgaaacgccccaaatagtgttttctctgcctctgttgaatggactggcatccattgatgcctgtatccatgaagacaacacaggaaaaaaaatcacttcagaagaaataccaaaatctaagcaaggtacaaaattttcaattattaagattagttcttcggatgataaaactctcacctccatactgccaccaattgaattctagcgcatgctctattcctattataattttgtaatgcgtttggaaatggtggcaattgaaatttcttatgttttccaacacattttctatccgtgtacatttatctagcacgaaataatgtgatattcagcagtaaatgaacagagatggatatgggaattactgggtatagaatgaacaacgagcaaccaacagtcacgacaactgcaaagaagtaatcttttccaccgtacttcttcctcattataattgtgccccaaatctatcaaaattaaaaacaaggtaatagatataagaaaagggaccatcttaattgtcagggaaatagaactcgaacatggaacgtgtaaagtagagaagacaaaaaacgattcacat

SEQ ID NO: 18566 - DNA, 6634 bp, Oryza sativa
tacggcaggctacaattgaagggggcggatgccaactttcttctcatcattttagtggctacttctcgcgatgatgttttcttcatcataaggcagtggcgttcagatctaccatagaccatcgtcagcttcacttcgattaaaggtatcgcttatctatatctcatcctttagatctaccctatggattttgggcgtgtgcctttttggcttctcgcgacattatcttcgtagggtatttagctatagcctatggattttgggtgtgtgcctttttggcttctcgcgacattatcttcgaagggtatctatagaaggatgcaggtaatgatgttcgtggccttttgtgattgtgttaagtttggggtatggaggttctgtctcggaatgagggggcaacaatactagtgggcttcattcaggcggtacttgttactaattctttaactccggggttaaatccctaagtctgaccttagttggttgtacttggcaatggatgttctttccttcttgaaggcattgtctggagttcacagaatttccctaggtgaaaacctatggtctgatcttagttgattggaacatgacaatgatgacgcgtgcgtgcgtcatttcctcattggaggcgttgttttaaagggagtccatttgatagtctaagtgttgttttggtggagataagagatgaagattacttgtggttgtaagtcgctgcggcacggttgtagcagttgtgtcgctctttttccttttcttttataatattgataggctgtgtgcatcctagctatgcagaggccgagagtggtcttagagaaattgtatcttctcgatgtaattgtttaagatcaataaaactctctttatctaaaaaaaaaaaagggtccagttctagaacgaagtaacgggagcaccaagatgcatcgcccagtcattttgatttttgacgaccatatttttgtgttaagaaaaaaatcatttcatgactagattgaatcgaaccccgcaccaccaaaatggaggctcagtctataggcgacagagagcaaatcagccatttgtgacgcggatttcgaggaaacgacgaacagccacgacagatcgccacaatcccccgagctgttacccccattggtgggttcaaaattgggcgtgagcgattggaatgtgaaggggaggtcgaagaggggcacctggagaaggccgtagatgaggagggtgctcatgatgccgacgaccgcgaagccgcacctccccaccaatcggcgccggtcctccttgtccttccccgtcgccgccgccgccaccggcagcgtccccgccaccgccgccgacgccgacgccgaagacgacgccgcgtccgccatgccctagcctagcctagcctagcaggcgaatcggatttcgcggcgcggcgaggggagaggagaggaggcgatcgatggcggaggcggaggcggaggcggaggcggagtgaatgcgtcgaggcgcgtgggccccacgtggcagctacctccgctgggactcggcgcgtgcgctgactcctctctctctctatccggtgaaggcgtgcgaccaaagcgtacggccggtctgtaaccactaaccagtaaggcagtaaccacaaacacagggaagcgttcagattactccactctacacatgccaataagataagatagtgctcactccgttctactccaacgaatttagatataatagagatatgtccagattcatagtactgctaggttagtcttttatagtactaagggagtaaaatataacagcacttttgatttgtccccataaataacaatttttccttatcaaccaatcacaaccatccaatatttatatttcccaaataccttcgcttcttaaccaaacaccaaggttcacaattccgacaaaaaccggtcgaattccgcgaaatttcaacgctttgacacagctcataattaagtttcgattggaatttcgaaggttaaacggtagatttggtcaaaattcagtcaaaatttatcgaaaaccgatcgaaaattattcctatttaattctaccttctttaattctaaaccgatcgaaaagtaatgtaaaccctgccaatcacaacttattcctatttaattctaccttctttcttaaaaaccgtattcaactctaaaacttattatattttattatatttaattctacctacgaagatatatcctccgttcaaaaatattttaaattcatatttaggattagttttttttacagagtagtatattgatatattttatagaaaaatgctattaagaagcattatgaaaataatttctatgaccaagttttgcgacaatattgtataatttgaacaacactcgcaggatctcagttgcagtaatcttttttttttctaaaaactacttaacacaccattcacatgtaccagcatctttgagaagagtatgacgctcatcattatcactaaatcgcccgtgctagcatgtacgtggtgcctccgatacgatattattttagccaaaattttcaattttttttgaaaatttttcatgaattttggtaaaatttgttcaaattactaaattttgttctaagcttcagaaatttcatcatatcagcactgctcaatacaaaggccgaaaacgagaaagtgaaccctgggtggggatactttagaaatattttacattcgtgtacaaattttatgcgtaagaatgcttaaatatgtaaacggagggaattccattgttattgatcaaaccactaaaaaaataataaaataatttataatatgaaacggaaagggtaaaagatagcatgaagatggatatcttaaaagtgatacagaaaagttgaacacagccagcaaaatggagtacttgggcgattaggtaataaagccaatataatattagtagatagatagatcatgtccagtactaatacagagcaactaaacattgatgcgaggcagacacactgaattctgaagcagacatggagcaaaataaggcgaaatgggcagcaagcaaatcgaagaacgtccatgcggcatcgataaaaagcactggttgtttcacttcttcttggcgaggaagacgtcggagagcaccgtgtcagagcgcagcgccgccttcagaatgcccagcccctgtcaagaacaagaacagccaagacgatgggtgtgtttagttcacgttaaaattgaaagtttggttgaaattgaatcgatgtgatcaaaaagttagaagtttgtgtgtaggaaagtttccatgtgatggaaaagttgaaagtttaaaaaaaaaagtttggaactaagctcagccgatgatgaacattgaacaagaatgaatgaataattcatcagatgcacaatgctgcactatacctcgtccatggcgatgctgacgtacttctcggcaagctcgacgtctttgccgacgctgaacttgttgatgagagtgatgctggagatggccgacatgggcgtcacctccagcccgtccgtcaccatgtacgtcacgagccccttcacgtacccgctgctctccccgtcgcctcccgacgccgccgccgacgactgcgccggcgacgacgcggacggcagcacgagcgccacctcggtgtccatcgcctgcttgcactgcgggcacgccgccttggcctccatggcggccgtggtgcagtgccccgcgcaggtgtacagcttaaacctggccagcggcgatcccccggcgccgccgctctccggctgcagcagcaggagctcgcgggcgtccgggtggagcaccttgggctggagcaggtcggcgcggtccttgttggggaggaggtaggaggcgttgatgtgctcgacgctctggtacagccgcccgatgctgccctgcatcgtccccgccgagatgagcttcacgacggcgccgaccggcagcgtcaggaggctgaagacgaagtcgacgaactccttgccggcctccgcgaacagcaccttcttcgacttgctgtccaccagcagcttcaggctgatcttgctcctcgaacccatcgtttgtgggttttctcttgctgattcaggattcagtatgtattcagatgttgagaaaatgagattgctttgctgcgtctatatatagttctctcactttttacctgaccattcgattagtggagtgcttaattaatggcattgttaactgaaatctcctagtaggcttcttctcagtaattccgtggtgggaattggaagagccagagcctttttatcttctcaacactctgcttcgggaaggaggaattcaggatcagcagttaattcagcgttaaatcatcctcccaatctctccaacttcaagtttagtaagtttagtaggagtagtagtcattctgaatgatgcttcagaaacagagatccactacattcacatggctttatctgccaaaatggcacatttgagcagatgctatgctactgcttcaaggaggaaaccatatcaaaatgtaaagcaacacatttagagctaaataactgcattgcatcagatcattgttacatatcaattgattgaagctaaacctgaaggaggcgacacaaaaatacactatacctattctatcattatattcagagaaagttctatgtcaatgccctgtactgttccctgttctatgaatattgtcagtaaaactagcaaactactctgttgattttcttcaaccaaaactagcaccatcttttcgggaatacaccagaggtgcattttttcatactttactgaactgatcctcagcaatgatccaagtggtactatttctaaaagaatgaaacaaatcttaatgatgtcacttttgtaggacgtccaagctgtccatccttgctgaagtctactgctactctacgcttccacatcggggtaccgcaacgcactttccgctgaaattcgtcgatatcgagcagaacaacaattagagcaggtacaatatcaggctataagccagctacaaatatattttaagaagataaataaggagagagaaaagcagcgggctacagatttgtagccagctgtagcacggacttcaagacgcagtgtgtatatgacaggtgggaccagatattaatagtgtagtatgtaactattgtatagatgagctattagattggctatagatgaattagagctagtagttggctatactattaaacttgctcttagtgagcaattttgtaataagaacaagtgaacaatcaagtcttaaaacaagtgaactactctactaaaatgaaaattcagtaaccaatgctactgaataagtagtactcccacaacagtgaaaactggagaaaggcccgggtcttcccggctagtaacgcaagctgcgagctagccggtccgggttcgagcctcaccccctttttaattcaaaatcaatctagtccttcctagattggtcccattttatatcagtgaaaactgctactgaaatcagtaatgtcgatcagactacggtatgctcctaaactgaataatcatgcagtgaccaatgataatactctcacaacaatgaacaacgctgctgaagaaagcaagatcaaaattcagcaagcagctggtagaaagaacaaaatgcctgtagctagctactctactactgaccaacccaactatcattacagcagtgatcagtgaacaatactactgaaatcagcaacttcgagcattctacaatatacgccctccgttcctaaatatttgacgccgttgacttttttaaacatgtctgaccattcttcttatttaaaagatttaagtaattattaattctcatcctatcatttgattcattgttaaatatactttatgtatacatatagttttacatatttcataaaagtttttgaataagacgaacggtcaaacatgttttaaaaaatcaacggcgtcaaatatttagggacggagggagtataacttatgctactgaaatgaaaattcagcgaggaaagaaagaaacggcagtgagctgctcgtcagtcacctggtgtcccgtgattgagcacgacgatgtggatggggttgttgcccatgggcaggtcgacgagcagaggggagaggtgggcatagcggccggcgcggacgcagagcgtgatctggccggcgtcgcagttctggcccaagcgctcggccatcgtcagccgcaggtgcgtcaggttgttggtgttcaccctcaccggcgcccactcctgctcgccgtacctcccggcgttgtcggctcggacgtaccggatcacccgcgacaggtcggattccaccggcggattcgtgcggtgcatcagctgttcatcgatcgcacaatgcagtgacaatgaattaatctagcagagtacacattggggacaacagatatctgatagaacagtataagatcatgaaatggaattcagtttggaacaatcgatacacagtttttcaagaaaccagaaattaacaacgctcaagaattttcaagaactcgagaaagatctagctagggattggaaccgatccaagaatgtttgatagattgaatatagcacaggatcatgaaatggagttcggttggaatgatcgctacaccctgt

SEQ ID NO: 18567 - DNA, 6373 bp, Oryza sativa
  unsure (1)..(6373): unsure at all n locations
aacgggtacgtcgcctcccattgaaagaatttgtcaagtctaggacttgcacccgagtgggcaaatttccaccacagagaacctaaccaattgagctacattcacttcgtaataatgttggatattaaaacaaccataatatttaagctacatttctgaaatactcctatgacttttaaaccggtggaaatattatttctaaccgttagatctatcttatataagaaaaaaaaagcgtgtattcatggtacatcacatttcaaaagtattattgtgcaattatatttcgtcgttatcgtattcacgttagctggcgtggaacctctgacccactctacatgaaatgttcataagatggactggttgtcaaactacatctatcatattaggctatataaacccatacatttagtggaggttcacgtcccacccaattcatcctcgaataaaccatgataatatatatgcaattaaaaaataccttacttttactttacacttacttttcgttgacatgttttctaaaaaaaaataagtctaccttctttttaaatgatgaaaaagattataaataatttgtttatagatagtattacttaaatatgatataatataaagctaataggttaaaaattataaaagcaattaatgccgactaaaacaatttacggagaaatcgtgatagatgttcttcggttaatatttcgctcttacaagtgtctcaaacttagtgtacgacgcatgcccgcgtattcacgcgggctaccttcctagtttgttttaattcccgattaactacgcgtcgtgatcggtggtgcccaatttatttcctttttagttacctccgatttcctacagcgctaaatataaaagggaggctgacccaagactcaatctccccgacaaccaaaccctaaacccgatcaacataggtgctggaggggaaacgtgtgaaaattccgggacaatataggtggcgaccggaaggccgccgctaccccacaagtgatcgccggtgaccccttcgggatcaagccggcgttcttactgctacgactacttcccctatgccgatgatcaccggagctgttcgagggacttcgtcctctacttccactcctgttgacgacattgcagagggaagaaagagaattgcatcaatggttttaaacaacggtcagtaaccctaaaaattccgcattagggtgatcatgtttagactaagcactcatgttagtagattatagtttctacacatgaggtttacctgggccggtaggtcgacgagggaagggcgagaggccatggggggcacgacctccaccctccactgcatcatcgtgctggcgttgtcgccggcgacggagacgttcttgtgccacctgcggaaccttgccgtttgcgccgaaggtaccggccggcgcctttgcggaggacaaaggattcgcgccggcggaacgcctgccacaggtaccccggcggcgttgggcggacgccgaggtcgcgctgctcggcgacgaccccgtcggatggccccctcccggcgccgtagttggtcgccacgaggtaccggccgtacgcgccgcggaggcggacgtagggccccgcgctggctcccggtatgacgccgatcaccggctcgacggcccaaccgcgttgtgcaccccgcggcggccgcacaggaagacgctcgtcccgtcgtcggccgcggcgaggtacctgctgctgcggacggaggagcgcagacgcacgaagtgcgccacctggaacacctccattcgatggccggagatcgcggcggcggnggcngnggcggnaacngagacggagatggaggagaaggggagagnnagnnaggngagggggnnacgcgnnggcggcgccaaaggcgaggctattcgaagcgggagaaacggtctccgtgactcactgacaaggtgggccctgggatctggttggtgggccgcgttggggacaaagcccacggcccacccaaggcttcgtctccctcctcctctccccttcccatttcgccgatcccacccacggcggcgccgccaccgccaccgccaccgcccaccggactttgtgtagagagctcgatgggaatccgcggcggcggaggagaccggccggctcatggaggggaagatgcagggccacgcgtggaggaggccggctcatgcttcttcttctccgtcgatgggtatgtatcttctttttctgaagctttgctatgcaatttcgtcattcggtatgattattcagtttcaccaattttgcatgtattctgttggtataactaggactatcttggttctgattattagtgctacgtaatatacagagatgcgaaaatatagagattgctacgtaacagtgctgccgtagaggcttatggaacaggacgcactttcagattaatagaaaatacaattacattgtagaatgctaggcttggaaaacaaatcactcgtataagtattcacatgctatgttctaaagctggtattatagtactggattctcctgtgccttgttaggttacggactgaaaccaaaaagttgcctacagtttattttgcctcacaaattcaactgtccatcagggtagattcttgatgttcagttctaaactcaaaacttcagtcatttatttgctgattagcagaaatgctctagtgcggatagcatcaatttcctggttttgttttaacgcttcgtattaggattttcatgtggtttgttttgtttctttctgttatattccatttctttaatgatatttcctttatcaatttatgaataaacacaaattaagtggtagttctgccatcatgtcatgagatgctaacaatgttttgtgggacttttggcttttgtcatactgaagaagctgcacacgtttcctcatatggttacagaagtacagaaccgaaggaaatttactgggccgcagtcccacagctgtaggtgcatcaagtattcagaacatgctccccgccaaaaagaagtattcagaatatgctatcgttagagtaataaaacttgcaaacttctgtaaaagcaacttacatgaagcagaatctctttcctgcttccttaggttctgtgagtgccatttatgacgcctaaaggtcctcagagaaggtacaaaggccaaaaaaaatggcagattgacgggtgcacattttgatttatgatttagccgtggccttcaataggaatttaaacatgccttgctcctgtgtaacaggaagatgtcgaatcaatttctaatatttaacatgaagtgaggttcactttgacagctcctggaaattgattaatctagctgatttcatacttctgcttatataaacaaattattcagcagttttgtttcaccttctcactactagcacatcacggatatatgcttccatttgtgcaatgctattggagtttatgttaagctgtttaggatgtagtaccaggcatgcctatgggactagttagcataatgggccaaaaaatatctcaaagtatgaaagtatgtggtctagaaaattatgttacaaactaccttacatcgatgtcaatatgcaagaaataacatgctgcattatgctccgtttgtactcacagggacagcacgtaatggagttggcatgattgaattacaggatgttcctgctcactgaaacaagtaaatgatgacatgaaaggccgaaagcagtgtgtttctacccaggtttgatccaagcttgtgtcggctgaaaattcatcatctcttatcatgtgctagcccgccttgattgattgatgctactggacagtttgggattggtaattttctgggagtgccttatggggaccatctcccatcaattgttacttgcctcctgaattacatttaactgtgctatcttgtttgcaattcaggtaaagtctctgtttaggctgtatcaatcatgcatgtgaactagttaatgcaaaggacctaggaattgatgaaagtattaggcatcagcatcaatggattagcagcagcttctatcatcctgactcaattctgtactcccagggacagcagttgcctgctgatgttgctaggccactagtactatgtagtagtatacattacattggatatctcaatcatttgattaaactgtataatttttcggcgaaagctacctttgaatggtgatgtggttagtttgtagatcatgcactgactaaattaagttttcctctaatgaaaatggtagaaggtttactctgtatgtaatggaacacatgtaatttttgtatgctttaatatgaaaatacccatgcagtttatcagtttgtatccagtgcatttaggaatatctatctctagtctgcaagttattttttggggataaaatccttattgtactctgaactgttttacttgcatgtgattaggagtaggaagtagaaatcccctcttatctgctcatgtgagacctaacaggctaatctaccaggattaattaattaattacaaaggagcagttatggattatcttacactggaaaaagaagtggcctagtcaaggagagttttcttggagtgagctcctttgtgttgaaaaagatgatgttgggacatatgcaatggatttgggtgctcaaagcagttggtcacccatgttctgctccataaatgaaagagatgcatgggaacaagcctcatgtttccaggaagaacaatggcaaaggataacagatttgtctcttctcttttgaacacctgttaattagtttatgaaatcctttccaactgaaatttggcaccttctgtggcagtcactacccattgctgatgaacatggcctaagtttcagtaagtgcaatcccctatattaatgcttgataagtacttcctccgtttcataatgcaagactttctagcattacccacattcatttagatgttaatgaatctaaacacatatatatgtctagattcattaacatctatgggtacataggcaatgttagaaagtcttacattgtgaaacggagggagtagcaactctgaaacttgaagattaaacaaacagtaatttccaatggaagtttttgctaatgttcgtcagaacaccagatttttttttccttttgaattttgcatgattgccttaaatttgtcgtccattgttgctaatttgatcaaaacatgctacattagacatgctgaggatgtatcataaattactctgcaagttgtaacatccaaagtagatggatactagcatacatcaatgtgcagagagcatatcaagaatgaataagctctctaccaaaaggataaataaaattccgattccagccaagccaagggcatgaatgaactcgataaacctaacaatctctttatctcactgcaaagcaagaattactaccatgtcacactatgaacaccctcgatcactcactcacaagttgaaacgtcaaaacaaaaaataaaaaaagagagcaaggaacaggtttaattaaaatttgatactaacttcctatttacatcataattaagcaggatcaactctataataattctatcatgacgactcttaacactaagcagttagcatctactaatgtttttggttcatgcaaatattcgctcgccctcaatggtaatcacatgtcactgacaagtgggccctcaatggcaatcccttgtcactgacaggtgggccacacgaccaccacctaacgaaccaaccggtcgtaagctggacgcacgacagccgtccgatcccgtgcacacgacagcatcggatcggacggtcagtgcagccgatgccgcttggcgctgaacgccgccggcgagcagctggccgccaccgccgccgccgccgccgccatgggcctcttcccgcaggcattggcgccgccgccgtagccgatcaccgccgcggaggaggtgatcccgggcgagagtgacgcgccggggtagacggcgccaccggcccggacgccgacggggagcgtgtcgagcgcgaccggcggcgggttgcgccaccgcgggagaaggccggcgacgagcaggttctgcaggagcggcccggcctccatgacggactggagcagcctgcccctctgcggcagcggcttcttcatggcgagcatgtcgagcaccgcgtcggcgcccgcggcggcggcgtgctgctgcttggcggcgggaggcgggctggcgatggcgcagcagcgcttgtcggaggaggtgacggggtcgaagaaggggttgtcggcggcgggggaggagacgaggctgccgccgtcggagtcggtgacgctggaggtgacgagcggcggcggcttggcggccgcggcggcgaggagacgctgcagctgg

SEQ ID NO: 18568 - DNA, 985 bp, Oryza sativa
tttggcaagtgtttggacagggaagctcacatacttgagtgcctgaaacaatcaaattatatttggtaaattaataacatgaatcaataccaatgacactagacatgaataaatgggattgaatataacctcatattggcaagttgtagtcagtatgtttgatacagagaccacacagtacttctgaagtggagccacagggtccagggatttcttacttgcctgcatgaatgtacatacaggatttaggggtttagcatattctgttggaggtaatctcacagagagatctgtaccgttagcaccagcgcagacaccgtagacgtggtgatacggttacagaaaacaagaaaaagcgagtatctgaagaactccttttctgctccatatggaactctcatgattttttcctgcataacattacatcaaaatgttaattaataagtgatcatgtccatgtacacagtcgtaggtgtcttttccaagaagacatgtttatgaatacaccgtttaaaaaaaagactgtcggtaagtgcttatttgaaaggaaaaaagagtctagctcttttggataggaaagatgtattgtctttgttggatatggaagaaactagcaggggtttaaggaatgaaaggacgaatgttcagaaatccttttttttggtcctgtttacattgaactttgagccttgtgcagcatccaaacattgataactttccaaccatagattcaggacggaaaatggtgatttgtgtttaattcatgaacaatttagtataatcgagcagaattttgctagtaagttgacccaaaagaacaattaccaatctcagtaccagtgagttgatcaatatctacaaaacattaaaacaaacaaggaagcagtcgaagaaggggactcagtgcgtctcaacttaattgagcttatttgcaagacgagacaagacaatcaatccactgcacagatcaacttgtgaacacacc

SEQ ID NO: 18569 - DNA, 537 bp, Oryza sativa
atatatgtcctgtggagtgtggttgccctgaccaaaatgaggttaccatgcacttgtacctgcaccagtttgttgctggagcaaatcacccaaaccgcaatgaagaatttgtgatagcctcgagctatcctaatggattcggtacaacactcgttgatgactggtatttaacagctacaaccaatcccaatgataatatcgttgcacgtgtacaaggcatgcatgtccaggctggccaaagcaatgctaacatgtggtacacttcccacaacattgtgttccaggatgacaggttgaaatttatgctagcataactagatgtataatttaaatttccctgctatagtgttgagtaccttattgacttaattaattgttcaattgtatgcattgtcacttctataatcttctctgatatatatgaagctttatattttttatcaaaacaggtttaagggatccacacttcaggtgatggggattattgctgcaagcagtggtgagtggtctgttattggtggaactggagaattttca

SEQ ID NO: 18570 - DNA, 655 bp, Oryza sativa
cggggctgtcccccgctcgaacccggtgacgacggtcgtcctctgtccggatccagtggcggcgggcgtccctcgcctgacctcgcacggatccaccggcggcggtgggaggagagcagcgggcggcaggccaccttgcagtcctctcctcctcttcctcctcccgcttcttcctgcgcgctgccgtcatcgtggttgtcctccaccagctcgctgcttggccgctgccgtctgccgatggacgtcgactctgacccggccgccaagggcaagcccacccagatagacctcgaggaccaggtacgccgcagccgctcgactcgtccccacgggaattcttccttcagttttctattgtgactgcctaagcttggagagcatcttaatttctgttgaaacacttcagggaagcatttagctctcagagaattcatgagacttccatctataatcctaccaaacttctggctggttcgttagttctatgtgatctggatttggtttgtgtaacactaacatccattgatattctgaaattttcaggcttctatgcatctacaggtttctgtaattgataggttaacaagcttttctaatttatttattttttggtgattgctgcttttgctggatcaagcatcatgagtgaatagtc

SEQ ID NO: 18571 - DNA, 2490 bp, Oryza sativa
attatataacatatggattcgttaagcctttcatgcattgtggatgaaacttttaccgttatgtggttgatggcgctgtcgaccgatgttggattttccgccaactcagttgatgcgcaactgctgcgcttttggttgggacttcctaactcttcttgcgcagcagcagcggcggcctgcgggttatgttgctcttctcggatctcttgcctaatcttggccctcatcgactcgagcttctcgtcgaattcagaggtcagctccactctgatcgacgcccggatcttggcttcaaggcgtgcatctttctccgccttgttggaagtccgcttgtctagaaatccatacttccagagaacggtggacctaatgccccatgtccgtccacggtgttccttggtgcccaacgcttttgtgaggaggtcatcctcgtgtttttgagagctgacctcttgcaaggcttgttgctcggcaaccaactccttctgcattacaatttagtagggttaaatcgaaagctcaatgggaaacaatgtgtcacgtcctgataaattcatcccgaaataaaaatcattccataaaaggaataatagaattaattaaaattcgaaaagaaattggcaaacactaaaatacgtacaagaaaaattcgaatgtcgtccggagaatttttgttaaattctccttggtctaaaaggagccctcaaattttacttgaattttcagagcactggaaataattattaagcaacaaaaataattaacaaagtttactaaaaagaaaaactaaaaataatccccctcctccctttgggccaagtttggcccaaagtcctccctctctctctcggcccgcggccaaagtcctctcttcctccctctctttctctccctctccttctctccctccttctcttgggcctccccttcccctcccggcccactccctcttcttctcctccttggccgcctcggcttcgcccggcccaagccgagccgtgcctcccacccgtgccgcgcacgtgcgcgcgcgtgcgcgccgttgccgcgcgttgaccgcgcgcctcccgcgtgggtcccgcctgtcaggcgcatccccgacctctagccgccggcctccttcctctctctcccgtgaaccctagcgttgttcctcctccaaatccaccccattcaagccggctctttccaaattaaatagggggaattaatccccattgattcctctttgatttcccccgttttcccccttgaatcgtgtccccgattgccgggaacggacgcgccaacccccgccgctttccaaggccaccggccgcattcccgcctccgttccggcctctctcgttgccggctccctccccgcgcctataaaaaggaaccccctccttccgttctccagttttagccccctcccgcgctctcccgtggccgccccgcctctccccgccttctccttctctctctccggcgccggccgacctcagcagcacctcccgcctcgcccgtgcgccgtccggctgcgccgtcaccaccctcggcctcacagccgcctcctctcccccggtcagccctccgtttcgcggggaaaccaccagaggcgcgtccccgccggcaaccggtggcattgccaccactcactgcctccagccgcccctgccgcgccgctcaagtgcaggccggccgcgccgtcttctccctcggcgtcgccgcgtcgacctccaccccggcctgccctcggtttcgccggaacgccgtcgcccgcgccggtctcgccctccgcctagccggagttcattcggcaaccccttccgccgtgcccgtgcgccggcagacgtcgccatctcctcctctggcatcgcagcatcaaggttgccctcggcctcgcctcccctccatccgaaccccgccggtgttcgttatcgtcgtctccgttcgtcctcgtcgacgactcctccagtcggtcgttcgtcctcgccggctcgtcgtctcgctgcgctgccaccctcgtcgtcatcgcagcggcgtgttccgcgccgtcctagtctccgtgcagctgctgctggctgccctcatcgcctcctcgccagttccggtcgtcgtcctctcgtcgttcccggtcgtcgtggcgttcgtccctccgtcaagccattctcgtccgtcgtccgcgtccgtcaagtgtgccgctgcagccccgtcgtcgtcttcgtcctcgcctccgcgtcgttaagccttgtgccagccgcgtctcgccttcgtccaaggatcgccgccaaagtcgtcccctcgtcgttcgtctccgtcgttcccggccgcctccgccgcgcccgttcgtcgttgtcgttcccatgcctcgtcgcatggtggtaaggatctctcctctcgctgccccgtcctcgtcctttcggtgttgccccgtacccgttctgcggttgtcgaccccggtacccttgtaccggtgtcggtagtcgttcacgtgtgcgggtggtg

SEQ ID NO: 18572 - DNA, 700 bp, Oryza sativa
aaatttgacggaagttggtccgaccgagatagatctgtcggtctgactgttcggatgccgccggtctgaccagtatagatcaaccggtccgaccaccgaagtcgccttcctgcgcccgctgccgccgccggtctaaccgccggtgtgtcgccggttagaccgccgaaacccggtgaaacacaaatcgaagaattcttaaagtatatgacaattttattgcttctctctgtgtttacaaagtgtaccaacaacactccttacaaaaatctcgactaaactcgaaaccctaactaaactagcaactcaattgctctcaaaagcgatatcgggaagcctcacgctccccctctatttatacatgaggtaggcagcctaaagccacgaaccaaactcatcctaaaagtcctaatcaccatagaaaaccctctagtacaagaaacaaactttacataaccaatcaccaaccacgtgcatcaactctagcctaagtatcccgcatgatatctgtccaccacggacatcgtcttaccaccaagccgactcccggtccatcaccgcaaatactctcccgtggcatcgagtcacctacacatgaaacaaacaaagaaaccatattccgagaccaagctatcaccaacttgactcattgttagcaaacaacagtattacatacgtatagtatccatccagaagccataac

SEQ ID NO: 18573 - DNA, 792 bp, Oryza sativa
tttttgacaaacaggttaaacaacggaaatgaaaaaaatggtatcatgcctagaaatagggctgtcaacgagccgagctcgagcgagctcgtctgcctaggctcgagctcgatacaagctcgagccgagcctataaaatgttcaagctttctgacaggctcggctcgagcttgaccaagctcgagctcgactaccgagcttgattttttttacgtaatacagtatatatttgaaagattatcttaaaaaaataattaatttctagttcatcatattaatagaaaaggcaaaaaataataaaataaatatatgatgtcaatataaggcatacaaataacatattggatatcctaatttattaaataacaacaaaaatcatatattactaggctcgttggaagcttgacctcggcttgacaaagctcgcgagcttagggagaggctcgggctcggctcgtctggagctcgagctttttttgacagccgtacacagaaacatacatcattttccacataggcgtagccaagaaatgatcacacctaggacagaggagggcttagttgatgtgttcttagcaatattttaagggaaatgctaaacactggtataccgtctcgacgggataggatagacaccaaccaatccactcttcttctacctagctattctttctacaacatctctctcacgtgtgctgctgcaactaagtcaacgacgagctccggtgttgcatgggtgtggatgacggaggtcgcggtcgccggcgacgagctccgatgcggccacccccg

SEQ ID NO: 18574 - DNA, 609 bp, Oryza sativa
ggatcccccggcatcgagcttgcagctttcagcaggggaagattcagttcaggctgcaaacaaacaaaaaatatcaaatcttctgcaaattcagtctcactgaacatccaaacgtgtaagagaaaatacaaagttcgagcatttgcctgcaagtggcttggttgggactgatcagcaatagctgcatagctgaatgataaacagcaacacaaaacttttagtacattacaacatatatacacaatcaagtgtaacaagatcactgagagctaaattagtttctgaaacaagagagattactaacgcgataagcgcatcctccactgtcgcggctaagatccctggcatcccgacggtccagttaagaggaagaagcctgagatcagaaatagcccaggtcaggtgtgtctgaacaatgcacatccattgcagctatggctactttggctagtgattgatcttgtagaatgaaaagtacatatatgtggagcatgacgaacccatccttggagaaacgccctgccgtcggcttcaagcccaccacaccgcagagcgcggctggcatgcgaacagatcctgattaaaatgcacaaagaaaacaataactca

SEQ ID NO: 18575 - DNA, 1410 bp, Oryza sativa
gaaggagaagtcgaggagggcggcagcgcagcattacctagaatccaagcccgccggcgccgccggtgttaggatcaattctggcggcgacgaccacacgcggcctattaggcctgcacatttatatattgtttcctgcagatgcagttggtagtaagacaagtgctagaaatttgtcaagttaggtgccaacacctgaacttgagttcccctgcaatgaacaaggtttggtcgttgaagaactgaaatgattgacagaacagatcatcaaagggaaactggagcatcatgccatgtttgtacatggctgcaaatatgttctgttggggataactaccctaacttgaatttattttcctttcttgatgaatcctactctctcatgtcccaaacacaactttgatgtcctaaattataatgctatcaggaaagcaagtgcttttcgagccaaacctactcatagaatttccatgtatcacccatttataaacaccaatcctaaaaagttttagatgcttggctagcacatctgtccaagacaacatgggtttatggctgtacaacaaagcaccagaaaaaaaaaatcaaccattgctggttggttggccgatacagatttcagtaggtagaatgctagaatataaaagaaagagccccaaattccatggcagagagccacacaaatcaacgcacgtgcaccacggaggagtggtccttctcctggagcttggagatgacgaacatgtacaggtcgcgcacgcggcgaggcgctggtagggcacgccggccgcggtcaccgcttctgcttccttcgcgtcgagggacgtccgatgtgtgcaagcagagcgaaacgattttccccttcaatcaacgctagcagcgccaccgccgcctgccgggagtagcgataacccttttttttaggagtagcgatcggacttgatgcgagcgatcgagacagagaaatatcccatgccaaaattacccctaatctgtattaagagattactaatctaccctttaaaataaagggtcgagattaattctacttgtagtagaatactttaagtagagagcaccggatagtggactattgagtgctctgttttagattaaactttacactaccagatgacaataattaagatgagaggttgattcgcatgtttttgttttgcagtacaagaacaccaccgaagcggccgtggacgcgacgcgcatcatcctgcagcaatgcgagcgatcaaagacggtgaagcggatcatccacacggcctccgtcaccgccgcctcgccgctccgggaggacggcggcggcggtggctacaaggacttcatcaatgactgctgctggactcctctcaacttctcccaccgttacagcaatgccctgctggatgtaatcatcta

SEQ ID NO: 18576 - DNA, 893 bp, Oryza sativa
ttcgttgtactgcataccaagatttctcaaggttccatggacgacgcagcctcgttccaagagcttcttgacgaggtaggccgcgatgtagccgctggccccggtgacacacaccctgctcatctctctctctctctctctctctctctcttctgaaaccgatcgattcagtgagtgggacgaattgtgaatttgtgatctcagcagtagttgtcatcgcactgttcatatccatccattcctgccctgctgacctgtgtggctaactgagtgcacccaagactttcgttgtttgatttcctttcctgcacgcaagtgggtgtcatatgtggctctgaacgaaacgagtttcaggtccatatctcgcaggactgaccggcttgagctgaaaaatatatagctcccacgagatatatgcattaaagatcactacaataaaatcctttattcgtgatggatgataacctacataatgtatgcctcgtcggtgatcactagtaataagaaaaatatcaactgttacaagtgcggacctgtcagagatgactatatctcaaaacagtccaaaagttgtgatccgttgatgatgactataacccaacatttcctcacatctcggatcgatctgcgtttacgaatattcgagcaagaacgaatttgtcgttcattcgtttcttaccgaacacacacacggtatacccatgtgtataaggtcaagcaattcacgaatttttgctacacatcatcacatcagagttctcccaacctcttcgcgcattccacactgcaatccagcgtctcctccaccccatacttatacttgaaccctaaatctacaagcttcttggtgtcagcttgcaccctcaccccctccccaatgaccctgagagaga

SEQ ID NO: 18577 - DNA, 4622 bp, Oryza sativa
tcttattacccaaaaaagagaatgccttccgtgtaggtgatttcagaccgataagcctaattcatttcttcgggaaactgctctccaaactactagctaacagattggccccgagactacaacagatggtatcagcaaaccaaagtgcgttcataaaaggcaagaacattcaagacaacttcctctttgtcaacaacatggtaaaagagcttcactcctcgaaaacgccggcgattttgctcaaactagatatagccaaggccttcgactcggtcagttgggcctacctcgtagatcgactaaaagcgctaggctttggtcatagatggattgactggatcatttctatcctggcgagctcttcctccaaggtgattttaaatggcagggcaggactcagcttcatgcatggtaggggccttcgacaaggcgaccccctatctccgatgcttttcattctggcaattgaccccctacaaaaactcctcgccgcggcacaggaagaagacctccttcaacctctacaccgacgaatagcaaggtttaatgtcgccttgtatgctgacgatgcagtggtcttcacacggccagacaaacaggaacttcacacggtgcacagcattctacaacatttcggccaagccacagggatgatcacaaatctaacaaaaagtgaagtctactccattagatgtgagaaccttgatctacaggacatcctagcccctttcccagcacaacaaaagaccttcccctgcacttaccttgggcttcctctgcacatcagaaaactccggaaaatggatgtacaacccttaatagacaggttctcagcgcgactaccaaaatggaaaggaaaattgctaaataagacaggtcgctcagtcctcatcaaatccactctgtcggctctaccaacctatcatctcacggttttccctcttaagaagtgggcagcgaagaaaatggacaagatccgcagaggatttctttggacaggcgccgatcaggctaatggtgggcactgcctagtgaactggaaaaaggtatgcaaaccaaaaaatttgggcggactaggtataactaacttggagttttttagccgatccttgcgtcttaggtggctctggtatgactggaaagcagatgggaaactgaaagttcaagtgccattgatttggttttgatgattaataacaaatccaattatgtgagactaatatttttataagcatttttttgcctagtctcatgtggatatgaaagtggagtgttggtggacctaaatcacaaggatgaaatgcatggagatcaagctatatgtatcactctttctcttcatatacatattgatatgtttgtatataatatttccacgtgattggcatatgcatgtgagactaatgttttgtttgagtattatctcttatttagtctatttacattgagaacgtggagatgatgaaggtatgtttttattttaatatctatatttgagaaatgtcttctattcttgtataggataagctctcaatgtttaatattttgttatgcatactcttgcttcacacaaatattttgtatgcatacatttagggggagcaaatcctatactttagttatgcatgtaattgattaaagttattcaccttcatttaattgggatctttacatttgaacatatatttgagtatatgacacttgtggtgttgattaatactcatcatttattcatatccttttatacatgcgatcggttggtcaacataaggaggttgacaaccggatcattgggactaataagtttattgagttgaatgaaagaaataggtcccaaggattacaaaagtgttgatgcttaagtgatatcattacacctaacaataccaagaatgacaaagtgaggatattgaagatgtgtgatacgaagtggctattatggcaagacggtgaagggcaagcgatgctcggtcgcgatggaccatgcggcggtgaagggcaagcaaggggcttggcgccgaagaaccaaatccggtggtgaagggcgagtgacggctttgtcatgatggaccatgagggactatttgaagctacaagtaaccgcatcaatcatttgaagaatatatggtgaaacggtatcggcattggtctccctcaagacaatgaaagaaagataaaaaaaaaggcattcctaatagtataattatcttcttatgtacatttgagtttaggaatgccgtactattaagagggatgcaacgtcgaggtgtttgtgtatgtctcggtgctcaaagtgacctatcatagtgctaccttgagagaaacccaagctttaacctatcctttgagtggttttagaccttgtttttcgttgacttgggtagtcctctgagtgagctttccatagagtctaagttcataaaaaaacggactcccgagcgaaaagttatagtcgttttactctgtgcttttcggaaagtccgaaaaattaccggaaactccgataatttttcggacaacttcgaaaatttccggacattccgaaaatggctgcgaatctgagatttgcttctgtaagttttcgaacttgtccgaaaatgcttttcggaaactccgaaaattacagtcttggcctccaacggctagtttttgaggggctcgggtatataaactcctccacccctcctttgagttgctgctgctcttggggagtattagacacatccaaagccaaatagcatccccatttccctacctttgtggtgcctctttgtgagggggatttgagaaggggagagagttggattgagagagtgaggagttgagagctagtgagcttcactccatcctttgtggtgcctctttgtgagaaggatttgagaagggaaaagagttggattgagtgattgagaagttgagagctagtgagcttcactccatactttaagcactcgagttcatagcaagcaaatcttcgattgtgtttgttactcttggggactaaggtctcctagacggctaggcgttgccggtgagcacccaaggttgtggtgtgccacggaaagtttgtgaaggcttcgatttcgcctccgcaagggaagaaatcaagagtgaaaccgaggagtgcatttgtgcaacctcgtgagaaaagggttgaaataggcccggcccttgtggctcctcaacggagacgtaggatccgtggattcgaacttcgggaaacaaatcgcgcgtctcccctcttggtttgcccgttcttgcattctctcatattgtgcttgagcttgtttttacccgatctacttgcatgcttatttgatttagttggtgaccttatatcttgcttagataccttatttgtcaccttttgattcatatacattttgtttgtttgagctacaagttcatagctagtgtttattccgttatccgccgaacttttcgattgagaccggaacttccaatcccataccggaagtttcgatttgaatcaaaagttatcatcactctaatgtgctatgaagttgtgataatttttaggaacacctattcaccccccctctaggcgacattaaggtcctttcagaaaccatggcaaggctccaccctaccatgcgatgaaacggacaagcaactcttcagggcctctacaatcatcacactaggcaatgggggcaagacaaagttctggcacgacagatggcttgatggccaatcccccaaagatctatctccttccctatacaagcttgctatgtggaaaaacaaaacagtggcccaagaactagaaaaccacaagtggttacggccactccgaaggatgaactcgacgaccgaggttcgagaatttatcctgctctagcacttgatacaacaggtacaactggatgaagacagggaggacgatctaatgtggaaatggaatgcgaatggaatctactcagccaactcggcctacaaaattcaattcactggaagcattcaggacaatcgtgctaacttcatttggtgagcaaaaacagaaaataaatgcaagttctttggatggctcatggtccaaaagaaaattctgacgtctgacaaactccaaatccgaggttgggacaacagtccaacttgctccctctgtgggacagaaccagaaacagcgacacatctcttcatggattgccccttcgcgaaacaggtatagacaaacatttggttgaaactaggactcaacatgcctaggtcttcttccttcaatggaaacatgatggattggtgggaagcttgccggagagaaatgatcaaagagcagagaagaaattttgatggcctcttcatctacacgacatgggggatttggctacaaagaaatgctataatttttaacaatgactatggtacagtgtcacatgtggttgacttcatcatcaacatgtgcaaagccttcgatgaagcgcaaatcgcttagatgataaaacgccgacttttgctgttagtggctttgcactttctcaaagtgctgtaacctcctccagtgtaaaatctgaagacacctcttggaggtgtccatgtacgtgaaactatttctttctcctctaatgaataggtagagctcctgccattatcccctcaaa

SEQ ID NO: 18578 - DNA, 10148 bp, Oryza sativa
cagatagaaactcaaaaggtaagtagtatacggtagcaagcatatgtaagtactcccttcgtttcaggtatataacatgttttgattttggtcaaagttaaactggttcaagtttaactaagtttatagacaaatatagtaatatttacattatcaaattagttttattaaatcaataattaaataaatttttataataaatttatcttgagtcgaaaatattactatttatttctataaacgtggttaaatttgaatcagtttgactttgaccaaagtcagaacatcttataacctgtaacggagggagtagtgactaaaagaatatgacgtcatattattttagcaaaattgtttttcttcccttgaaccgcgtgacatgacgttttgagcccgtttggtagagcttcaactcttaaatttaactctaggagtttggtctgaagtaaagttgtggagctgcacaaacccaacttcacatctctagttcattttgtgatagagctccacccaactccactcctattttaggtggagctgaaactgtttggctgggctctaggagaggtggagctggagttgtgccaaacaaaccatttcttttcgttttaatttggtccattaatttgacttccttttgacatatcgaaatcccgatcgacccatccaaatttgtgggcttaaagaaagcctgctttgatggagttcttttttcctatcgataagattcagatatatatgatccgagaaaaaaataaaataaaaagattgagctagatactttccacgcgaggtaacaaaagtcgattaatcggatgtcatcgacggtgacattttaaaagatggactttttatcctaaagtgaacatgtcctgtatatcatttgaaatagttttgattttttttttataaaaatatagtttgataagatatatcaataatcatcatatccctacacacacaaattcattatacctcaacatgttgcttaaaagaataaattatactctaactacaatacgcacaccatttcatgatcgtatttttttttcaccaaatttaaacttgtatgccgtgaagtaataaatcgtatattaatctgccttgtccttgtccattttgtttaaaaaaattcataactgttttcactgacttgcaagaaatgagagatggtatatatccttaaagagagagaaaaaaaatgctttcactcttttttcttcaattataaaagaaactatttttttcttattattatattgaaagataccacgtgcgcacactagcgcaaccgaaaatagaatagtcccaattaattcccaaatcactagtagtggaaccattttaatactaatccagtacaaacagacgaaccattggaaatatttggaaaataataagatttaagtcaaagaccagtaacccctatcaggacacgacacgctaaaatgatctgatcgagggcttattttaagccagatagcggtggacgagccgacgaatcagctgacaaacacgtcctattcgagcccgatatctcttgatcgctttccctctagttgctgtcagccaaactcagactcaaccaactactgcactagacagtcaaatttaatttgaaataatgcacaaacttagcaagatttaaggagaaatttaacacaaactcacgaaggacaaagtggacgatatatatgataatggcaagtgtgtacagtaccttagaagtgacgattgacaacgctgtattttttttggacgggagagtaagccctgtttattttccaaacaaaatttttgactctatcccatcaaatatttagacacataaatagagtattaaatgtagaaaaaaaaccaattacatagttcgccagaaaattgcgagacgaatcttttaaccataattgtgcaatgatttgacaatatggtgctacaataaatatttgttaatgatggattaattaggcttaataaattcgtcttgtagtttcctggcggaatatgtaatttgttttgttattagactacgtttaataattcaaatgtgtgtccgtatatccgatgtgacatgtaggggtaaaattttttgccaactaaaccagctgttagtactactccctccgtcccataataatatagtgtatcacatccatctatccagattcaatgtgtcacgttcctctaaaatctcttacattttagagggggagggagtgctagtttgttctcatcgtattcatgactgttcatgtaagtacttcatgctagttacatgattactcgcatgaacagtaacaagttgtcctaggaatctaggacgcatgccgtcagttcctgcatactatgtatatacaacacagtgtactgacaaagcagtcacgaggttgcacgccgtcgtgagctgtaaactaatctgccgatcgaccaatcgacgaccaaactaattaaccaagggatcgatcgatcgatcgattcgaggcagcagcgcacatgttgatttatacgcaccttggtgctgctggggtcgtgctgcagcggggtggcgatgaggaagacgaactcgcagccggcgatggcgggctcgaaggtggcggcgtcgtacatgtccgcctcgaacagcaccagccgctccgccgcgccgggcatcctcctcagcagcgccgtcttcttctcatcccctgtacgtacgatttcttcagatcagcaattaatccacagattctgaatgatggatttggcgatcttagcagctgagatcgagatcgaggtcgatggaattaatcatggaaaagagagagagagagagagagagagttaccgagatctcgcagggttgcatggacgacgcagcctctgccgaggagcttcttgacgagccatgtcgcaatgtagccggcggctccggtgacgcacacccggctcatctctctctttctgaaatctgaggctcttgctggatctccagtagtcaagctagtgagaagtcaaagcttggaatgggggtcttcactatggctctctctctctcctctatctcttcccggccaatttaaatagtggcgcacctattgacttaggctgtgtttagatccaaaatttagatccaaatttcagtcattttctatcacatcaacatgtcatacacacacaacttttcagtcacatcatctctaattttaaccaaaatccaaactttgcgcagaactaaacacagccttacagcaacacatgcatgcacgttgcaatctcctagccgccgcacacgccattcgatttctcttttgcaatttttataagacaaatcacatgctcacgcagcctatctacaccctccgttccaaaatatagctacatgtatgtttatgccataaatctagatacgatatcttgggacggagagagtattcattagaattaaataggctaggtccaatttaattctagtaaatttcattggcacacaattaatattagaattaataagatatggattttcatcccttaaggggatatccactcattgtttgcatgtcatctaaaaaaagttatgaaaaaattgaaaaaaaattaacaacatagattaatatgaaatatatcacccataaacatgcaagaccaaattcaacttctacaagttgtaacaaaaagaacaaattaaactaaaaatagttatcgtacattcccatctatatttgttatttttgttacaacttatataagttgaattttaactatcatgtttatggagtgatatatttcatattaatctatcttgccaatttttttgatgactatttagataacatgcacgaaacaaggggatatcctcttgagggatgaaatcactttcccggattaataccgtcttggaaaccagtatggagggaactcgacttatatataatgctaattgagagcacttattgagcggttgatgaggtggtggtgggactgccacacgccctcgccgagccgagcccatgggcgtgagtgtggcattttttctattcatctccctggttcttcctctggaacacaccacccttctgatcctctgttcctgagcagcttacgcaatctccggttctgagcacatgcgggcataagtgttcgggacgcaggcctccggaactccgttcacatgagtacctgcacgggtaagcggacgattaagtttgtagtgagcatgaagaacgcgtgattgctcttggcacttcttcctctatatcatgttcttcttcctctatatcaataatcgggatcgtgtctaccaccaatggaggaggagacggtaacggtgatgacaacaccatcacgtcccccaatgcctctagatctgaagcgttctctgggtacgtcactttattcactttagtgttgaacatgttactagatgatgctatttatgatattaacatgttcatggttagcaatataacttgatgacactctttttcgtatgccatgtttgttatgttatatttttggattaaaatatgctaaattatgactagatttttctaacagtatcttctatgtatcatcatctgtatatttgtcatgtctgtatatatacatggattcatatttagatatagatacagatatggagatatctaaatctaaatctctatctatgtctacgtctacttcctgatggtatcctttgaagaagagtggcatgcctcatatagccagttaattataggaagaatctataaaatattcgtaagtttctttatgaaaaacttttaaatataattataatataattacgatgtaattacattataactagcatgtaactggatgtataactacattgtaagtagcataacataatcaagttatcgttacaattattagacgaattaaactaagacagcatatagttaattttgtaagaaccgtgattatataaagaagaaactgctctagcaatagagaatatcgaccgccgtgttcttaataaaataactgcgggaggtctagaatattgtaaaaatcagaacaagacatatgttctattaaaaaatatcagaagaagtaaagactatagtttaatctataatttataggtaaaaattgctgttggacattcaaactttatgggtttaggtacaggtataggacattgtagaaaaagatctctagaatatgacaaccttaaaactcgaatgggttatgcccataattatattttctcattgccggtcatcaacataagagactataagccaactataaacttatatgaagaagagagaagtataaaaatgaagagagttagctctcacgtaagagtgagctattcacacatttcaaaataaatgtatttataatacataggtgagagaaagatatagaagagaaaaaaaacttagacacaatcttatagtttgtctaccatacatattaactgtaatactataagatataaggttatagttagctttactatttaacttgctctgactgagagtttggttttacctgatcaactggtaaagcgttcagtatttttgtattgactccgtgactccatgcggcaaggttggtttggtctagtctggaggctggagctgcccggtctggtattggtggaggcagttggctgcggtctgtggccaacgttacgcttcgatggagacaccgtccactacgtcctgtccactggctaatggcgcctagacaggcagtgcacaggaaaggggaacgatggttttggacttctggctagggtcggagaagagggcaaactttgctacatgacactcaaattttatgtaatttgctagcagacatcgtaaaaacgtattacggctgaaagacactcgaaaaaactggtaatttgctggagaacactctcagctcatttggagagagaaattcttcaaaaagacaagagtacccctagggtcaaaatctttttgcgctgagactagaacaaagatggaatataatgtatgctagtgaagtacttggggagatgacaaatttagatttgcataatttctaaatttttactctaacatcatgtttgaagaatgtgatcataggggcattctcgtctttattaagaatttatcaattaaattcagccgaaagtgtcctccagcaaattaccagctttttagagtgtctttcagctagaacacgtttttacgatgtctaccagcaaattaaacaaaatttgagcgtcctgtagcaaatttgccaagaaaactccgagtctctaagttttcatgggcttttgtggcccactctatccacgggccgacttctgggccgcggagtgttctttattggtagtagtagctatttatggaataagttcacttgtggtcctttaactagtcaaccaatccgattttcgtccttcaaccagaaaaccagatataacgggtctctcaactatcaaaaccggtataaactaggtccctgaacggtttcgatggtggttttggcagacgtggctggtttgacttggtccttgccctacgtggcggtgatgtggcactggaaacaaaatttaaaatttaaaaagaaatgtggggcccacatgtcagtcagataaaaaaaagtgggacccacatgtcagtgagtccaaatcccctctctatgcacggacgacaacgcgtcagcacctccttctcctctcttcgtctcggcaatccttccttctcgagctcagctcgccggccggcgaggggagtggagagggagaagggcggcggccggtgagggtggcagcccgcctgctccctctccgcgcatcgcctccctctccccgctctcgccgtcctccctctccatgcgcgcttgccggcttcccccatatcctccctctccgctcctcgcgcctcctccacaaagcagcagcctcctcctcgccagccgccgacagcccaccgccaagtgcgggcaagagagagggagtgggcatccgccgccgaccgcatctagcgctgggctcgtcgtactccggcgggagcggctcggacgacgacgacagttgtagggatgactccaacgaatctcccggcctccctggcccctcaccggtagcgggggcggagaaggatgacgagagcatgagaggagggcggcgacgacagggtcctagatctgcgcaagatcgggactggacactgcggcatcgttgtcgtcatcctcaacttcggaaggggcaccgtgagcttctcttcgttgtccgcaatccttgccaatcaccacccttttcctgtctccttgctggccgccacccactgtgcatctctccctccatctgttaccgtcaagcccccacccacggcactcggccatcgccgacctccttacgtccttcctccccgaccgtctcgtcggttgccacacgctgctccctcatctaccgtcgggcgccgctggtgcctagagagaggagagggtgagaatgacatgtggggcccatgtgggatccaccaatttttaattaaatgtttttgtgtaactgacatgtgggctcggtggtttttattattttccaaattaaattgcttggtaagctccacgtcaatgccacgtgagatgaagaacgagtcaaattagccacgtaggcgccacgttagcgaaaaccgccatccaaaccaccttggacttgttttgcaccggtattgatagttaagggacatgtatcttgttttgcggttgaaggacgaaaattggattcgttgacaagttaagggacctcagatgaacttgttccactatttattggtttcacattacttactacctgatatgaagattaaaatattactccctccatctacttttgataggcatatttctaaatctgaaaattttattttggcaaaatttgctacaggacactcaaaaaatgtgtaactggctgagagacaccgcaaaaacatgacacggctgatgggcactacaaaaattatgtaattagctataggacaccggatacaatattttataatttatggctcaaatgaggtgagaaatttttcgaaatggcgaaattgcccctggcaccatcttccacacaagattttgaaaattttctcacctcttttgacctggaaattataaaatattgtctccggtgtgctatagctaattacaccatttttatagtgtccaccagccgtgtgacgtttttgcggtgtctctcagtcaatttcatattttttgagtgtactgtagcaaattttgccttttatttttgataggcatatttcaatccaacaacctatcctcttaataactttctcggattcaatgcgtcactctccattcttccacacaagattggctatatgggcatcgagaaatgtaataattaattaatcgtttgtttacgaggaataactagtagcatgtttagatggatgataagtataattacttatccttagtctgtgtgccaagatgaaatatgactattaaaattatataaagggagtacatattaccttagcacattatggatgccctaatgggtcttacctattttttagttgtgacatgactcatgtttatggattttttaggtggatcctatattattatccactctacacatctgacacgggctcaccttactatatacttttgcaacaaacattgtcacattgaggatgccttaagagattttgcttatttaaccatatgtaactgtatgggcaaaacatattatattttgggatggagctagtattaactataacgataagacaacgttagggtgactagatgcatgtttcctctgaaaacagctgactccctgtttctcactcttccccaatgatattactaggaaatctgtgataactactggttgctagaaatatgtggtttagaaggattcatgctgaagttgggagcttacttcgtccctgcatacttccacgaattcgaaatcgagagagacacgcatgggataggggttatcaagtcagtcgcctgaggtgtcgacgacagattgcgttgggccggccatcctcctcgagtgtacgagtgtatttgtgtatatatgacggaaaaagtacaccgaagtccctcaacttgtcatcgggatatagaaacatcctcaaaccacaaaaccagatatgcggggtcccctaactatataaaaccggtcatcggaggtccctcggtggttttgaccccggtgttggtctatgtggcggctgagtcagcgtggaacccacaggagacccacatatcaggtgtccacgtcaccctctctctttccctttcttttttctcttcttttttttacttctctttgccggcttgccacgggtgagtagcaaggaacgggcgagcgcgcgacctgttccttgctactcacctggccgcgtgctcgcccgcctgctgccacccgctccgcgcgcgcctccgcttcgccggccgccgcgcgctcgcacgccgcctccgccggttgccgcccgctcgctcgccgtgaacagcgcgaagctgatgtccatgccgcccgagttgttgtagatgatgaagtacgggtacaggttggccagcagcggcgcatgcgtccgttccaggaatgggatcacgtagcgctcatgaacgacttcgctggcggacggcgggatgtggatcccaatggtggcctgggagatcgacgtcgtcaccttgatgtgtcccaaactagccgccgcgagcgcggcgtggacgttctccatggccgggacgaggagctgcgtgtcggcgccggcgacctcattgcccacgacgacgaaccggaataacaccgtcgggtaggcctggatccaggcggccgcggcggctgtcccgccgtgcgccagggcggggaggtcgtagttgggcgcgcggccgacgacgcggatgcccgtgccgccgagcgccgagagcgcggcgctgtccggcgcgtagaggcgcacgacggtgaaaggtagaaatcaacagggctcgtttagccaacacattggctaactactccttgtgcatggcagtgtagcatggtgatgacgacgtgtcgtcctccggttggtcggccacgttgccacttgccacaacatgtatagaattagcttaattagcatgcatctgctagcttgttgccgtggtgctcaacagcatcggctcactgtcctagg

SEQ ID NO: 18579 - DNA, 30596 bp, Oryza sativa
agttcctccgtcttgaagaaaagatgaagtgaagcgaagattagggtttcgtcctggatcccagccgtcgcctgtggtgttgggtgttagaccgttggttccgctgcagctgctgttgttggtgttcgcctcgtccgtgtcgtcggttgcattctcgggctgtctgagctgcaacctaagttaaggtaaataagtcctctatttattctaaggatttgcaatgattcatatttgtcaccgtgggtaccagcactatgtcctgggactggtaccgagttcgcggtttcgtaggaagcggttcgcgccgtttttcctacgacacgctcctatcaggtgccgttgtgcggcggtgccggattggggtgtgacagagatggtatcagagcattagttggccctaggatcgaaaccccttattaggatggcattatttgagtaccaaaaaaaaaaaaactatttgtgaaagctaaggtgtcgttgtcccctttagctctagttttgcgaaaaatcttttcgtgtccaaaagtagaagctagtcgagtgttttgacctttatcctagagtaaacctgtcttcacgcccagttgaagaaaggtgagctcaagcctctaggagtcttagttaagccctcgttggtaggcagaccctagtaccgtcacccgctcggtgggagttgtggtgaactagtgcgtgcgtgagttttgtttggtagtccgtgttcaggtgttagaccagttgggataccgactggaatacaccacctatgtcttctgtgatttcgaaaaccgttttgatgtagtgtttttgttttccttcttttcttatcccatttctggttcagtcagatctcagtcgctctgaagccaatggcacattgttctatccgtcagatccgtgcccctaaccgccctggttctaaagaagggtcagctcagtcagaaattcccgatcagccaattagcctagcagatgagcaacagattgagaagtgatcatgcagttgtttctggatcaactaatgatgccgcagtacagaaatcagccccccaacagtggacttttgcccactcatggccatgcaaacccagatattacaaggaatgattcagaatatagttgttatgcaacgacaacacacgcaagagcatcaaccccatatggttcaagataattgtcggtcaagactgaacgaattcttaagatctcgcccaccggggttctcccaaacaactgagaccattgaagccaatgactggatcaaagatgtggaaaggaaattaaatttggtgcagtgcactccgtagaagaaaacccttttatgccgtacatcagttaagaagacataccacaaattggtggtataactactgtgctacccatacagatgctagtaccatcatctggacagagtttgcagaagcctttcgcttagcacacatccctgaaagcataattgatttgaagaaggaagaatttgcaaatatcaagcaaggatcctcttgcatcaacgagtatttgagtcgcttcaacggattggctcgatatgccccggaagatgtggacactgataagaagaagatcaaaaggtttctaaaaggaacggaagcgaaattgcgagtgaaacctttagctcacgactttccaacgtttcagcacatggtcaataaagccttgttactagaagatgcagaaaaagaaatgcaggactacaagaagcacaaggtaatgtccttagaggatcaagcaagagaaggtttgcgtcaagagatagacccgccagtgcagtactatcagggagaatctcagtattccaatggttctgattctacgtctcgttcgacaaagtcaaaatctagtcagcaaaccatagtgatcaacaataaaagccttgaaggaagcaattccgtaccatgccctccaccttgaaaaagacgtggttataaggcatgagtcgaatgtttcatctgccatgagatgagacactattcatggtactgtgtcacgccctgaagttcccctcccttgctctaaattcataaaataaatcgtccgaagaaattgtttaatttaacctagagagaaaccctaaagtaataaatgcaaataataatcggaatcggcatgtggaatttttcttggattctacatgtcaaaatatgctaacaggatttttagtggaattttcagagccctagaaataattttaaccaattaaaaatcaccaaagtgcaattttaattccaggaaaaaaaatcctttttctttttctttttcttttttttctctttttcctcctttctttcggatgggccgccggcccatctcctcctttcctccccctcctccctgctgggccggccgcaggccgaggcccagccggccgcccgcctccctccctcccggggtcgccgacaggtggggcccacctgtcggacccgtctcccacctcccgcctctcccgctcgcgccgtcccgccgaaaccgctgccgccgcacccacttcctccgctttccccgcgcccacgccacgtcgccgcgcccacgccacgtcgccgccctctccccgcgtctcccggccgcgccagcgcacgagagggcgggattcgattttgaatctccccccaccttctctctctcctcccccacgtcgccggcgaaatcggagcgcctcccggccacgtccgcctataaaatgctccccatgccctcctctctcgttttccgctctcaccgctccatcccgtgccccctaccgagctcgcaccgccgccacttacgccgccgcccgtcgccgcactccggccgtgtgccgccgtcgctagagccgccgccgcactaagccaccgccaccactagcttcgccgccgcaagacccttcccggccgctgctctgcgtcgccggaataccaccgaaaccccatttccctcgcgtcgtcggtgagttctctctcccctccgactccggccggcgtggatggtcgccgtgggggttttcctccgccctaattcctctcctctctttccctaggtgtcgccgtcgctcgtccgcacctcggcatcaccggtcttcgccgcctccctcgtttttctccgccggccattgccgcccctccggtgaggtctccctccccttcctttccttcttttttttttccccgtgcgccgccgccctcttcgcgcgctcgccgtcgctttcggtcgtcgccgctcgcgccgccgcccgccgcccgcgccgccgctcgccgtcgctggcggtcgcatgcccgcgccgccgccttgccatggccgcccggccggcttgatgccgggcctggccggtacatcggctcgtggagccggagccgtggggcccgcttgccagccgtgcccccccccttgagccgctgccgagtgggcccgtgtaccagcgcccttcccctctctctccccgtgccgctgaccggtgggccccgcttgtcggcgccgcgccaccccgtgctgacgtcagccctggaatatattgcgcaataattaattaaggactttttctttattagtaaaaacacagtgaatcttctaaaattcataactaattcatccgagctccgattaagtccattcaagtctcagtaaattcataaaaatgtgtagaatccattaaaaatggctttgttatctgtttcagtagtcttatagcatgttttgcttgtgtgctttgtttgtcgcgtagatttcggccgtttcgtcgatccgtggtttctcgaagacgttgctgtggttccatcagtgcgagagcaaggcaagtcatgcaatacaattgatcatattgtacctaatttacaaatgtcccgcatttctattaaatattgcattgttttacaatatcatgtgggatgggtcctattactcagctatatgttgttttccttatgccattgataacttgggtattaaaatgactagatgttggtttaggagatgcttagccatgcttagttcaactagtgcataaaaggggaccacattaaagcatagacttgattattggcaatagctctggattagtgccaccgcaatggtgttggctaattaaaatacactacatggtgggctgtgggtgcatggttttgctagacgtgcccatggcgattaaggaccggttcgcgggatgccctggaagaatttatcgtacttaccacaagccagcgtgggcaacggctgggcttgtagtgtagcttttctctagccgacgtacccaggcgagggtgggcgtgatggagttgggtcggccggggtgtccggttgatcggctgccggattcaccgcggcacgaaaggggggctgcccgttgcctgctggggacgggggcgaaccctaaggtgtggtgcgatcggttagagggggttatacgaagggtcctgtcacggcctctttccggtatgtcgtggtggcatgtcggcgcacgggaacgtgtcgtggggctgtgtcttgtgggtacagctgtacacctctgatcagagtaaaactattcgaatagccgtgcccgcggttatgggcggtcgaccagattcaccgtgattagtttcaccctagttagcttttggaactggttagttcaggtggtggtttgggcctgtggcaacgtggtgtaacgttggacagtgattggttaatatggattaattactacaactgttttactgctttcaactactgctttgaaatgccggctttatgcaaaagaacctttagcctcccttggatatatcgtgcatcatacctcctcttccggtatgacttgctgagtacagtgggtagtactcagtcttgctctcttttcccccacatcagagttgaagtccttctcagttgaagatgtctcggagaggttggtttcgtcgctgccgtcaaggtttgcctgtggaatggagtcgcccgctgcaggagtcaagtcttcaggcttagctcgcttttatctttttccgctgcatttgtaatcttttatatttttgtaagacgtggatctgtatgtcaacaattgtcgtttgtgtaccctggctggtcctggacaggggtttaatgcacattcagcttagaaattctggttcgtgaatttctgggcgtgacatactgccctcagaaagtcaagtcaaagcaagttcaaccaacaacaagccttcccaacgtatctggaccaaaaagttcaaagccaccaaacagtggttctgcctcgttgacctcaccgcctattggacaaagtcgtctgaaccatgtgcaagtagaaacaaagggaaaagttttgaatctcgagcaagttgaaagagcaggtgaagaacagattccacatgcaagatcagagccacagtaaaagggagactgctaagtgagtcagagtaccagaccgttttgtggcaagtatgcagtctcgagataaagaaagacccgcagagtatgaagctaagacgaagtttgaagttccccttttggtttcatgtgtgtggtccaccttcgaatctcggggtcgagattcttgtaaggggggtggatctgtaacgctccgcttttcgtgagacgttaaaaactaattcggcaaaaatcctaattgcgaaaatttcgttccttgagtgttgagtctgagttgtgccaaagatctcaatttaaatccctcccttgtctcgataccctgttatcaaagatcgtctcctcaaaattaccatcccaatgtagtcccgaagctcgattccttctattcggaatcccctcctggaaccccatccgtgaactttgtcgaatgtccgaacccttctattcagacttctctccaaaatccttacccacatatctcgttgaatagtcaaactcaaactcccaagttacactctctttctctaaattatccatccccttttgactcgtctccgaatattgttcccttccttgactccttcctattctcccgagaccgagtatcaacctcgaaattcgaatctagactccaactctaaaatctcccaattaaatctctctgtgaaagtctatttaacctccctcataggttggattccttctttctttttccgatccacctcttccttctcttccatcccatctctctcggagtctcgatctatctatctatcgatcgatccatctatctatctactatacctatctatctgtttatctatccatctgtcaatccatctgtctatccgtccctctacctatcaacctacctttctgtctatctatctatccatggcattctaccgctatctcccttgttccatttttgaataatgatcttccctttttgaaatcctctgaaataatccttcgtgccgccaaatataaatccatcccaagaataccaaaattcccgcttttgaagcccttccttgacccctcccttggatccaccttgaaccctcgtgtacaaatacacaaattaaattcaaattcaatctccacatcaaacttctctccaaatcaaaccttccagtaaaagtctattttgcctccctccaactcgctcgggccgaaaccatcctcggcccatcctcttctttcgccagcctctccatcgcacgtgcgccgcacgtgactccctcagagagcgccccctctctctctctctctctctctctctctctctctcggcgtcgcttcccgccgacgccgcccaaaattccggctgcctccttcgattcccgcgcacccgtgcgagtggccgaccacctgggtgccgccatcgccaccctcggtcgtcgcctgccccgatgaccaccgtgtccgcgcttgccttcaaaccgtccccgtccttttgcagtcgtcgccggcgtcatcctcccgggcccggcgccccatgccgcatgcatccaaaaccgtgaggcgcggctcgctctcatccctttcctcccaaaccggaaggagcaaagctccctttcctcctcctcctcctttcgctttttcccctcccgggtagcgagctccctgcctccactccttggcttcttgttcaaaaggcagagccgctgacgccgctgcagcgcctcgccgcccccaccttgaccgcacccgctcgccccgcgccaatcctcccgtgctcgcggttcgatttccaccacacgatccaccgcctccaccaccctttgcatcctcgccgtagctcgttctcgcggcgcccatgaacaccagccgagcgccgagaaaaccgcggccacctcgaaccgaccttgccgctcccactccgtctctataaaacccaccccccgtgcttcctccctcccttgcttcgttccccccccccaatcggcggagccctgccgccatgggaactcctcgccgtcgcgtcgagctctatgtccggcgacatctcgccgtcgcacggtccgtcctctgccgcctcctccctcaacctcggtcgccgtcgcgcggccaaccccggagcgtcgccgccttcttggtcgccgcggccaagaatgccaccgccgcgaccaagggcgccaccgcacgcctccgttcccttccccggcacgcccgccgtgacgcgatgccgcctcggcgtcgcgttcgtcgccgtgcgccgctgctcgtccatgcgccgccatcggccttcccatcctcaactcgccgccgacgccatcacctcccgtcggtgagctccccacctcccttttccgctgtcccagcactcgcgtagctcgcgtcgcgcgtgctctgtttccgccgccgtgcgcaatcgagagccgccgttggcctccctctcggcgactcctctagccaccgccgttcttgagttccctcgctacctccccaagccgctgtttcagccgccggcctcccctctcgccctcgcgtcgcgtcgcccgatccgccgctgccgcgctcggccacttccgctgcgcctcccctgccgtcggcctccctcctatccttgattcccggcgctgccaccttcctcgggcccccctcgacctccccaacccctccccctggccgccgaccttcctcctcgctcccgcgccgtgccgcccctcccgccgccgcaaggcgccgccgcgagccacagcccggcgaccgtcgggtcccgcgtcaccgcatgtgcgccgcaaccccataccgcgtccactaaacccgagcgcgcgagccgcatcccttcccatcgcgcatccacgtcggcatcccggcgagcttcgccgccgccgccggccgtcgtcacgcgtcgtctccccaatccgagccgtggaatcggttcgccttgacctcctctagccaccggtgttcgtcgctcgcttcggctcgccgccgttcgccggattccgccgcgcgccgtgagccgtccgatgccattcccgcccccctttttctctccccatccgacgtggctgcccacgtggcattgaccgggcccgcccctgcccagtcagccggtcagtcgtccccctccccctctctcccctggctcgtgggcttggcccattggccagccttcctcctcggcctaacaaaacaaaggaagtttacctttactccctcttccgagtccggtgctcacacaccgaagagctaaaagtccgcaattgctccctccaattgctcctctctctctctcaccttcttattggccccactcgtcaatgagtcaaagataatcttgagaatgtctttccaatattccacaaataattctctcttctataaattcagtaaatcattttatcttatttcgtgggttaataaatctttttcccttgatcctataaaacaattctctattccaaaatttcatgaatcattttccttataaatcatttcctttggtcccgcacgtcagagacggtcaataatattcttgagaatattatttctataaatttcatgaatcaatccccccttgttccacaaatatcttccttcgccagaaattctaattaaacttccaaaattcgtatctctcgatccaatcgtccgattgaccccgttccacttccagtatttccataaaattgagatctatttaatggcactattatttagtctaaatagggtctttttcttggtctcttgtttaggtttttgtttgtttgagcatagttgcggttaccggattttcgtcgatcgtggatatcttgaagattcgtgaagcttcgtgaagaccctgagcaaggcaagccacccttgaacatactgagcctatatttgaacttaattatattgcttgcaaaatattatgcattgataggattacacttaatttgtttgccccgtctgaaaggcagaccggtgggcctacccaacttgttgcatctgatccttccattgttaattgttatatcatgttcccttgtaaccatctagttgcgcctcgatattcgtgcactctgtgcgagtatcaacggtcgccttcaaacttaaaatctgagtaacttcttgggtaaaacttggtttgcaaaagctttggaaaacccgacgcctgggtcggtgccttgtgaaagaaaatgagttttaaaaataaaactcgcgacacaaggccattcctgggcggaatacttgtgcggtcgcatctaaggaccgattcctttggaattacatcggagcatacaatagtgcgaccacacgggtggaatgggacgcccctggctgagtaaattgctaatcgggggagccttgatgccgagagacatgtggattcgccggggtggtgtcggggaggacccctgggcttcctggcacagtatggtctgggacctaacctgttgttggtctgggacccctctcgtcggcatatggtaaacctgtgtcggctttcgaaatgccttgtcatgaaagcccttaggtcaccagacgtggccattctacacgggctgggtgattcgggttagtaatgtcgtgtgggtaaagtgtaccccctctgcagaggttaacaaactgttcgaacagccgtgcccacggtcacgggcggatgtgaggtgattccttagcgtagtttttgttttaccctgttttatgaaaaggtgttaaggtttgggaaacctaatgcttgggaagcatttagctgtccgggggacagcgggaccgggtgtccctggaagtgattggtcgtttggggaccactattatcgggaagtttggaaaattggtttggtttgggaaaaaccagatttgaagccaactctgggagttgtgcaaatcttgataaataaatttgttcttctcacctcccgaccaagctgagacttgtctcgctctggttgtggaaagcacacacttagattgttgaaaacttgaaaacaaaactgtttgcaaaataacagccttcccttgaagcctgcattaaccacctaagttcccctggcttgctgagtacgtaagtactcacccttgctctatataaatatatatatagttcctccgtcttgaagaaaagatgaagtgaagcgaagattagagtttcgtcctggatcccagccgtcgcctgtggtgttgggtgttagaccgttggttccgctgcagctgctgttgttggtgttcgcctcgtccgtgtcgtcggttgcattctcgggctgtctgagctgcaacctaagttaaggtaaataagtcctctatttattctaaggatttgcaatgattcatatttgtcaccgtgggtaccagcactatgtcctgggactggtaccgagttcgcggtttcgtaggaagcggttcgcgccgtttttcctacgacacgctcctatcaggtgccgttgtgcggcggtgccggattggggtgtgacagagatggtgtaacatcccggcctagggcttaataggattaatagaatactcatatcaacaagttgcaacttcttttccggaagccaatctccaaagaactccagggttaagcgtgcttggcctggagcaatttgggatgggtgaccgaccgggaaattcttcccgggtgcacatgagtgaggacaaagtgtgcagaaaagatatgtgttggtctgtgagggcagtctatgacctatgaaagctatcaaatgtaagtgggcccggcgaaagctatcaaatgtaagtgggcccggcctgggggaaggcgggacgttacaaaatggtatcagagccgactctcgcggtttcacgggcgcgtgtgtcgcagttgcgcaggcatggtgcgcatggctggtgtagaccgggagtggttacacagcatggcacatgcgctggcactggacacatggacgtggccaagagaggacgttcctggcctagggttgatcgacgggggcgtcgatctctcttaagggggtgagggtgtaacatcccggcctagggcttaataggattaatagaatactcatatcaacaagttgcaacttcttttccggaagccaatctccaaagaactccagggttaagcgtgcttggcctggagcaatttgggatgggtgaccgaccgggaaattcttcccgggtgcacatgagtgaggacaaagtgtgcagaaaagatatgtgttggtctgtgagggcagtctatgacctatgaaagctatcaaatataagtgggcccggcctaggggaaggcgggacggcccggcctaggggaaggcgggacgttacattgggcgggcagtctatgacctatgaaagctatcaaatgtaagtgggcccggcctgggggagggcgggacgttacattgggctgctgttcttaggatcagtatgttaaagtctaggttttcgccggtttttctttaattaaccgtattgttgtaaggtttttagatctggttttccttataaactagatcaactctcttattctatggtgaattgtacgaactccctgcctgtcccctcgaaaaaaaaactttatcatcttaatacttctatatgctatctcaatatctcatatgtgcttatataaatatggtgtacgtatatgcgagtgttttgcagttttactgtatttatatatagcaggcatctaattcatcatatagtattaaatttcaaaaatattatgagaacgcacgcggccgtaccaataccatattagcatattagatgagtccactagcactgtactccctgtgctggtggccttgctagttggtactacgttcctgtcctaaactcaattatcggtgccgttgccttgtcctgcttgcatttgcatgcatgctaattaaagtgttcgttgctgtttcgtcgcatgcacgtacatgatcaggctgtgtggtgaaatcaaaccagattagagagagatcaccgtgtccgtcgtcatcggcgcgcgatgccgccgatgagcatgagctggtggtgggcaggcgccatcggcgccgccaggaagcgccacgacggcggcggcggcgagcagcagccgccgttccggagcgtggcgctcgtggtcggctccaccggcatcgtcggcacctccctcgtcgacatcctcccgctcccggacacccccggcgggccatggaaggtgtacgcgctgtcgcgccgcccgccgccgccgtggtcgccgccgccgcccgccgcggtgacgcacctctgcgtcgacctcgccgacgccgccgccgtcgccgaggcgctggcgccgctaaccgacatcacccacgtcttctacgtcgcgttggcggctccccacctcgcggaggcgcggagccgcgaggcgaacgccggcatgctccggaacgtgctcgccgccgtcgtcccgacctgcccggcgctcgcccacgtcgccctccagaccgggagcaagcactacatcggcccgccggagtccatcggcaagctccccgtcgagacgcccttctccgaggacatgccccgccacgactaccccaacttctactacgaccaggaggacgtcctcttcgacgcggtgacctcctcctcctcctcctcctcctcccgccgcgccgccgccgtcacctggtcggtgcaccgcccgtcgctcatcttcgggttctcgccgcggagcgccatgaacgtcgtgtgcagcctctgcgtctacgccgccatctgccgcaaggagcgccgagagctgcggtggccgggctccctcggcgcgtgggaagggttcagcaacgcgtccgacgccgacctcgtcgcggagcagcagatctgggcggccgtcgccgacgcggcggcgaagaacgaggcgttcaactgcagcaacggcgacatctacaagtggaagcagctgtggccggtgctcgccgggaagttcggggtggagtgggcggggtacgagggggaggagaggagggtggggctgacggcggccatggccgggaaggaggcggtgtgggcggagatcgtcgcggaggagaagctggtggcgacggagctcggcgaggtggccaactggtggttcgtcgacgcgctgttcatggacaagtgggagttcgtcgacaccatgaacaagagcaaggagcacggattcctggggttccggaacacgctcaggtcgttcgaggcgtggatcgacaagatgaagctttacaggattgttccttgattaatttatctcaggtttctcctcaatctctcgtggattaataattataccattagatccgttaaaatataataatttttagctataaatctgaacaaataaaatatttatattttaggacgaaagtacatcggtctaatacggtggcctcgggcaaccaaagtagtttgtggtgttctctctggtcatgcatggtcaatgcttccaggcttccagcgtcaaatcattttgaccaaaaggggttaatggtttgtaaaacgttttgctgtacatttgtccattgaattttcctcgaaaaatatatactccttttaaaatatttcaatgatgatgatgagtggtgaatctgttaccctccactatagatggccaaacgggcggcacggctcaggcccggccgtgcctgggccgaggttagtcgggctggcacagctccagcccaggcatgaccgtgctcgggtcaaagatttattgggccggcacggtctgaccaacatactgggccgtgttgtgttgacccatgtgttgaagcatcggtcctggcacgacctaatacaactcgggccgtgtcgtgccggccggaaggcacgatagcccatcgcgcttcttcaaaaaaaagtctaattttcgtccctcagttctttaggccatgtctaaacgattatgataagtctattttgcatctcttcactcttgggccgtgaattatatggctgcattaagtataattttagtccctaaactacttttcttccctcctcattggattgggccgtgccaggctggcccaccgtgccaaggcatcggtccaggcagggcccagctatcgggtcaggccggtccggacacgtccctaatcgggccgtgtctgggtcgggccaaatggccaggccattgggcctcgggtgctatggtcatctatatctctagtcatgaatggtcaatgcttccagcatcaaataattttgaccaaaggggttagtgctttgtaaaacgatttgctgtacatttgtcgaatgaatttccctcgaaaaatctatactcctttcaaaagatttcgatgatgatgatgatttgttatctcccactaccgcttggtggcggatgagcggatccatggcccgataatcctaggcagctctttgggcttgccggcacgatcacaccattataataccattaattttcagtgattaacatgtataattgttcacactatatgtttgtagcatatataaatttaaccttgtatgtttctgatgtgatttaacacatactacctccgttttttaatagatgacgccgttaaccttttctcacatgtttgatcattcattttattcaaagaatttacgtaattataatttattttgtcatgagttgttttatcactcatagtactttaagtgtgatttatatcttatacatttgcataaaatcttttgaataagacgaatgatcaaacatgtgagtaaaagtcaacggcgttatctattaaaaaatagaggggagtattaatctatctcactatctcgttgaattctatcgtaattatttggatgataggcaaacgtcgagagtttgaaatagttttccattaatttgtgtggcagctcgcaagagaagaagagatagtaaaacgcaaccgtacgttcggccgcattcaagcgaccgtacgtgtgggcgacgaagtcggtcgctcctccgttttcttctcttctccgaagtgtttcgtgcgtgcacgtgacgtgttttctgtgccttcccacaatagtgttcaagcctccatctgattgctctgaagttttgggagccacaccaggatagtgtgaacatttgaatcaacgacacatgtttttgtttgtgccggctcgatcgcagccacatcacgaaacatatctaccccctccgtaacaaattaaataaatttataataaaatagaactttttatagtatgataaaagttttagatgtacatttgtttagatccgttatactagaaaatatcatattctattcagggttggtttatttttatacggagggaatacttaaacacggtattggtttgaccgattggatgcgcatggttaattaagtattaactaatataaacttggaaaaatgtttttttatatttgtaaacaacttttatatataaagcttttcaaaaaaaaatcatgtcattaagtgtcttgggaaatatgtccatagtaatctattacatccgttctaaaatataagaattaaggatcagataatatatatcatattattacaaatctagatatacttcttatcccatcggatcataggttcttatagtttggtatggaggaagtatattagctaatgagtgaaaaagagcatggcccttagactgcactactgcagtggtgatacggatccagctcctctgactttgggctcgtacgtcagaggagcccaatattttgagtcacatactacaatagaaaacagtgtcttgacttaatgctatagcaacagtgaaatgcactgtttgaggttactgtttagatattactatggcatagtgatcgttcacgttcactcgcgacggctgaaaatatccaagttagagtaccgtacgcctctgacttaaaacgccgaggatctcattccgtggtgatacgtggtgacatattgaaatctgtgaccctacctcttcccaccatagcttttattgttctatgatatatatcaaatataaatgtgttgtcacgtatacacatgatcaaagtgagcaatccttccagcaaagcaggaaataacacagctgaggcaaaactatattttatttatttttcctcattaaaacgtactatggtatatatattttgtaagcatgggtatttagtgattatagtagtaggtcggtgcgcagttcatccgtatcagagcaatcccaacctcttggcgcattcgacgctgcagatcaacgtctcctccaccccatacttgtacttgaaacctaaatccacaagcttatttgtatccgcttgcaccctcacgtccttgcctaccaccctaacaaagagaccacacatatatatgatatacatttatatagcacatcctatatcttcatcctaaaatataaaaaaaatttagctataaatataaaccatacatgtatccagatttatagtttaaaatgcttatattttataacgaagcgagtacaattttatctaaagaacgaaaaataacaaataaatcactggtcaaagacacgtactctttgagttttatcgtgatctctgggtatttggtgacgaagtgatcgacgtaatcctgcatattggggtacccaacggcgcagaggaagcggccggcgatggacggctgctccgcgcagaagatatgcgcctcgcagatgtcctcgatgtgtgccagtggcaccgaacctatcagggcctgcaagaacttgagggtgttgtggcatgactcgtcgccggtgagcggcgacacgatcaccggcacgctgagcgagtggtagagctgggtggtgtcggcgtcgccgccgacgagcgcgcacgccagggtgaccacctcgaacgccctgctctcggactcgttgtaccttagcagcagcttctctgtgagcgtcttggatgaagaataatcctataaagccatttgaagtatcaaaaaaaaaaacgtactgcatgtaccattgttaatttgctctatggtatctaataaatcaccaatcagaagtctgagaattactaacatatgttgaaatgccattttcactcggttaaacgaaagaaatattcctgacgatgattgcgaatttgggtgtactgtttaattgattgtactagtataatgatatattatgctgttgaattcttttaatatctatatagatgatatatatactccttccatcctaaaatatacatacttttagatctagtttctcaatgctatagatatgaaattaaaaggggtagttggtattgatttaattagatgagaaagtttgtagagaaatcaaatgagggattactgtgattagtttaaacatgaaaacagacagagaagctataatatatttaagataaattttaaactatataaattttatattgaaggagagataaatttttatatttgctcattactttgtcaacatgaaatgcgtagttgattaattacatactttctctgtttcacaatgtaagtcattctagtatttttcacatttatattgatgtatatatgtctagatttattaacattaacataaatatgggaaatgctaaaatggcttacactgtgaaacggagatagtacatccaccatggtgttgttgtagctgtgggagtgatcgagaggagtccagcatgactcgttgatgaagtccttgtacccctcgccgccgtcctcccggagcggcgacgcggcggtgacggaggccgtgtggatgacgcgccgcaccgtctttgaccgctcgcattgctgcaggatgatgcgcatcgcgtccaccgcggcttcagtggtgttcttgtactgcaaaacaaaacacatgcgaatcaacctctcatcttaattattgtcatctggtagtgtaaagtttaatctaaaacagagcactcaatagtccactatccctctattcacatttactaaagccatcgagacacttggtgcagagtctgaaagtcattaactttcattattacaaaagtaaatgatcgagattatcatttttaagtagctgtgtaatatttttcttcaccagaaagaccgaaagaccgaaggaggctatccgaatatattaagaagaataaagttacaacaaaaaaatccacggaagcagttgagatcggaagtacaccaaagtgcacgaccaagaaccacgtgctaaccacacaatcacaaactatttagatcgaggaacctagcaccaaaacgaccctccgctatgcgtgaccaatcaccgtcgtgcctacgacaacaccaccaagacgagactctggaaacgatactcccccatggaaggtcacggcatcaaagacgttgctatctcgcccatgtaaaaaagatccggtatgtgatgatttcatcttttccacgatagcattcgaggctagcagccgtgtgtaccttggtactgcgagggtcgtgctgcagcggggtggcgaggaggaagacgaactcgcagccggcgatggccggctcgaaggtgtcggcgtcgtacatgtccgcctcgaacagcaccagccgctccgccgcgccagggagctctctcaacggcgccgtcttcttctcatctcctatcaaatcacgtagccatgaaaatttgtattacctccatatttcatattttaatgtatgacgccgttgactttttatctaacgttcgaccattcgtcttattcaaaaaatttatgtaattatgatttattttattgtgacttgattcatcatcaaatgttctttaagcataacataaatatttttcatatttgcacaaaaatctattatattattaaaggaatagaaaaaggagcctccacgttcgctctcacggcctagaaattctcacattaatcggagaaaaagaaaaaacagagtctatatagaaatacaatttagaaatagctgaaattcggaatcaaaaaataaggaatattagaagaggagactagagtccatataaaaatacaatttataaataactgaaattcggaattaaaaaataaggaatattagaagatgagactagagtccatatagaaatataattaggaaataactgaaattcggaattaaaaaataaggaatattagaagtagagtatagagtccatgtagaaatacaattaggaaataactatataattagaaaataactgaaattcggaattaaaaataagaaatattagaagtagagtatagtccatatagaaatacaattaggaaataattgaaattcagaattaaaaataaggaatattagaagtaaagtatagagtccatatagaaatacaattaagaaaaaaataaattcgaaattaaaaaaataaggaatattagaagtagagtatagagtccatataggaatttaaaactaactaaaatttggaataaacataatgaaattaaaagtagagtttagagtccgtataaaaatacaatttacaaataactaaaattcgaaattaagaaaaatatgggaagaagagtttaaagtcaatataggaatacaatttagacgtaactgaaattcgaaattaaaaattaaagaatattgaaagatgagtttagagtccacatagaaatacaattagaaataataaaaatttagaaataaaaataaataatattggaagaagatcatagagtctatatagaaatacaatttacagaaaattcggaattaaaataatatattaaaagacgagtatagagtctatatatgaatatatataatttacaaataactaaaatttgatattaaaaataattaataactaacaagtatataaaatacaatatgaatattacacattagtagttttgtaaagttattgcaaaatttaaaattatgttgtcattttaatatatttaaataatataatgagaaaatatatatactattatatgatagaaaatataatgatgctagccgcgcaatctgcgcaggccaccatgttagtttattatactgtgatatattacatcatccaaaatcacttatattatgttgtacatatgttcttaatgacatagaaatcaatgttgaaaaataaaataccatgaaaaacttaaaaatcaattttaaaattcaaaatatgattggaatgacaagatgaagagcaaacgataaaataagcccttatcgcgctctttttatgcggaatggttaaatacatgaataatttgagataattgtttgaagattaaaaaaaacttaatgcattaactattataaaagttgaaagaaaagaatgtaaaacatttttttaaagaattcatatatagttttttttaaaaaataccatttagaagttcgataaagaatgtgtgtttgttgattattccactaggaaaaaaaggagacagtaaatcaacacgtgatttcttttttgttagccaaatgatttctacgttatagtattgcaaagacttctaaaagggttaaaaaaaggcctttgctagttttgtataaaacgaatgaacaaacgttgttcaaaaagtcaacggcgtcatacattaaaatacggagggagtaaattgtgttggttttatgcttgcagatggctacaagatttttggaaaatatagaggtgatctagctagagaatagtagagatcattggggagagtataccgagatttctcaaggtcgcatgcacgacgcagcctcgctgcagcagcttcttgatgaggcacgtcgcgatgtagccgctggctcctgtgacgcacaccctgctgctgctgctgctcgtcatcgcttctgcttctcgttctgttccttcagatcagatgcgtttggtttctatggccctctctcaacctgtttaaataatgcaaataacgtacaagactgaacttagtgtcagtgtcagttgtttgggaaacaaaatctacttcggctgcgttcttttcagcaaagtcctcctcgttttccgttagcacgcttttcaaactactaaacggtgcatttttctgtaaaaagtttctatacgaaagttacttaaaaaaatcatattagtccattttttttaaaaagaatagcagatacttaattaatcatgtgctaatggatcgctccgttttccgtaatcactgttcataagaagaaagaacgcagccttcctccatttcatattaaggtgtgtttagttcacactaaaattagaagtttggttgaaattgaaacgatgtgacggaaaagttggaagtttacgtgtgtaggaaagtttcgatgtgatggaaaagttgaaagtttgaagaaaatgtttggaactaaacaagggcttaatagtcattttaactttctttctagctataaacttctttagatttaactaagtttataaaaattttaatattcacaacattaaattagtttaattaaatattatgttgaatatatacattgataatatgtttgttttgtattaaaaatattattatattttctataaaaatagtcaattttttaattaaaaatattagttaggaaaaaaaaagtaaaaacagcttataatatggtaaaacagtgtaagggcatgtataaaggtagagtcaggcatgagctctgcattatctagagactaaaatcttacaatagttgatgacaatatggtctctaatcattaatgtatcaaaatatttttcttactattctttcatttctttcaccaccatgcaacgaaatttgctctaataaataaatgctaagagtcaactctgagccgctgtcatgcataacaatcatatttctctttcctcctttctctttcatccatgtcatcaaatttatttgcatagcaatatagagaccactgataaaaaccgttttacatgctctaaacaatgtgagtgttcggcggggacagcctttttttgtggccacatgtgccacgatttgcatttatacttaccaaactagttgtgcgatatctgatccgatctctgaccacaggtttgcattcataccatcgctacaccaaaccagaatttcttgaaaccatatttcagatttagaaaaaaaaaatcggatcaccgtgtctgtaccaattcattaaaagttaaattttttttgaacagattcgagaattccgtcccaggacaaacatgccgcagctagcatacatctatcatggcctggagaaacgaggttcatgtttgaaaaacaagatgtgtattcccgacacatttcgctgttacagaaaatttcaaaaaacatctctatcctggccatgctgatcattgaacaatatatcaagtgaacactgttgattgttagacctccaaattcattttcaaattgttgatcattaaccaatctttcaaaccgaaaacgtggatgacaacacgctacgtccggtccccgtcaggtgcagccgcggcggagccattgagccggccatttctccactcgcgcgggcaggcggaccaagcggcggacgacgacggtacaaggatgcaattttttttttactagcaaaatgcccatgcgttgcctgagtgaagaaaaaaaaagtaattagtgtgtgggagcataaagtcaccaggttaattgaggtctatatagtcaaatcatgcctttcctgtgcaaataagacgctaacatgatataattatttgccgctctaaatccactaacatggatactaaaatttggaaccacaaaaaatatttacttttttgtcatgtattattatgagtcagttgcaatacattattattttatggtactcggtattgataaacttttttcatattgtaaagagtagccatagtacaagatatattttttgctagttatcagatcaacctcactgcactccaattgcataatcactcactcaaaaaatcagaaggaaatggtacaatcaatggaaagaaaaagaagtggtgtatcgtagaataactttcactctaaacaatagaataaatcatacaatgaatggaaaaaaagtgatgtggttagatgtcctacggcgaatgagaaattgatgagggaaaaaaatccggatgtaaacacgagtcattttgttggtgattacatgttttttaaaaagaaagacacatatgattgttttttattttttaaaaataatttattttgttggtaaatagttcatttaaattttgtggtgattacatgtttttaagttataaaatcttttttttatccgatacctggtaggcatgagtccaaactttattcctgcttgtgctgggctgtagctcctctgctcggtgggctcgctggtggctacgactgcttttttctgggccggcctgctgttgcttttgatgggctgcaatatttctccactaatccacaaatccgatctgctttggatgggctttctccttttttttttctcttttatttgcgggcttaagagatcgctgtcagcttccgaatcgtgattagcgacgaaatatcatgtggacccacgcttaatgacgtacgaaaatatttacggaagccttacttattttttaagtagtttttttattttaaaaatctttttaattttgaaatcaaactcttgtgaaacttatttttaacatctgaaccttttgcacatgtcaagcaaattggcgtcacaacacaatactttcacactggtctcgttggcgtgaaaacaatctttggtcacgctgctcgataaaactgttacgcccattgcaagtggtgtgtaagtgtttttttatcacgccgggcgtctggcgtagacaaaaggtttgcatgttaaaaataagtttttaaaagagtttatttcaaaataaaaaaaataaaaagtacaaaaactataaaaaaaatccagagatggacaggactctggccaattcggctttgcggcgccggagcgcacggtgggagaagcatgcacggaacggagccatcgtttttacaaacgaaaagtattttgtgaataaaacttatatacgtgtgttcttagcacaaaatcagctccaaatttaaggttgaaaatttaaattttacctgataagtataagcataagaaaaagatgaggcctgaaaaaaaaaaaggagaaatagacagacggttggtggagtggaagggcctccaggctccagcaaatgacattgtcaaatgacaagatggcaaatgcgatggctctagctgtcgagcgcatatatggtagtccctccgtttcaggttgtaagacgttttgattttggttaaagtcaaactgatttaaatttgactaagtttatagaaaaatatagtaatatttgtaatactagtaccaaattagttttattaaatcaataattgaatatattttcataataaatttgtcttgggttaaaaatgttattattttttctacaaacttagttaaacttgaagcagtttgactttgactaaagtcaaaacgtcttgtaacctgaaacggaggtaatattatcgatgaacaatgttctgatagctttagggtacatttcttagatacggttggagtaaaagggccggaacaaatacagacattaggacagaaattatactgcttggcacgctcaaagtaatcccagcctcttggcacattccacgctgctgtccaacgtctcctccaccgtaaacttgtacttgaaccccaaatccccaagcttgtttgtatccgctttcaccctcacatccttcccaatcaccctaacacagaccacacaaacaaacagatataagatctaccccctccgtttcacaatgtaagtcattctaactttttccacattcatactaatattaatgagtctagattcatatatatgtctagattcattaaaatcaatataaatgtgaaaaaagctagaataacttacattgtgaaacggaggaagtacggtacatacatgacacattcatatatcctataaagaaaacataagatcgagagaacaaatcaacaatgcacttacccttgaagctttatcgcgatctccgggtacttgacagcgaaacggtcgacatagtcctgcatgttggggtacccaacggcgcagagaaatcggccggcgatggatggttgctgctccatgcagaagatgtgtgcctcgcatatgtcgtctatgtgcgccagtggcacagaacccagcagcgcttgcagggacttgaggccgccgtggtagagctcctggccggtgagcggcgacacgatcagcgggatgcttagcgagtgatagagctgcgtggtgtcggtgtcgccgccgatgagcgcgcatgtcagggtgaccacctcgaacgccctgctctcggactcgttgtacctcagcagtagcttctctgtgagtgtcttggatgaaacataagcctacaaaagcacaattcatgtgatgatctatcatttctcatatttgaaccgcatgtatgagagattcagtttgaaaatttacaactcaagctagtgtacaattgtcaataagatctatgttcataataacatgatctatctaagaaataaccagaacttttttagcgtgcaaaatctctcccagtatcaaattataattaagtatagatagatagatagataagacaatattcaaatatactccctgtatttcataccgtaagttgttttgatttttttttccattcaaacattttcaagtattttcgacacaaaagaactattctttcaaaatatattaaatgtcatacttattgaaactaatttagtgtgatagatgtagctatttttttataaacttaatcaaatcttaaataagtttgaccaaaagaaaaaagtcaaaataacttataatatgaaatggagggattacttatacttttaaaattactagaattctttttatttcttatcactaaaatataatggatttgaaaataatttacatatatgtgtagtactattaaaagtatgtgcaaacttttcaaagaaattgataacatttaatttgttatagctgttgtgcatgatgttcgtaatatactagttgcaggatggatacgctccttgatagatagatagatagatagatagatagatagatagatatgtgaacatatattttttgacggagaatgggtagctgattacatccatcatgacgttgctatagcggttggagagatcaagaggagtccagcatgactcgttgatgaagtccttgtacccctcgccgtcctccctgagcggtgacgcggcggtgacggaggccgtgtggatgacgcgccgcaccgtctttgaccgctcgcattgctgcaggatgatgtgcatcgcgtccacagccgcctcggtggtgttcttgtactgcaataatataaaaacataattaacaattaacaaacttacaaacacagcaacctctcatcctgctaattgttgttgcacaatgcacctagtgctgctactgactgcatgcctagaactagtagtagtgaattctaaaaaaaaacagaacactcaaataatccatgatatatccatcttaaactcaggccatcgttggagtttattaattccaggcttctgcatttaatttttttttttaaaaaggaaggatccattattatgaaataaaattacaccctgcctctgcatctgtatctaccagagtgctgcatgataaacttaactttcctttcctttccttttttttttctctttttcagttccagacagtgtgcactgcgtgcgtgggttaccttggtgctaagcggatcatgaattagcggggtggcgaggaggaagacgaactcgcagccggcgatggcgggctcgaaggtggcggcgtcgtacatgtccgcctcgaacagcaccagccgctccgccgcgccgggcatcctcctcagcagcgccgtcttcttctcatctcctgtcgtcagatatatgcatgatcaccaaccatgcatgcatccatgaatgaatcaacaagaatttggaaagaaagtgaggaagagatgggtaagatgtaccgagatttctcaaggtcgcatgcacgccgcagcctcgctgcagcagcttcttgatgaggcacgtcgcgatgtagccgctgccaccggtgacgcacaccggcctgctgctgctcatcgtgtcacacgacctctcctcgatcgattgttgttgttcgatctcttcttcctccagtccagtcaaatatggtggtgtctgtgactctctcggcccggtttaaatagagaaaaaactaagaccgggcttgatacagatgttaatggttttaataagaaaaaaaaaatacgttttgttcgtcctaggagtccgtatcttgaacgtggaagaaacaaaatgcatgtggcgtggaaacggccctcgcaggcgttgcaatgtgtgtttctcacggaaaagctaacgcgcacgcgttggtggcgaccgttttcggatagtttagcctaactaactaagttattagtaaataatgatagtaattaagatatgattttcttttttccggaagattttttctactaaccgattgaaactttcaagttagatttaaaaaaatatgaaaactttcgattgaaactttcaagttagatttaaaaaaatatgaaaactttcgattccgattaaaaactttcgactcgagatttgaaaatattcaactcaaattcgaaaactttcaactcgagatttgaaaatattcaactcaaattcgaaaactttcaactcgagatttgaatactttcaaatcagatttaaaaatttttcaagttaagatttaaaaactttcaactcaaaacattttaaaaaaataagtgcgctaaagattaaaagaaataatcagaaaaaagaaaaaaaatcacaaaataaaaagaaaaaacaaatcgcgaaaaaaaataggctggtgggcttttctgggccggagcagctggcgcgccaacaagcaacgccctgtttctcaagacatgcttcttgtatttatgcataatactgccaaactagcagcccaccgcctctggtcaacttgtgtccattgagaaaatcaccgcactccaaactaagctttttttattcttatctgtatctctatcgctatctctatctctatctttatactattataaaaattaaaaatgttttttccggtactttaatatgttatccgcatatgagtcagtttttaagttcgttcgcttttgaaaatacaaattcgtatttgagttgggttttaagtttattttggttttggaaatacaaaagaagttgtataagaaatttcttcaaaaaaaactcgcatgttaatttgaaatgatcgaactaccaattgtagctcatgattttctagaaaaatatatatccaaacgaatcctcacagtgaatttcaccttaactaaattatataacaataataaaattaaaataatcttcacccaaaaaagagatcattactctatattacagcaaactcagctgtttctttttttaaaaaaaatatgaataaattcgaaacaaattctgctgcatgtacgtatggctggatctgttctaggctaccggcatcggagtcaggcgctggggtcgtagtcgtagtacgtactcgggattttgagtttgtgcttacaacgtttgaccactcgtcttatttaaatttttttaaaattattatttattttatttatgatttactttattatctacagtattttaagcataacttttcgttttatatatttgcaaaaagaatttgaataagacgagtggtcaaacgtttcaagcgaaaactcaaaatctcttgtactgtgggacggagggagtagcagctagcgtggcgggggcgcgggtgttgtcgcggcagagactgtttggttgctaccgtgagctacttgcctgaggaaaagtggcgcctgagagttccctgaaattttggtgcttgttgcctgatggggcatccttgagttggttgtttggttgaagtcctgaactaaacgtgcctgaggaaaattagtaggcgcaaaacagtgtgctttgagtaaaaaagtgtttataacacttcccattagacagcattaatctatagatcattccttctgattggaaaccctaaaaaaaagtttcttctgattgcatcgcacggaccaaacacaatacgacgattgtggaatccagcaaggaggcggtggtggtttgcatcatcgcgtattctcgtcaggcattacgacggtgattatcaaccgatcgatgctgccgcctggagctcaggccacctattttggtcgcttggacgaggctaattgcacgcctaaggtggatcaggccaggcaggtggaaagggccctcagggcagcaaccaaacaggcctttaaccctgccattcgacgcgagcaacccgggcggccaggcccctgcacactgccgcttgcacgcacggcgttcacctgcggagttgtgggccgggggagtttatcctaggaaaaagtctaatatgggtccctaataatatagatctaattcgtatccctcagccgtaaaaaccggtataacgactccctcaactatcaatatcagttcaatttatcttcccaggtggtttgcatgatagttttatcttgcgtggcgcatgttaacgtggtatttatcctacatggcattataattagaaaaaaaagtaaaaataaaaaaattgtatgacccatatgtaagtcctcatctctctcctctttttatttcctccctttctctttctccccatcacgcttctagcggcagttttgtcttctaggagggcggtagcgagtcgggagctgggagggcaccagcggttcctccccctcttttgtccctccctctcctctctctgaggggattggggtgccatggccatcggacgcaaggaagggcgtcattctgttgctgcttattttctaacggtgactcaggacaggaagcgggccgacgacggtggccaccaggctcgagatcgtgtcaccccacgctgactccagcactagcgatcctcccttccctcccgccccccaggtgtaatctctaggaccactactaccaccaccggatcctcctcctatattatgccatctgcgccacgagaggtctcgaacccggtgtaatggagcttgagtgaccaggaggccccactgtcccctctccttgcggacgacgcaacaacgaaggagagtggccgctgctgaccctgagcactcccctcctcttcaactagggaggtgctcatctagtggctcctcttcggcacacaccatgacgtcaaggaagcaatgctgcatccacccagtcatcttcaactagggaggtgctcatctagtggctcctcttcggcacacaccatgacgtcaaggaagcaatgctgcatccacccagtcatcttcttggtgacttggtgtcggaggcaccgtgg

SEQ ID NO: 18580 - DNA, 2086 bp, Oryza sativa
accctacttgtatttcatttttctaataaccaagctacgacgtaaaatctatgtcagaaaaaaaaaaccaccatcataatagtcgacggaattgttttacatgattataatagttggaggaatcgttatacccaatgttatggttaagaaatatgaatcaaattgcgaccaagttgagcgagtcggactctttccttttccctcctctttgtggcacgtattccagccccggggagcaggagcccgttggtggagcagatgcgatccacggaccacggatggatgcatgggactccgggtaattcagctcgaggcggcggggatgatgtcatgatatatattaccagagatggatcaagatcattggatcggactgttcagcagacaaggacgtagtagcacattagttacgcacgacacacttgagcaataataatactccagttcattgcccatcggtgtttcgaatagacaactgaacagctgaacaatgaatcaagagcacaatcaatagggaaactgttttaacatctcgagtggatgtggacatccacccatttattacatgtcatctaaacgtttatgaaaaaaaataaaaaaatacaaacaagatagatcaatatgtaatatatcaatccacaaacatgcaaattaaaatttaacttctacaaattgtaacacaaataacaaacataactcaaattaatatatatatatatataattaaatttgttgtttttgttacaacttgtagaagttgaatttgaacttgcatgtttgtgaggtgatatattacatattgatctatcttgttaatttttttgaaaattttttgtaactatctagttggcgtacaataaacagaacgtccactagagctactaaaatacatctcccaatcaatagtccaaatgtccaatagtaccgttattgaaatagaacacagccctacacatttggtcctggccaacaacacgtggctggtaggtctcaaagcataagtgagtatgttgccaacttggcattagtcctcacatattttttcattcggtaacaacaaattcattggcatgcgtcttatacggcatagataaacaatgtaaacaatttctatttgaaaaaaaaaagataaggtgctatacattaaagcaagcggaagactgcacaacggtatatcgttccaacgaaatagctaatgtatactaacattagcaaaacatcagcacaatatcgtagatactagatagatatcggatctgatacctcctaccagacatgatgccatataagtaccagatttggtacttaggtaccacgatgacatcggctattcattataaaggtatataccgttatgtagaatttctttaaagtaatcccatcctcttagtgtattccacgctatgatccagtgtctcatccacttcatatttgtacttgaaccccaaatccacaagtttgtttgtatccactttcaccctcacgccttcccctaccaccctacgtaatcacacgagcaaacacaatacatgttatattacttaaaaaggatcaaggagatcaatttaataatcatcaatcgagattctaaatacatactctttgagcttcatctcgatctccgggtacttagcagcaaagtgatcgacgtagtcctgcatattggggtacccggcggcgaagaggaagcggccggcgatggacggctgctccatgcagaagatgtgcgcctcgcagacgtcgtcgacgtgcaccagcggcacggagcccagcgaggcctttttgaacttgaggacgccatgggagagctcacggccggtgagcggcgacacgatcaccgggatgcatgctcagcgtgtggtagggctggatgctatcgccgccgacgagcgcgcacgccaaggtcaccacctcgaatgccggcctctccgactcgttgtaacgcagcagctccttctcggagagggtcttggatgagagatacgcctacaaacgaatcaaagtagaattcgtcgccacacagtgtccaaagtcgttttagattttactagtagttcatagaaaaacataccagcattttttaaaa

SEQ ID NO: 18581 - DNA, 4547 bp, Oryza sativa
gccgcttctgtggttcgtgctccatacttcatactcacatagatgatagatcacatgccatagaccatattcatattttggttccatgttgcagcttgacaactaatattttccttctcagaacacgaaatgtgatgcgatcatttggccaagtgaccagtcccatcttttacatgattgttgttcatatctgtggttctgagagatatcttgaaacaatagcagagtcatcagttcacacgttgcataccataatggacttgagctcaccatcagctgctccactgattgctatgccgttgtccctgacatccatcaagtatgacagtgaatcctgcgttactatctcacctgggatcagcaccgggatacctggtggataagggcagataagctcaccacaaatctcaccaaggctatcctcgatggacactctcctcttctttaaaaagaaggcctcccttggtgtcaacttgatggagaacttgtccagtgggctactagcaggattctcttttctggaactggacccattttcagagaagtatttttctgacagatgctttacagaatgtacaagcctctgaacatcatgccttctggtccctaagttgactgcaaatgtcacggcctgtgtaccgaccagctcagatacaatttgatgctcctcagctaaaaaatcatctgcttcatatccagataattgcagatctgaagcacttaatgtgatacgcaagggatcaatagcaggaaaatcagaaagaaagcttgataagtccaaaacagatattcctgggataatcctcagctgatgttttgtttctaaagccatagatactggttcatcaaaagattctgcattctcactcagctgagcccttgcggcatccaaagaagagagtagaaggtaacttgggcttgagctctggagcaattggaggcattggcttactttatctgcatccacaagatctccagccatgtgaagcattgaggactgtgtaagcgagcacagaaccttgtgtgtggattgcacaaccaagtcggcaccttgctcagttgcgctgcttggaaaatttctgtgaaacctgaaatgggcaccatgcgcctcgtcaactataacaggaatgccttgcaggtggcaaacattgacaattccttgtatattgctgcatatgccatgataggttggtgatgtaacaagaacagcacctaccttctttctgtcctcctccagttccttaaccactttatccacctgcgatggggtaatacccccagcaatgtcccacccggaattgtactcaggtactatatatttgggcacagcaccagacaaaaccagtgcagagatcactgaaatatgacaatttcgaggtatgatgaggtagtcaccaggggaacaggtagccatcactgaggcctggattccacatgtacttccattgaccaggaaccatgttttaaatgatccaaatagttcagctgctcgcttctgagcatctaaaatcacacctttaggggagaagagatcatcaagctcaggtagctcaggtaagtcatgcaaaaatgtccttgagccaataagttctgacaatgaaggaggagaagctttccctctattatgtccaggaaagtgaaagcaagaaacatcttgatttgcagttgatttcagtgcctgaatcagaggggcagtaccagctttgacaactgctgaaggttcagcatgtgaaccattagtagtagacgttcttggagtgtcccatgaagtggcacattgtactacaacatgccgcatgattgattcctacgggataacagatgcgcgtcattgcatataatagaaggaccaagaatgccatgcacttcattaatcagtgatcaaaagctgcaaagtagatagtttaacttactaaccatggcctgtgttggtaaagcagacgaaaaaaaaacaaaggcagcagccttcagacaagttaaagcttatataaaacaatgtgtatggtacaaaggagcttggctgcattgtgtgagaaattcatggaaggaagacaacaaaatcttcacatgttgcacagctaagtaatgcacatgagcatatatacattaagtgtgcttggaagggagtggtaatagactcatagcttcagcagagaacctgattttattggaatgcttggggccattttataaagcacaggttactgccgactggatcctttctaattcataaatagccattctagcaataacgaaataaataataatagatctatgggttcatcgttattagagctccgagctcatgagcaattctacaaacagcttgtgagcactccactccactacgttacccaaatacggggatacgaatacggatacacgatatgaggatacaacacgttcttaaaaacaccgatatggggatacgtctatttatatttaaaataataaaaagatatagagcgaatacatgaattttaattattaattatgtacttaataactacaagactgtgaatagagatagatagtcatatggcatgatatcaattgatcaatacaccagtagtcaaaaaatgatcaatacaccaaaatcttttagtactatctcagatcagcctataatctgtctgctatctcaggagatgaggctaaccatgaagctcctatggatattgtgctcccatgcctggtcactagtgaatctacagactgcagccacatagccgcaagcagtatccagtagtatgtatgtgctagagatgcactgccacttaagcattcaatttcagaactaactcatcgcccatcggatctaggagaagagataacacttgtactaagatgagaagggaaaacccacaagaaaatcaatcaagacttaaatggggaagaaccagatatggcgtactaatggcgttgggcctcgcggccggtgattcctgaagacgttgcgcccggtggaggagatgaaacaaccggcgactggcggagtccctatgctcagcggcagcgacgctgcgacccttggttggcgatggtggcgccgccggcggctagcggaggccctgcgcctcggggagggatgcgacggtgggtaggatgctcgaactgcgtcgggatgggaacaatagcaggcggcgctccctctcccgtgcgtgggtttggattcgattgcagggaggagtaagaggattgagctgaccttgtgtgtgctggaggcggcgccgttgcccttgttcttgggcacgccagccacggtggagcaaggggagtaggcggccaagctcaccatcccggcaccacctcctcctctccggcgaccgccgccgccgccgccgagctgaacgggctgcaggctgcagaggaggagacgcgggagataagaagatgacaaggagattagatgggaggcgactaatcggcaattatgtttgggcctcaatagctaatgaagcccagcccaacaagctggcccgactaatggtccttctgcaactattttacatgccaaacctgtgtttgtcaggtatacattttattcagaaataacgtgttttcttctttgcggattttgcatgtccaggttcagcgaaattcaggtacatcttgttcaggcttaatctatttccacacacagattttgcagtaaaacctgcatccaatttgagacaccaccagacagtaaacttcagattctgctataaatctgagaatgaagaacaagcacagtcctattttgcaaggctttcttccatcttgtaataattccaaaatttctacaactaaattacaaagtacaatttaagcttcattcattcttcagatgtcttacaagaacacgtatacaacagcagagatgccggtcgctgcatggaatttacctgacaaatctgagtacaactagctagcaaagcactataaaatgtgcccgcgtaatttggctcttcttctgatagaaattaatcaatagtaagctattctatttctactggatttgatcaggcacttgtcaggctcccgaacaatgtaaatctcatccccgacactaccgtacagatcctggttcctgtgccatctccacaacgcatgcgtctcgttcttcacctgcaaaatccaaagatttttcatctcatctcatcaatggtgacatttctacttcatgaagcatctgaagagttttttttttttacctcaagaatgccatggccgaagctgctctcccggtaggcgctgtagtcgggctgccggtcccagcagaagctgccggcggcggggccggaggtgaagttgaagccgcagaagccgccgcccatgaaggggtccggcgtggacagcgggtcagggcagcgccccggctcgtcggcgtagctggtggccatcttctcgcggttgccgccgtcgccgacggagatgtgcacggggccgcacgggtccagcgtgtagttgaacacccggttcgaacgctcgtaagcatgcacctgagtgacacccacagttcatcagagaattcagagaagaagcaaaatgttcagaatatgttc

SEQ ID NO: 18582 - DNA, 744 bp, Oryza sativa
ctcctcaatctcatggttcccttccaccaccatcatcggaatcctcgacgtcactggctccatgtaccttcagttagacatcacaaatcaatttatgaacaatcgctaaatgttaagagtttcagaaaaaaaaggttcagtgctaaatgttaagagtttcagaacaaagatccagtgctaaatgttcagagtttcaggaaaaaaaaagattcagtgctaaatgtgcagagtttcagaaaaaaaagattcagtgcaaaatgtgcagagtttcagaaaaagattcagtggtaagtgttcagagttttaggaaaaagattcaatgctaaatgtaaaaaaaaaaagattcagtttttgggttagtgactgatcactaccttccccagtaatcccagcgcggctgatacgtctcatggatgggcgtggagttggcgaaggagcaggagtagcagtctgtgccggtgccattggtgaggtacaggttggcgtagctgacgtcgccgaggaggaggaccaggtcgggctggttgctcaccatgtgctcgacggtggaggtggtgttgtacgtcagtccaaggtccccgacgatggcgatcttccccgggtagctcctcggcccgacggccggcatcgtgcggaacgcgtggatgtcgctcatcgccgccgggatcgccgggtcgccgcactggtagaagtactctgtccctggctcaagccctgcagatcgcacacttgtttgagcaaaga

SEQ ID NO: 18583 - DNA, 627 bp, Oryza sativa
agcagccaacacatcaagagaggaggtcgagaaacttcaaatggagaaccggttattccgtgaaaaggaggagaaatcttccagtgaaatcaagaagctccaccaggagattgctaagctaaacgagagtatgaagaagctgaaatcggagtctgaagatcacgagaggaaggtgttggaagcggaggcccatgtgaacgccctacagaagcagtcggaggagcttctcctggagtacgacaggttgctggaagacaaccagattctacaatctcagcttcactacaaaggctgaaacagttaacctggggcatgcaactcaaagtgctcgttaccaagactcgtagacttaccaaatgtcagtgcagagcgaaggtattggtgaatgtgatgcttggaatccttgctctaacttgtggtgttgggttgatgtactagtgtgtgcatttgtagttttgaggagtataaaagccagggatgatatatggtgaaatggttatgaatctggtatcagttcatgtcgccatgcagggttgttgatctgaaaactgaattgaacttgtgggctgcggccatgcctctattcaggccttgatctgaaaatctgaaaaggaggaaagtttccta

SEQ ID NO: 18584 - DNA, 906 bp, Oryza sativa
tagaccatcatctagtgccccgggcccatatggtttcacaggtggtttcttcaaaaaatgttgggaaatcattcaacaggatctagtccaggctgtcaacagggccttctcctccccgctagaccgtcttagactaataaactcagcatacatcatcttattatgcctgtgaaatacttgcataattcatgaccttgtactagtcccgaagtgaaatacttgcataaacaattccgaagtttgtgcacatgctccggccggatcatagcatcaaaacatactcaatccatcttttaatacagggtatcgttaactttttaaatataacttaaatttatctttacacgtgatttaaattttctttatatttataaaaattttaaataggacgaaagatcaaacgttttaaaagaaaacaacgacgttatatataaaagacgtagataataataggtgtcgccttttgcatgcagtacaagaacaacacggaagcggccgtggacgcgatgcgcgtcatcctgcagcagtgcgagcgatccaggacagtgcgccgtgtcatccacacggcctccgtcaccgccgcctcgccgctccgggaggacggcagcggcggctacaaggacttcatcaacgagtccttctggtctccactcaacctcacctacgacttcaccaatgctcatctggacgtaatgttaaattaatcaccaactaattaacaaactatttcagggaagaggatcctccgacgtgaactaccctcttacgtgatcactgactggtgggcccgtgagcggcggggtccatatctcagtcaccacgttcctctgacttcacgttagaggatcccaatccctatttcagtctccgcatcaactggtactagagcttgacattttctctgat

SEQ ID NO: 18585 - DNA, 6676 bp, Oryza sativa
tattgaacgacgtgagtataacgaatctataaagagatatatatatgtctttgttgcaccactatggctgtgttcgctggagcatgtttccaacctggaacagtatgcacggaaaacggaacagtccattagcacatgactaattaagtactccctccatctacttttgatagtcatatttcatcttaacacacagaccaaggataagtaattctacttatcatccatttaaacatgctactagtcattcatcgtaaacaagcgattcattaatatttacatttctcaaagcccatgtagccaatcatatgtggaaaaatggagagtcatgcattaaattcgagaaaatcattaagatgataggttgttggattgaaatatgcctatcaaaaataaaattttcagatttggaaatatgactatcaaaagtagatggagggagcattagctaattttttaaaaaaatggaccaatatcatttttataagcaacttttatatagaaacttttttaaaaaatcacaccgtttaatagtttgaaaagcgtgcgcgcagaaaacgagggaaacgagttggaaaacttgggggtaagaacacaacctatgttggtttttcaagggacaaagggagtatactattgaacccaaaaggccatataattaacccataacttgtcgttgctaattttcatatgtatcatcagtaacttaatttgttaattccatctctcgcagtacaagaacaccgccgaagcgaccacggacgcgatgcgcatcatcctggaccagtgcgagcgatcgaggacggtgcgtcgcgtcatccacacgggctccgtcaccgccgcctcgccgctccgggaggacggcagcggcggcggctacaaggacttcatcaacgagtcctgctggtctcctcccaacctcacctgcgacttcaccaacgattacctgaacgtccgtaatcgatcgatcaacataattaaccaactcgatcactctcacggtgacactaattttctgatggattttgcataatgcagggctatgtgtcatccaagacgctctccgagaaggagctcctgagctacaacggctcctcgccgtcgccggcgttcgaggtggtcaccctgacgtgcgcggtcgtcggcggcgacacgctccagccatgcccgtggagcagcagcatcccggtgatcctggcgccgctcaccggcgacgagccctcccacaactccctcaagttcctgcaggcgctgctggggtccgtgccgctggtgcacgtcgaggacgcctgcgacgcgcacgtcttctgtatggatcagccgtccatcgccggacgattcctctgcgccgccgggtaccccaatatgaaggactgcgtcgaccacttcgccgccaagttccccgacatcgagatcaggctcaaagagtatgtgtcaccaatccaactcttgatatgctacctccttcctttaatgtatatatgaggtagtattcattacgtatttatcttgattagttagttgttgttgaatacagtatgtagtaactgaatttgtgagattcttttttttttttttttttgaaatcagatcaactttcattgacccggctttgatctgatttgtgttgtgaatttgtgagattggttttgtgttcgtctttcgcagggtcattggggagggggtgagagtgcaagctgacaccaacaagcttgtggatttagggttcaagtacaggtatggagtggaggagacgctggacagcagcgtggactgtgccaagaggctgggagagctctgatagtctgatgtgatgtgttgtgtagcaaaatcccttgcttcgcttgacctgtacatgtataccgtgtgcgtacattctgtgagaacggattgatgaatgataaattcgttcctgctcaattatccgttggtaaattcgttcctgctcaattatccgtctttaactgagcaataaactaaactatagcgacgtttttgccgctccatctcggtagtataatttgttggagcgattcaccccgctccgctccattatttggtgaatctagaccgtttggcacagccccagccaaacggggcctatctagcgagcaaatgcaggtcgattttgctatacatttgtcgacaaatttttccccaaaaatttgacagatgtaattacagtacaattgtagtgtaattacactgtaacttgtatgtaattacactgtaactatagtgtaacttgtatgtaactttcaaaaatctctccgtaacatgttatttcggtaaaatggaggtcgtgggaacaaattctttcacatatgtgtgtgctatgatttgttttcttcctcacttaaacaaatcgtgtaatagatctaacgattcaaaattatgtgacacttaaatataagttacactgtagttacatgcaagttacagtgtaattacatataagttacagtgtaattacactacgattgtactataattacatctgtcaaatttttggggaaaaatttgtcgacaaatgtataggtagtcccaatgcaggtttatcagatcgtgaggggaatctgctgaagtccacagagtgtcgcccgtcgaatcgagtgggccgccatcgaatctagtgggccggaaggcccaaaagcaaaatggctagggcccagcaatttggagcagtaggggtcggagttttcttctccgacgaccccaaccaaaaccatcgtttcctgacgagccacggtgcctgtgcctccctgaacgtttagcatcgtcgagagctacgagcctcaaagagagtggtgaggctggcatatgaattcacaaacaagttgggaagttattgtcaatggccatcgtcaaatcccacagcaaaacagaagtaaataacagtcgaaacagtattcttatccacaccagaaatcacgttaaggagcacctcccactaattataattactgaacctcatcaggcccaaattaaaatttgttctgaaatccaaataaagatcttccctgtatgtatgttgaagcaagcgcagattgatcgatggacgtgatcagagaacgcgcccgtatacgtacgtatacgtatgctagttaatttctctcctaaaaacgagtaagaaatatcctataaaaaagtttctagaaacaaaagaagatatatactcctatatccgtacgaaatctcggttgttacttgttactgcagttccgtttcgttgctgtgttgtggtgcgaaacggtgacgtggatcacccgacttagcgcccacgcatcataccgactcaatcctgtgtatttcacggtctactactagatatcttcagtgctgccgtcacccacaacacaatcctccttcctccctgtctctctctctctctctccactgcagcaaaaccctaggaaaaatctcgcttagcgatcgatcaagcaaattaagccctagtgattacttactccctacttgcttgtgctgcccgatctccatcagatagatcgatcggagcaagaacaaggggcatcggagcgatcatggagggcaagtccagcagccgccatgccgatccactggaagaggtcgagatgaattcggcttctgcgaccgaggacgacgacggctgccggtatgtgttccaatcccgccgcgacagcgacaacgacaatgacgacgaggagggcgtgctgccggcgacggcctgcaagcggcgccgccgcctcgacgacatcctcgcgctgcttccttcgccgcccacgccgtctacctcttccggttcggaggggacgatcagcgaccgcgaccacggcggcgacgtgatcggcgccggcgacgacgacgctgcccccgtggcggcgcgacgagaggcgtcgttcccgtgccacttgtgcaacaaggagttcggcagcaggaaggcggtgcacgggcacatgagggtccatcacgccgagaacgagaaggagccgatgtcgctgccgccgcaggtggcggcgcccgttcatccccaggctcggctacccacacgcggagcatcacgatcaggtggaccgtacaagtgcaagtacgagggttgcatcatggagtacgagtcgcaccaggggctaggtggccatgtcgctggccacatcaacagggacaagatggccaccgccagcggcagtggcggcgccggcaagccaaagggcaagcacccgtgcaacgtatgcggcaaagagtacccgacaggagtggcgctcggtggccacaagaggaagcactacaggaaggaccttgatcttaccctctccctcgcaccgcccggacaactcgccgcgccgcctacacctacacctgctcctgctccagcggccatcgccgcggtggaggcagaagcggaggtggctgaagatggagatggaggagagctagtgccgacaactccgccaaccggagctaggagaaatgtggtcgtgcggatttggggcgttgatttggagaagccggtagatgatgtagaggagcaagatagtggcagcaactaaagaagatcaaaaggatagcaactaaatatagaagattaagaggatagtagtcagcagtgcagtgtttatttagatacttattcacgtgtttgatgcaaagcaattgccgctttgttagtttagatagtgaggattctgttcaattgaaacaaccaattctacagagatattatttacaaagaaaaaaaatatatctttcatttaaaagttcttagagattatgtttttttaagagagagagtgcatgcagccatgcacgcactgccttgcgaaatccctaatccgcacctaggcgcgcgtggcgcccaccgtgtgacgcgccacgtgccgcgtgggaaagacggaagagggccggacaacacgcacgtggaagtgcggagaagagtgcggacggaacggcatagtttttgtatatagacgtatatggactttgtatatatacatataatgggaaactattctaatctctcgaggggatgttccctcgtttgctcaaaaaccatctaaacggttatgaaaaattctggaaaaatttgacaacattcatacaacacatatatacaactccacaaaatcttaagtccaaactcaactcacacgttgagatataaaaaagacaaattcagcgtatgaatagtagcgtactgtttatatctaaatttgtcttttttgtttctcgatgtgtagatcaaatttgaacatgaattttggtggactagtaggtaccattatactctacattgtcaatttttttcagaatttttcacaactatttgcatcgaatttagaagaaaaaggtatacgaggggatatctcctcgagggattagaatccactccccatataatgtttgtgtatatataaaaagttcatataagtattatattttttatacatctctatctctactattataaaaatggggaagatgtttttaccgtggcttggtacgtcagtcgcatgtgtccgattcgcacacggacgaagcagcgagatccatcgtcgttcgacactacgtgcacgatgttggtccatggccaccatgcatggcacaacaaaaagtagcagaaccgaacacggattgacacgcctgactgtagaatccaaaacccagctcgttacaaccgaaggccacccaaagcaatcgtttttattgtgaactcactgaacagagagattggtaatagaattacaacgtgtacatacagacttcgttttgtttttattcgtacccttaagcttcgatcatggcacaaggagccccattgattgccttagttagaaaattttgtatttttaaatttaatttgaagttgtttttaatattttttcaacgttgtttgttaaatctatatctaataaaagaaatacataaagcttccggtttattttttttgttccatccgtttttttatcgtcgccggttttttggatgtgactcccgctcgggcgtccgatgggaggaggttaaaatcgggcgttaacgtcagcgtccgatttacgtgcaaaactactttaaactgatttttcttctaaattatttatccaaatcatgatccgattacaccattaaattcattgtaattaaatcttcaaaacaagaccacacatagatatattccgacgaaaaaattatcttattattgaattatttttaaatattgcacgatattccaccaggtatatcggaattgtttcactaagtagatcgaaaatgtttcactcgtttaaatcgagtgttgtttcaccttatataaaaacaatgtttcagcaaatagcgaaagaatgtttcagttcactgcaacattagatctatacatagtgaaacattgtgagtacattaggtaaaacatttttcggtggaacaaaaaaataaaccaaattcccttaatagggggtttccaaaatatgtgggttttttgttgcaatggaatgtttcgttcactgcaacattagatctatatatagtgaaacactgtgagtacactaggtgaaacaaaaaataaaccaaattctcttaatagagagcttccaaaatatgtgggtttttgttacaaaagaatattttaattcaccgcaacattagatctataaatagtgaaacattataagtacactaggtgaaacatcttttgtggaaaaggggggga

SEQ ID NO: 18586 - DNA, 6134 bp, Oryza sativa
ttgtactcgatgacagttgaggaccttcggtgtactttttccatccaatctgttctgtccaacgtgggcccgaaggttaactgggccgtgtcaccccccgaaccccccctgattcctctcgcctgatgcgccgcgcgcgctagacagccatgattccagtcgagccccacccctctcgctgccgcctgcctgcatcatccaccctgcttctgcgcggccattactgcctccattaaactcggcttgcctgcgccgatcaccaggcccgcgtgagtgacagtggtgacaccatcatcattcatcaagttcctcacttgctcttgctcttgctccatcatcattggcagctttggctttgggctgtgtttagatttaaagtttggattcaaacttcagtgcttttccatcacatcaacctgtcatacatatataaattttcagtcacatcatctctaattttaattaaaatccaaactttacgctgaactaaacacagccttggcttagcttagctgtatgcatgcctgtgtcctgtactagcttcgtaccaacacactgattggtcatcagagagctgcaggtgcatgtttcacaatatttttttcaagtatcaaccgagaatctgtctcgatgcgctacgcaacaacaagacgcccgacgccgcgatggaacccccacatgggcgcaagaaacggacgacggtttcagcgatgcagagtagcagcactgatgcgccacgttacctaacagctaaagggctaaaatgtcactctgcaggagccacatctgcacaatctgagggccccttcgaatcgtaggaatggaaaaacggaggaataggaaaaaatatagaattctggcagaaatgcaagtgcaaacgagagtattgcaaaacacaggaatagccgtttgattggaccgcaggaaaaacgcaggaattaaaggagagatgaagactcgtaggaaagtttccatgaggtaaaacctcatgctagatttcctacaaaacttgcatggcattaggcattccataggaatttcacatgattctataggattcattcctttgattcaaagggctatatagaaaaaattcctataggaataaaatcctttagaattcctatgaatttcctttgaatcaaagggggcttattcctactatactagtaccacatgttcaattctgcctctcacattttcactctcattttttgcggttttcagagatactgaagggcaaaaggatgtgagccacaaccatcttcagggatgagcaacttgatgataagttgataacagccttaagatggcattgtcccaacaacaaccttctcattccaaccaaccttgagcctacctactggttttccctagatttacaagataataaagatgggaaaaagaaaaagaaatagtgggagtccttgcatgaaagagacagacatcctactaccaaattacagagtacacgacataagaaaagggagtacagaaactcaccccacacaaacacccatcgacaccaaacaagaattggcaggcaatagtgggttttcggatgggatgacatcttcagaaaggatcagggtttctgttcatttttttttcttttcacagatcacattgctcctgcaaccaccgaaatcgggttctttcaatcagcgaaaatgagtgttgcttcaagggtgcaaccctcatgcgatcgcaacgaacgagaggagcacggtgcagaaggtggctagcccggctcttaggtgcaatcccgctgccgcggtgtccatgctgcttgtgcctgttggccctagcccgcccagcccggtgccggtagtagtccctgttcccatgccggtgccggtggttgtgcccataccagttccaggtgtgaaggttcctggggtcattgttccagttgtgcctcccatggtcggagtggttgatgttccagcaccactgcacatgagtatggaaatgttgttaggatattacaatcaacgaaatccagaagagtcttgcgtgtttcaacttgcaaagcatctcagttgccttcagatatatggcacaccatactataggaatccttcaatgatacttgcatcaactatagatcattcaggagtcatgtgtacatcacaaatgcaggccggaaaggcataggtgtgcattttggtatggatgagtagttgaggatgaggtacaagactagctttaaataacagatggacttggttcttaatggtgatgtatacttacttattgactctttggtatttttcaataacaaagcatatacgactttgacaagcaaacaaaagagataaggaagttgtaacacattcagttcattgaacagatggctacattcagttcataggtcttagtattgcagttcagagtgaacatgtactatataatggaggcagatagtgtgttcaaaagaaccttctgctcaaacacaatgcaaaagtttcattggtggttaccactttgaaacgtcaatcatccttagtgatacttaataaaactcagtcagttaaagtgaagttaataatgtaccttgcactagcagggaaggagcagccagaaacacctgcaaccaaagataatatgagattgtgtgaggaatagatatgtctctaaccaatgaagaaaataacaaaaatacatagaatggatatcatcccacactcagatgaacttccatgccagctatcaaaaagatgtcaccgacatctccttttccttttcgtttgtcctaactgaccacaagctcaaatgctagccaacatatcagactgagagaccttataattgagataaggtgacacaagcaaacaagctaaaaaaaacttcaacatactttacggttgaattaaagcacgtcccattacgccatgcttgcattgccccaacgcacgacaaatcttaattccatcatctgtacagctcgtccttcacattgctagtcaccactcccactcatcaccatccaaacatttctaatcgtgcaaggcagaaacacttgccgcaaaaacttgcaagcgctcaatgacattatgacagccagtactcaaacgcgttcttgaacccgaaacgcgagcgcaaatttaatcaagcagtagacagtggacagaaatgctgggaaggaattgaagtgactactactccctctgtttcacaatgtaagtcattctagcattttccatattcatattgatgctaatgaatctagacatatatatctatctagattcattaacatcaatatgaatatgggaaataatagaatgacttatattgtgaaacggaggaagtaatatattgacgtgcaatccttttgcgcattcgtgaaaaaaaaaaaacaagaattgaagtgacttgggtggtgaatcattttttacttgggtcgctggtggtgagggtggcggtgccggtgaagtcgcaggtggcgcccatggccctgttcctctggaagtagctgttggcggcccaggagcagtgcgccaccacggtgttggggttgaagcactgcccctgctcgtggatggagttgcagtccgcgcccgcgccgcacgcgtagtcgatggtcttctgcagcgccgcctgtggctgatccgacctgcacacgcaccaatctgcattcgccaagaaacaccacacacacaaaaaaaaagaagagattcaatgagagagattaattaactcgtgcgtttcattaaaaggcggcagtttttatgccagtttcttgatgaagagatgggatgcggaatgtgacgaaagcaatcaagaagagagagtagcgtctgcgcagaaagagcagaaaactaggagaaaatcggcgtagtaacggttttgcttgttttagaaagtaaaaatgtaaaaaaaataaatcaacttgagaagaacacatctccaactgtctcagaggggagaacaagagatttcttgtccttggtccttgttgagttattttcttcagcaatagatgaacagcaagagctaagcagtacatggctagtactgtttgacatagcaaggtaggaaaggggaatctgaaaaaaaaaaagtagttcacaaaccataacaaaagtagcgtgtactcctacatgcaatgctgatctttcctagaaaatggaagaaccaaacagaaagatctcttcttccaagttccaaacataccaatggatgaaccaagcagaaactgagaaacatcaaagaacaaaaaaagaaaaagaaccaccgacaagtagaagtgtagaatagaacaacacctgaacaaatccccccaaaactccaacaaaatcaaccttcagaaacaaaaagcagcagcctttgcagttcccagccattatttaagaggcacaaactcactcaggacagaaatctaaacgagacggaaagagaaaggttagaaaaagaccctcccccggggagagctgagcttaagctcgctcacctgaagcgacgagactggacgacatgagaagcaccagcgccgccaccaccaccgcctccattatgaaagctaccaccaccaccaagcaagcagcaagaacagagagattcttggaggcctggacgagtagaagagatggagacgagctagtagaggagagtgagtgagtgagagagagagagagtgtgtggtggcctctggacaagagtggcagtggcagcagcagcagcagatgcagagtgagtgagagagacagtgtgtgtgtatgatgcgtcgggtgcgcgtgcgagtttgatctgcgccacgggcgcctacggaatttttaaccttttttttcttcttcttcttctttgcgcatctacggttgcgacccctgggagactgagccgcacccaccgctacctttttgctttgctgcaatttgcagttttggcctcctgtgtttctctgttcgttctcctgcccaccgcgaaacgccagcctattttcgtgaggttaatgcttggcttttttttttttttttgcggggaatgcttggcttttgggactaataaaaaactgttgcaatgatttttttttagtgcaaaaccattcaaacgtagctatagtttcatgtgcagctacggacaaaataacaccttgtgatcctttgatctgcaggataggaaaaatatagaaatagagaaaaagcagaaattgaagtagtagtatgtttcttatgctatgggaaaaataaaagaaagttcacaaaaaggttacacgtcttactatttttcctatgaaatgtgaagcatagaaatataatcctatagaaaatttctcacaaagaggtcacacatcttactatttttcctataaaatgtgaagcatagaaatacaatcctatgaaaaatttcctttctttcatatgaatcaaaagaacatataggaaaaaaaccataggaatttaaatcctatgaaaatcatttgccaatcctataaatcaaaggagccctgattgtttgtttgttcttggtaatgtcgcggtcaaaatttaaattttaaactctctatgtgtttttatattttttttacttctatttttaattttggcttttaaatcgctaagaaacatattcataccttaaaattttttctcatttcactgcttatttttccactactaattaacagtcgaagccaaccaatatagcactaagggcctgtttggtacagctccaactcctaaatttagctctaggagttgggtctggagtggagttgtggagttgcctaaacccaactccacaactctagctcattttgtgagagagctccacccagctctactcccagttttggtggagctgaaactatttggctgagctccagctctatgaggggtggagctagagttgtgccaaacaggccataagctaacttcacaaatttctagtagcacctgtttttttctgtatatttcacaatttttgtacatagtgtctactagcattctctgtaataattttgtttagcagatttctgttgaaaaatctgctagtatcaaatttcagcatggttttctattgacaacgatgcaaaaacaattccaaaacagttccatttcaagacgatgctgcaagccgggttacattattttcggttggtgtgatggtagggcccacgacgccagagccaa

SEQ ID NO: 18587 - DNA, 1314 bp, Oryza sativa
tgccttaattactttatttgtgactagatgatttattggttaatagcacttagggtaggaactctagttgtgagtacagtgtgtgtacatgagtccttgtatgaacaggctgacaaagtgacagtccacctttattagttgcctgggtatagtactctgtagatccaacaaatcctccaatgcataaatccatatcaattccaaatgggtacatcatactgaccctaaggcataaacatgaaacgtgtaataggtttgtcatctcttattattctacattgacagtttgcatattagtatcatgattcctaacttgtactagtaaataaaattactaacctaagaatgatactatgtaccaaaatgaccaaataaaagcaaaaggtactacagttactgaaaatgtgattttctttcttaagctgttgcttgatataacctccatgtgacttctgaaatatgcttgcagtacaatactcactcaacttactagttcgtacaatgtgatcacatactgacatagtgacacttgccattctagttcttgaatacttccttcgcgtttgccacaatgtggtttatcagattaatagagcaaaaaagcatggaaacagaagtgatgagactgatattctaaatggccaccaaacagtagactatagttaaagaacaaatgatttctcactccatgctaccataatttttttatcacctagatggagcatgaaagcagcaaaaacctgatgcaagcctaaagcaataggagtccttattgtatccaacccagtccactacagtaacatggtactactgtttctttaccagttgaccacacaagggacctggcataaatgcaaagtgcaatttgctcattaagaattgaacatacacaacattcttcaatgataggatcataacttcctgcttctagtttaaaatgtataatgtaaactctctagcttctgtaaaccttagaagttaaaacaatatttggtttgcacaattatcgacctcctccatcattaagagcacttgctacacttcatccaagtagtagtaactagtaagttgagtagtaaagaatcaagaatgatgaaatggcgagctcaccgatgagggaggcctcgaggaggtgagtccgccatagcacctggtccatggggctgacggtgccgagcttgaggcccctgttctggatcttgaggatgctggcgacgctggacatgaggatcaccgagagcgtgcaggccagcgtcttcaccgtcgccgggcccttccccgtcttcgcctgctccacgccgcgcatcgccacct

SEQ ID NO: 18588 - DNA, 1283 bp, Oryza sativa
actgatagatgtgcacttcctcagatatgtgggctgttggtgcaattttggctgagcttttcacactgtctccacttttccctggtggaaggtatgtatgatactgttgtttgggtaccatgattatgttgcctctgtagttggtaatatccataatttactgtattcatgtattgatgcatatatgctgtctgcttacgcatgttttgatttgagcagtcaacagatcacccttttgatttctgttgaagtgaactcttgtttcttcttttggtgattagttgtgttctttttattttgtggatagttggcctgggaattttggggatttcatgccactatctctgagttgcatttattaattccaaggctgtaaaattattgttgttctgaatactgtaacaacaatattttttccctcatgttagtatttttagctcttatgatgcctatgttgttttcttatacgattaagcctatacttctccatactttttcttaagcccagttcatcttgcacagagtagacctagaccatttgtacttatatttccttgtttatggtgattctgctttgcttttaattattttatttgcttacagcgagactgatcagctatacaaaatatgtgctgtgcttgggacaccggatcatactgtctggccagagggaatgaacctgcctcgttcaagcagctttaattttttccaggtgaaattacttctgtctacaaccattaggataagttgcctttgacactgatttccttttcttttgcttgttcaaaagatcccaccaagaaatctatgggagcttattcctaatgctactttggaagctatcgacttgattcaggttagttatgacacatgagtcttgtttcttacatgtttgatttatatattgttatatgaaccccatgtttttttgtccagttgcttatgtaagtactaacatcaagttaattaatataacatcttacttatatattatattgttttaagtaatttaccatgacaattcacaataaattgcactaattactagtttgtaaatagtgtaaggtatgggtttgtaacatgttgatgatatagcttttgttgcttgatgttatttgtctgagaataatgctctatattaacatggtagtatttgtcattctgacagcaactttgttcctgggatccacgaagaaggccaactgctgagcaatcactacagcatccgttctttaatgcacctaatttacacattgagttattcatgggaactatacttcgct

SEQ ID NO: 18589 - DNA, 1105 bp, Oryza sativa
gccgccctgggggagggcgatttttgcctcccccctataaagcccagcccctcccctgtcaaatttcattatattcactaaaaatccaaaaaaacgaaagagagagagaggggagggcagcagaaggggagcggcgaagccctgctggttcgctcacttcatcacaggtatgctcccatacatcttttgcatttgtactaatatattacgtttgagtacatatgttgcgttttagttttagttccatatattttagcagatctgtagcacactgcacatatgtgtagatccagagcatagaatataatagtatgaattgagacatagacagtagtgttaattgtaagatgtagtttagtttgatctggagaatgtaacctacttttagaaatttagagaacaatattgtagagaatgtaacttagggcgtagtacagaaatgcgaggttaacgcagttattgttttcatcaggcacaatgtcaagtaaggtcatatttcagatagttcacggtgaaggaaatattagatttggtccagatggtgttgatctgtcagattttgtaatgacatctaagggcatcgataggcctgcggagagaacatttgagtcaatttatagttggttgttgagaggatttagaatagaccaagaagtctacacaatgtcagtatctgttgtagtgagtcgtgcaatagaaggttatttttgggaactaatgccgatggacagcactgctgcttggagacggtatgtggaaatggcttttgaacggtcatggcccctcgttatatttgtgtcggtacaagagaaagatacaaatgtttcaatgcaaaccgaagatgtggagggtcctagcaatgcaggggatgttgttggaccatcgatgcaaaatgaggaaaatcaaccaagggaggagcaggccatgggcatggcggatgagggggagagagtcggtataattgttgatgaaatggagagggaagattcggataatgagcaagcggaggacgacgcatcatccgatgaggaaggtgatgtaatggccactgattgggcaaatgaggacttctctggtcttgttatatcagagggtgatcatgtac

SEQ ID NO: 18590 - DNA, 860 bp, Oryza sativa
agagcagaagcattccaagtgctgaggagaaaaccagttcaggtggttttccttcttgatgatctgtttcaatgctctttagccaattttatacgttttctgttatctgctgaaagtattaggagtagactgcattttgtcaagtcagagcattgcatgacatcactggtctaacttggttttgttcattttcagggttatgatatcagtttcctgataacaaactaccactgtgaggacatgcacaagcataagctcatagatttcattgttcagtttatggaggtaaggaaaaatgttttccttggctttcccatttgctacagtttgtgactttatactcatatcacatattctgatttgtgctgtaggacatcgacaaggagatcagtgagctaaagctttcggtaaatacacgtggtcggttagtggcaactgaattcctgaagcagttcatatgacacattcttggcgatctttggaaaacataaaaccctagcattgttagctatgctgtcttggcctttggcgagcaaatctggaaggatctttccaccactttgttttccttttgtaaatgcgttgacaaggatatgtgaattcttgatccaactagacctcattggcagctaaaatctgcccaggcaagagagatgaggggaaacaaagtcatggtcagtaggttgagatagattttttggccttttggttcaagaatcctgtactgtgccggccaagttttattggaatgtggaatgtcaaaattggggctgattctgattctgatatgtcaaaattggaatgtgaaaatcagagacgcttgttgtctctgattctgatttcagttccatggcaggctg

SEQ ID NO: 18591 - DNA, 5408 bp, Oryza sativa
tttgaaatatttaaagctcactagaacgcagtctatgaattccatatgttaaagaatccaggatgttatccactaagacataaaagaacaaaaaaggacaactattagttccacagaattacgtaaatgcatgaatatgaaaaggttgcttacccccagctttaacaatatcaacaagatcatccatcaaaattataggcatcgaacggggtatagacccaacacctagaagctgtatattttcttggatttttatttcttggtaatcatggcaggttatgctatcttctatcaattggaaattggcacctccacaaccttttgcactctggatcaatagcaaaattagcaagagcaacttcatagtagtagcagaagttcaagcaattacaaatatagaaataacaatatataaaatgtgataaccagatgtgttaaccacaggtgaaccgttataggtagaacgagaaaaataatgccaaggacatgaaataccttggatttgcaagatgcaggaagagttatacgattcccagcctcaagctcaggatgaaccgtaaacctgttcaagataccaaagaagtcaaaggttcagtatggctagagtctagcacgaacatatatgagcatgctaatcaacacaaaccttgtaaaaagtattgaggtcatcatgtcttaaggtagcacaaaatgcaatattatgttcatattaaggcaatcacgaaattgctctgatctttgaatcccctcccgattcttcaaaatctactgctttcaagaagttaaatcctcatgcattttttttcaagtcgttatctagaaaaatgtttttccaagtaatttcaagagaatcttaaccccacttgcgtagatacttaattttacttcccagcttttggcttacaagcttaggaacccaaagaggccagtgttacaagtaatgtataacacaaatacacaatgacaatcctgccactttgcgagcacgagtggaactgtggaagtactaaaaacaatctgttaacttttgctttagaaaagctttctatggttctgccaaaccagctctgtcagtagaccactgagcggtgagcaccatctaaaccgcagaattaatatgcaagccagagccagggatatatacatcacaacttcacaagcccactggttctaatagaagaagcaaaagcttcagtcttcaactaatactggtataaagccctgagacatgcataacaaacctgcacttgcatttcctgcactgatacttcctctcgccttcgatcatcttcacgccaccggacctgatcacggtccccttcaaagtgagcagagttcccctgtgcttcaccctcaccttcccaatgctcggggacgcttctgccgaacaccaccattaccaccaaatcacgatagcccgtaagcaactgcccaaaaacaccaaaaaaaactacacgggcattacgccgaacacaggtgtcgcatgcgtgcgctcaccagggcattcgagtgccgaccccgaggtgttgacgcgcacgtgcacgaacttcttctccattgtctcgtcgcccgccttcctctgagaatcaagagtctctgagaaaaaaaaaatggggggaacaagcaggtgcaggtcgtacggccgcctggactactaaccttgtcagctcgtcgagcggcggcatcgaatttgtcgagggcgcgttgcgcggcggcgtcgaacagctcgagcacgtccttggggtagtcgtagagttggtgggcgacctcggggtcgaactccaggagctccgcgaagctgcgagagggaggggagacggggttagggtttggaggggggagagaacggcggcagctggggaggaggacgaggactcactcgatgacgagggggaaatggagcttgccgtccgggaaggggaggaggatgcggcggaggtcgtcggcgtggaagcggttgaggaaactgtctaggcgactctcgaactcgtcgaggtcgtcgacggcgaactcctccgccggcggcggcatttgggcggcggtttgggccgcgtatggtggccgtacgggcaggaaagggcggagaaaagctggccgcggagaggacacaaggcggtgacgacggctgacgggactgactgacgcgaggtcacggtggtggtggtggcctcgatttgggggaatttgggtggagattaaattgggccggttcttggtctagaaagctaaagcccactatattgagcccgttaggcctctcgaaaaatgtggcccatataaaagttgcccccgttctttttcttctgaaaactcagaagaaatgtgcctgtctgttgttggtagcagactaacagtaacattttgctttattttcaccgggtaaaccagtgtttgttatttctcagccactttaaaaacgaagttgtctgttttcatagtagagcaggataatagtataactcacttcctacaattagcccattttaaagccaacatatataataaattagctataagattggctcttctcatctctctatctctcttagagcaagtatgataaagggttgtaagaggctgaatgcttaagtggatgagagaggagatgagagagatgggaaatgggttgtaagctcatagccgacttaagcacaggaaccaagaaaatatgtaagatagacatgtggactatatatttatagtgaagagctaaccaatatgagtgagctaaggctataaagatttatactattagcagctggctgtattattagccttgctcttatacatctaatatatttatcttgaagtttgtgttaagttggctcttacgtaaaagataacacctttaatttttattttattatagctcactattatctttgctcttgtgcctccatctccatcgtggaggtcgtgtgctttctcatgtgacaaccagtccacctccatcacaagatccactgctttattatcgaacggtcactgctttatccactgcttcattatcaatctaccgacacacagtcaatccctaattataggtttagctcgtgctttcggggttttatcctcaatccagccatctaatcaatccctacatgggctggtccgttgcaaagtaacattattagtggataatagcaagctggtctttgtagcacttccagctacaatagagattactacctggaagctcctcgttggtaaaaccacaagtccacaagatgtgccactggttttgccggttggcggccatttgacctgagccagcatgaagcatgctcgagctcgacgaggcgcctaccgcgcatactacgtgctatcaaacccaaaccagtaagattcttgagacaaaaacgcgcggacaatctaacaaccatcactttgctaatcacctttgtcacatgtgaagtgcgaacgtgctcgctcgcgcgctccagcgaatacgaatacacgcgcgcccttgcaaagcaccccactttccgcacaatcagttgagaacttgagatgtgccctgtggatcagtgatgtgtcatgtggaggcctcgtcatttcccctcccctgctggctgctgcagactccaggccgcagcgccactgcgccagcgggacgcgcgaccagcggcgggcgaccgagccctgcatatgcacaccggacagggagacacaaaagcgatgggaaagcgcccgtggcagcgaggattgccggctcctgtcctgccacggcgcgagcagcggcgcagcgcatgcaggtgccccaccacagtgttgccgccgcgcgcgcggtcgtcaacgaccgagaagttgaacaaaaggtacgactagtacagtaggtactcgggtcgggcgtgcgcgcgaactgcggcagccgatggaccagcggacgcgagacggagcgcgcgcgtgtggcaaactaccgcgcgtgggagcgcacgccggcgcgggcggaggcggtctcggcgcaaggggacaccgtacgcgagggggcgcggcgtcgcctggtctcccgaggtcgcacgcacgcacgcacgctgcggcgtggcgtgcacggaggtgggtgcggaggcctgtgcgtgggagtagtttgtgcacggcacgcacacgttcatcggacttgacaatgatccgccggctgaactcatttttctaaccggctttcagctctaactctactagtaggtcctcgacctcagcatatcagatcgtgagcttcgtcttgaatacagcgcaaggttcgtgtacgggaccatcttttttcttctgttgatctgttcatggcctgtttagttcagaaccaaaaatttttacttatcatatcgaatatacagacgcatatttgatatattaaatatagactaataacaaaacaaattacatattccgcctgaaaactgcgagacaaaattattaagtctaagtaattcgtcattaacaaatatttactgtagcaccacattgtcaaatcatggcgcaattagacttaaaagattcgtctcataatttacacgtaatctgtgtaattagtttttttttatatttagaactctatgcatgtgtctaaatatttaatgtgatagagtaaaaagtttttgcataagaaggcctcagctcatttcctcctcgctcgacatccatgggtttagagcaggtacaatagcaggctataagccagctgcaaacatattttaagaagataaatgaggagagagaagagcagcgggctacagatttgtagccagctgtaacacggactttaagatacagtgtgtgcatgacaagtgggaccagatattaatagtgtagtatgtaactattgtatgaataagctattagattggctatagatgaattggagctaataattggctatactactgaacttgctcttaggtggcgagcaatattgttagcacgccggcactgacggatgaccgtgagctagcgatcgaggtgtggcgtgagcgtgacacggtgtcaactgtcaagtgtgccgtctcccgtctagtatgttcaaacattattccgcatgtgtagccagttgcacgtagaggacatatttgtattgtaaacaagagagtaaacacgtactactacttaaaaaagaacgcacggtattcgtttctgtaatataaaatgctccattatttggaattggtgcatacatgaacacaacaaaaacagctcaaacagaagataaacttatgtcctacattgcaaatggcgataaatgtatagcgcaaaatacctactaaccacgtacggagtatgcccaaatcaatcagccacctccagtgcgtcgttctctcgaccggttaaatcatgcaaccactcgcacaccacaacacacacctgccggccccatcaccccgaaatgatccaaccgaaccaacaacaaccacaccggt

SEQ ID NO: 18592 - DNA, 586 bp, Oryza sativa
caataatacatggttcgaacatgggctggctatatatagctcctggagtttagtcgtgacagagaagttgcatgggccatacatgattctgtcacgcgtcgttattactacggcaagcctagttgccatcccagtatctaaacaggagccgtcacgagttacaggcccgaagcctaaacgtgcacggtgatcttgttcgccttctcctcgttgctgtcgagcttgatgcccttgtaccacacggcgcacgcgacgtacacggcgaggtcgaccagcgagagcgcggcgaggaggaagtagaacctgtcgaggtggccggagttgaggttcccggggatccacccgggccgcctgtcgccggcggtgaggctggtgaccacgctcaccagcatgatgctcacgtagttccccagcgagatggacgccatgcacagcgagctcccgaagctcttcacgccgtcgggggcctgcccgttgaagaactccagctgccccacgtacatgaacacctccgacgccccgatcagcgcgtactgcggcacctgccacagcacgctcagggagctcggatggtccggcgcgccca

SEQ ID NO: 18593 - DNA, 1141 bp, Oryza sativa
agtggatccccccgattatctgcaaaatggtctcctgacatcaaggatgtacgttcaaaccttgatcctatgctaattgccaattttgtgaggtaactgataacttatactgagggtgttctccaaatattagttctctaattttaatcttccaaattatgattctttgaacatatttagagtatgcaatgaaccaggtatagtttcttctcttcttagcatattttattgcatagtgttcttcttacgaacctgaagggacacattatacttctgaagatctatcacagtaataccagcaataatgtgccattcttagtgtatttcattacatagtgttgttttaacgaacctgcaggggctcatttaagcttctccaaatctatcacagtaataataccagcaatggctttggcacataattgccgatccagaaagtacatggaatggcttttggtgtttattagttaaatgatgaaaaactaaaaaagacatttaggaaacatgcagtttatgacaacagagtagtattgtctggtctcattactcatatgaaggaaaggcttcccatacactgtactttcactctactagtttattgcgttgtagtttttcttatttttcattttattgcctgccaaggtagttggatgcaaccatagttgggcatatttttagcactttagtattttaattttagcgccttttctgttccttggtttcaagttcaaagatatcagctagtcttgccttctgtgcattatgaatgtctatgtactgcactcaacaggagaaccaatgaactgaagtctgatctagacatacctgttgaaattatcaacaagtttgaggaattctgggcagcttccagagctactccactgaaaggtgcttatgttccaatgtcagcttattttccttttgttgctgtctagatcttggcctgaatcctgtgagctaatattgaagcaattacaatgtactacattgtcttattgacttacatttgaccaaaaaccctgatcctgttcccaaatgtaatactccctccattccaaattgatcatcatataatatttttaagaatattctaaaatgatcatcatatttgtgttcattcattaagtttatttgttatttg

SEQ ID NO: 18594 - DNA, 1667 bp, Oryza sativa
tgcattctttcgttcttttgggtacacaggaagaaattccatcttgaaggcatttgtcctcaaatttatgggttattcacagtgaagcttgcaggtacagaactatttgccagtattctaaatcattgcgagtaattcacttgtgtttagctttctctgaaaatccagttggagattgtttctgaaaagctatttaactcttttttggagtatctataacaactgctatagttggtattgtttcatgatctgtttaattttcagttgctcttaccttaattggcggggtgcagcatgttgatgcttcaggaacaaaggttcgtggagaaccacatatgcttcttgtcggtgatccaggtactaatatccataacatttgttatatacttaaatcaaaaccatcctttctgtacataagttgaactagtgtttaacctttttccagaaaacaacatattcagttaatatgctttcactgtaatagctacacagtggactaccgattaccgctaggctagcttagtccatatcttcggccagaccttctctaagctcctggaaaactagcttgacccatagctggacgccatcatctagcttgtccgtacatggactcaatcctctcctgctgaagcacctgcgtgaaaaagtgcatccaagatgatttcctgtataccaaaatgttactcgtgcactgcacaaattccaacactgcctcttgtatatggcagaaatgttcaattcagtccagtggggatagatacaacaactaggcttagggccaaagtggagagaatagatatccatcctttttggttcatcaacctcgaacgtgctgctcaatgatgttccagggagcaatttcactatcaaagaggggttgggaaagggggtcctctgtcccaatgcattttaccttggtaattgacccgttacaagaaatcctacagcaccacacagaaaggcatcctctaccctatcctatcaagaacagactgaacgaaacatcgctataggtaggtccaagctactattcagtgtgttctagaatgtttgctcaatccactggactggtgacagacttaaagaaaaggttaggcatattcatttagactagaactaacttgtagtcagatttatgcatctatatttgaaaaaaaaaagaagtagagtaggtcagcttgaccagccccacttgcatcttccttcccagggacgcacaaataacttcttttggattcataaaagtacagaactactgcttgacatccacaagcttcataaagtgcatttggtgttcctaatagagacactacaaacagactatatgaaatatatattatctctaactgaattgtgttctattaaattttaggcactggcaaatcccagtttctgaaatttgctgctaaattgagcaaccgttcagtgatcacaactggtcttggaagcaccagtgctggtttaactgtcacagcagtcaaggatggaggtacctatgtttcacatctccattctctggcagcattatatatcgtgttttgtatttcctcgatttcaaaatctgaaactagtaaatgatttttcatagcaagtttcttgcataataactgaaacgccattttatatttgataataggggagtggatgcttgaggctggcgctct

SEQ ID NO: 18595 - DNA, 6860 bp, Oryza sativa
aggttctgaacggtgcaattctggacaagaacaatatgacacttgccttacttcaggctcagtctgaacaggggacttgataatataccctgcatttcttatcaccaataatttgataataacaacgagttattccttggcttattttgttgaaactaatgtactagaacaccaaagcacaaataaaccatgggtttctgcagatcactcatcagaatattcaccaataacttgattggcacctagcagatcatccaattgtctgcgctccttccaccattttcccatgcttcttgccttaccctcatttctagaatttattcgctggtgctacataatgctcatcacgaacctgaattcctcttccatgctcccaatatttcacagttttcatggcataattctaactttaggtgacccggcaccccaaccaaccaaccaaccaccacccacccatgtgcctgcttgttttgctacaaacacaataatcatcttcagataatatgcttatacacctaaattatttacatgccatattcatcataaatgatagtttcatccgattgggttgagctcagaactttttaaaagccatgatacatattatgtggctacatacaacttttcaccttttcctaaaaccaatgcatagattgttgtgaaaatacaagtattttagagctctataacatctgagtagcatttctcgttgtagtatgcgagagcatgacaggacaacaatacatgaagccatggagcaacaaacaataagcattgcaaaggtatctggcctctttgatttaaacaattattaccatttagtgaactgtggcacccattaactactgcactttgattcagcgtcatttcttctttattacaggctggattagtgacaacactcaacacaaggactacagtgtttggtgccactaacccaaaaggacaatacgatccaaatgaatgtactgcacttgcacatcaagctcttatgtcgctttgctacttaaccaaaactgtgccagaccacatagtattcaaggcatatttacttgcacattctactacaccaatgtgtagtttgatactatggtgccattatatgcctctaagctgttctaattatcctttgcagtgatcttatccatcctgaccgttatatttcttccttttcttttcagccttatctgtgaatacaacactttcaggaccactgttgagtagatttgatatagttcttgttctcttggatacaaaaaacaaaaaatgggataaaatagtttcatctcatatattagctgaggtattttcattgtttttgatgtttgacattatcttttgtttggtttcttgaacaagctgcactatgggtgtgcaaacaacttagcatagcattctaaaacaaacttttaaaaattgtgcagaacactgaagaaaagaaaggcaagacaagtgatccggaagtaatgtggacactgtccatgttgagaaggtgagacaattgattccaaaaagtaatgtcgatgacctccatgctgagaagatagaaagttgtttttaatgttatgttgatatcaggatatgtttacctcccatgtcatgataaggttgagcttagagacctgtggtacgctatatgccaatattgaatgcatgcaattcattatttttgttcaacacttagaaattgttttgttggcttcagcaaatgttacttccgcagaccataacataataataagtagctaaaagttccaattgtagttggctggatagcactgagaatttttattatatttctttgtcaatactaaacaatgacgcttcaatcttttataattccaggtatattcactatgtgaagcagcatttcaaacctgtgctgaccaaggaggctgaaagagttatctctagttattatcagcgtcagcgacaatcaggaactcggaacgcaggttagccggacttgtttttgtttcttgaagtattttgcagcctctcaaaaataagttttgtgcagcaaggacgactgtgcgcatgcttgagagtttgataaggctagcacaaggtatgctttgtaatctacactggatcactcaccttctcatgcccatcttgtctcaattcttttacactttatcttgtcttttctgctgtagcacatgcaagactaatgttcagaaatgatgttacgaaacttgatgctatcgctgccatattatgcattgaatcctccatgacaacatctgcaatagtagatactgctgggaatgctctgcactcgaattttacagagaaccctgaccaggaatgtatcctgaaatgtgattccatagcttacttatccaagaatatcaaatatttaactgatgaaatctcgaactgataatttttactgtagtgccacgtatatggatgttcttgcctatgtctctggtatggccttttgattcgggcaagcaaaggtgatctgttgttcctataaacgttaacactacagtactttccacttcatgcagctgattggctcattctgacgtgaaatattttcttatggaaatgcacctttaaagtatagattctgtaaactgataggcagctttctccactccttttgtttgtcttgacatattatagatattgaacaggagaagaaaatccttacgcaattgggagttagcgaagactccccattgttataaaatatcattaccaatatgaagatttacaagcaaacgtggcttatataccatgctgcacaatgaatcaagtgatatgccaaggtgataaccactcttgcttgggacatttaactattatggtcgtcttgttcttataattataagtgagtggtaatggggaatatgggataaacattgcagggaatatgtgatttgcactagattactacggtcagtttggctctaccaggtaacggtattggaaattgtaacttgttgttttagatcaatgtactggaacttgaaggtctgaaatagcaactactccctccgtcccataatataagggattttaattttttgcttgcactgtttgaccattcgtcttattcaaaaaattttggaattattatttattttatttgtgacttactttattatccaaagtactttaagcacaacttttcgttttttatatttgtacaaattttttgaataagacgagtggtcaaacaatgcaagcaaaaagtcaaaatcccttatattatgagacggagggagtaaaaaggttctctactttatattatggcaaattatattatagacttttcattgtcactcactcttgacatttccttttggttgcaaggcacgccaagtagggttattttgctgtaagtttttttttttgtcatcacagcaaaggacatttgcagttcacacaccgcaccatatgcacctagatcataaccagattggaatgaatcccaacatacacaggtgaggctaaaaatccatgacatagataggacaacaaattaacaggaagtcaattcaaacacagcatccaactactgccagctcaccacaacaaaagcaccagttccctctgtgaaaagaaacctcaactcacttcctgaacaaacacttgacacggtgtgtgtcgatgtctaaatgacatgcaacctaacagcactgcctccaccctggccttggccctagaagaggcccagttgcacggcggcaagtcctgccaggcccagcatagcccatgacctggccctgagcccagctgcaccggcggactgcttggcgggcggcgcgagcaccgttgctggggttgtgggcgtcagaccggagcttgtgccaggggacgccggtgtcgctggtgtcgtagatggagtcgtcggtgtggtggacggggcttttggggctggggctggagaggccgcggcaacgtccacgacgagcttcatgccgttgctgcagtggccggcgatgccgcagatgaagtagtgcttgccggcggtcttgagggtgacggtggtcgtgccgctgctgtcgctctggagcgcgttgctagcggtgcacgcagcgtagtccgctgcgctcacctcatccaccgagtgcgccccaccggcgtagttgaacactggagaaaagtaaaagttgcttagaaatgcatttgcaaggcagcatatatagcaggtgaactggtgaagtgcagcaagttttgatatgcattttggtactaggaagcatcaatattcaatatcaatgcacatgttttacttctttttttttcagtttctgatgcaagtcatgtttactagttcttttttttctctagtatgatgccgatgcacattttagttaactctgttagtggcttgtttagtaagaaatctatcagattaactgatctctcctggcaagcacatgatcaaaaacaatgtgcagcacttggacaaacaagtgagaacctgaacacaagaatgttaaaagtaacgcagaggcttggttacatggcgctcaccgagggtatcgcccattttgaatttcttgtcgctggcccaggtggtgtaatccgcccccatcgcccagccggacgtgtcgccgacggtgtacttggtcgccgccgccgccaccacggcgcagctcacgaggagcagagctaccagggccagcgacgaagccattgcagcagccagaatcaaaccaagaaagggaattggcaatgtgtgagtttgtgttgctctgttgagatgcaatgcagagaggattgcaagctagggcccttatatgcatgaaactgacgaggtgacgagatgagtgagtacaacgtcgcagcagctcttcagctgagagagttggtgaagtggctttcgttggagttggttgggagcaggaaccggtccatgccttgcaaaacgcattgctttcaacaggtacttctcccaaagtctcaatagtagacagaaattgccttagaaatgactctactctagctgttcggttcattttctttttgccaaataccttttggaaaagaacagtttcttcatggtcataaagctctagttagtttgcggctgaagcttgctgctttgatgccttttcagctgcaacatctttctcatgaatcatgatgcacacacgtcgcatgatattcttgcaacgaagcagagaaagatgaggaacacattaattcaactggtagcttggcaatgtcaccagactggccattaatttgttctaccaacattgtcttccttttagaccccataaggacattttccccttataaaaatagtaagcagagtatttctatgcttgcttaatccctgattagaatcagcaatttgcaaatcttagccgccatgaaaaagccacgcgaataattggtgatccgatcatcaactttgggggcagagtaacaggtgatctatagccgtagcagctggacgcctgaactaaatagcaatatatgtttggtgactagccatctcgtactgtcatatgggtcaaagcgaggattttgccaagagatttgatgagagattgcaacggcttctggttaccggtgaagcaattgatttctggttatcggtgaaagcaatcttacttgctgatccagtagttctcgagtcatttatgtgcaagagcgacttgcaaccagaaaattttccagataatgcaacgagatggtccggaccctgtcccgaaggcaaatggaagttttggtggttgtgtgcaggattcatctacaggaggtccaaaagattaaggaacaagctagctatcaattcccggaggtcaatctctaatccggttggtgaatggtgatcacgtacctaacataaaaagattagtctcgctttagggtttggtagacaaagggcagttctgttgttaatcttgtttcgtttgtcaaaggagcatatgctgttctgttcttgtagtccctcaggtaggaagcttcaggcttcagttactactttgcttatttccagtgaaattctctgtgcagaacagtagaaagatgagcacaaacccgggttcagacttcagaagtgttccagtagtccagccttctacactactgccatggatctatcagtccatgacaagatcaatatttagtttgttgtttgcagcacaggagattgcatccaaacaatgaagcatcatcagttgtatgggtcatttcttttcttcaactctaaactttgaactagcttatttttttttcaaactgttaaatggtaattttttaaagaaaatctatataggagttgtttaaaaaaatcaaattaatctatttttcaagtttaaaatagtcaatatttaattaatcatatgctaatgagttttctcgtttcgcgtgcacgaaaaatctccctgcaacctatgcatttttgtaaatgtttatgggcccgtctatatataaacgtttcgtttatataggagttgcttatgggcctgtctattttttttggaataagttcactttagatcccttaatttgtcgcccaatctgattttcatccaccgtccagaaaaccggatacaatgcatccttcaacttacaaaaccgtgcagaagaggtccctcattagtattgtgcctggttttggatgacgtggcgcctacatggcttcctttgactaggtcctcgtcccacgtgacattgatgtgacgcttaagtggcaattggatcccggaaaaataataaaaaccgttggacgcatatgtcagcttacacataaaaaaaaattaaaaaggtgggacccatgtggtcccacatgtcagcctccctcttctctctttcccctacattgcaagggagaaggggacgggcggagcagaggggggtgggggaggggttgaagtcgagct

SEQ ID NO: 18596 - DNA, 14025 bp, Oryza sativa
gcagtgtaggagagagagagaggagggatagagagaagagggaggctaacatgtgggaccacatgggccccacctttttttattagttttgtgagtagcttacatatgggtcccatggtttttattatttttccgggatccgattgccacataagcgccacgtcactgccacatgggacgaggacctagtcaaagggagccatgtaggtgccacgtcatctaaaaccaatgctgccgagggacctcttctgcgcggttctgtaagttgagggatgcgctgtatccggttttttagaccgaggatgaaaatcagactacgcggcaaattgagaaacctaaagtgaacttattccctatttttagcatcatcagatgtacgggctgtttgtggctcatatttcttgatttaagcatatgataaatcgggtgaactctgtctggcagggtgttacatattccatttccctgctttaaaagagcgcattttgtttgtcatatccagttaattataacctttgatttggtggatagtttttttcttgaacgcgcaaaaagattacacgtcaatatattagaagaatagaatgtttgttatacgacgcaatcagtcagaccgacttatgccaagaaaggggagaaaaaaaagactaaaataaagaagagacgaaagactactgtgacggctacacacaactccaaatagctgggagggggcagagccactaccttcccaggagaaccccaaaattagcgataccagctaaagaccaaaggtggccctcagagaggatggactcaaggacctccgagaccgatgacaatgcagagtcgaaaactctggagttccgctctttccacagttgccaagagactaggaagaccatagaatcgaaactggcccggagatgccccggcaagcaaaccctagaagaaggccaccaatcttggagacagctacccccgggaggagagagggcagtccaaccaagaggcgacagcacacggagccaaacttaccgagcgaacacggaatcgaggagaatgtggttcgctgtctcaagcgaacacgcaatgaggatttggtggatagtagcgatgggacaaggtatttccacactagaatagtaggaaactttcgatttttcaaccgtcggatttgttttgagatgcatactagggggaaaagaaaaaaattcacgtagaaatgggggcaaggggaatcaaactcacagcatgctgcttgcgactgcggaagctactgctaggggaaatgattaacactaccgctaggccagctcacagtttaatcatatacttcctcatccggtacttatattattatattatagggtagaggaagtatttataatttatatacaagttacacggtaagtaattgcactaatgatattatctaatgacactatagttgcatttgaaagtttttctccttaaaaaaatgtcaaatgttatatagctactccttttccacacaccacgacttgattgatatggcttgttcaattaatttgttgccaaaacaaactataccaaaatttggtaatataattttgttagtgcaacaaactcaacgagactttaccattgtaacattgtcaatttgtaccaaaatttaataaatccaataatttttattcacaaaactatatcaaaatttagtaaggtgtcaaagccaaacaacacctctacatcttgaccttgacaaaaatttggtagtgcaaaatcttggctttaccaaaaaaatttgaaaatgtttattttggcaataaactgaacatgcccatattgttttttaatgtcacaacatttgaaacctaaattcatctagcatggtaggcctgatgccaaattaaggatgactttttttctcccttttttatggtaggcatttgtacaccacaaattcttatgtgacaatttggtttcatagctaattttccttaaggttatatttttgttgaccaaatttttttaacctactcatcgcaaagttaatcatgaatcaagcatgtttaggttaggtttagggaacactaaccctctgtcatttaaggatcaggcatacattctcacaccactggagatggattaatcggtacggttaccttgcaagctacgctgactccaactacagctcatccccttcttccctctcacaactttccctcacttgtgacaatggggagataaaggtccagcggcagttgatggtagacgatttttcttcctttaagattagacactttgtagatacagtctggatggaagaggtgtctgtagtgcaaaattgctacaccttcactcatatgcaatctagatggaagatattcctgtagtgcagaactgctacctcatctctagcggtgcactcagggattcatctgctacaccttcactcagtgtggatgcacgcttcgtggatgcgtgggcctgttcactttgatgtcattttcaaccttaacaaattttagtaaagttgccaaaaaagtggctatatttaatttgctgccaaattttggtagctatataaaaaatcctaccaaaattttgacaggcaactataccaaaattttgataatgacaaaatttggtaaggttttttttagcattaaagtgaacagacctataatctggatggaagatgtgtccgtagtgcaaaattgctacctcatccgcaatgtgttgtactcaattcttctgtacatgcagaaggatgttcgtagtgcaaaacggctaccacgtctgcaatgtgttgtgatcaaatgatgcatatgtaacgatgcactatgatgcgtagcaggtttgcataccaacatcctcacgtatgtcatcgatcctctttaattagtgggtatgtagcaacgggtaaatgtaaagatcgtatgcgatatagcgccaaagttgtcacatgagaaagaccaccatgactatcaccatattaccacctatgatcctaatgatagaaataaatacatgagattgtgtgaagtgaacacgccaaggtgtttaaccatccagtaaattatatttatggtatatatatcaatgttaaattttataagagattgtgtgacgtaatatgcggtagcgctaatctacgcgctacacgcggaatattagttcgagcgccgcacaacgctccctccttctagtttttcccttttttaccaccgtacctttactccacatcccacatttcctcagttcatttttttttgttttttaccaccacaccttccgtgtttcttttttctcttttccatcttatccgtgctttatcaaaggatccgttaaaatattaaccatctagatttttccctttttctttccttctctctagtttttctgttttcgcgttttagtaaaatatttaccgtttagtttttctttccgagttttatttttttctagtgtctccccacgtttcaaaagtaacgaatttactcctatactcgcatgaatgccctttcaaaagtaacaaatttacttgtatgaatgcctccacatcgtacgacaccattcctagatggttataaaataattactaccaacttacaacgctagcaattcttttactggtgttataaatattgtctagatttcgtggtctacgagtaaaacaatgctaccttcctctcgatatagcccatgatctcatagccaccgtgtaataatatgtttagtgatgtgttcaatacatagcataagagtaaaaactaagacttaatggtctgtgagtaaaacaattaccacattcatcttgatatagcccatgatctcgtagccactatgtagtaatatgtttactgatgtattcaatacacagtaatagtattgttaatctatatcacaaaatggttgtacgaatgaaaaaattataggctcaatcacacataagtgataaaaattacccacaagtgaatcaaactagaaaagaaaaaaaaatgattcagccaaaaatccatcgtgaaactaggatcctggtggctttgttggatcttactataaggactggtggctttgttggatcttgctataaggatggagaggttggtttgtgtcttatgacaggtagtggagagggtaaccgggtggcgagtggtagctgacgatggaataatggaaggatgtagcggcgtggtatagagatgggctcgatgttgcgcagtagcagacatccatcatctagcaagcacgaaaaaaatgcaaaaacattctcgttcatgtcatagagacgacgagcaaaagaaaaatagcaaacaatctccatcaccgacggactccaccctatcctctgtgaccagccacatggagcacgatgtgcaaatatgagacctatgcagcacatcgatttagatcagataatattggagattgcacattaatttgatttgaaaaaggaattggggcttcatgcgtgaaggtaatggagagtattgagatgtaaatcggagtgccatttccttacttgcttgttctgttaatgtcgctgacgtggagcagccgctggttgttgctcttggcctaggtgaacacctccttgctggttaaggtgctacccaacgtccagcaacgaggcccgaatcagggcctttgcctcaaccaccaccggccaccgctcgccggccatcgccgtcaaccgccacgatgtcgttgttctcctccatggtgctatagtgtgtcaccgatctatgggctgggatggtagatcaatttagatcaaaaaaaagggaaaaaatgaagtggggcgagagtggttggttgggtacgggaaaaatagaatatatatcggaagcaggaagctatttttatcgatgtaaatcatttactccgataatagtgggagtaggatgacagaacgtggggtaggatcggaagtagggaagttgtttttattatcaaagtaaatcgtttactccgataacagtgggagcaagatgacgggacgtggggtgaggtgggcggactaatacatgtttggcgctcggaatactaagaaacacgctgtgctcctaataatagtactacgtaatatgctattttattatagactacatttaacaaaactactaaacttgacaaaattatgatataattataaaatttgtcatatggcggacacagcaggggacacgtgcccccttactaaataggaactgccaagcttctctttcaatcttgtgtcgtcgtttccaacaaacactctgttattatccttaagttttctctaatggcacacaatttgaaatcaaaattcaacaagcacaaccacgatgcagtgcccatggctatcccctggagacatgaaaccatcaccgtatgctaacaaaactaattatgctcagcactaacaaagctaatctctattggctaaaatttatgtacagcattcctgatcttgtataacccacaacatttaatttgatcccattttactattctttactgaagctaatgctgaaactgatcatgtaaaccaccatcctgaacatattgcacatttctgctgctctgaactgaaaagatggtgctctgatctaacaaggcagtgctgaaactgaccctgcaaaacccacatttaattttaatctttaattatatcatacttcctggtttgttgctgatgtacctagtcaaggctgatgttgagcatgcaagatcccagtgaatttcttgacagttgacacataataattacgtatgcatccttgttgtattctcaaaataattcactctaactatatgtggcaggtctggttaatactcaaagctactagactgccataggagaaggacatggtctgagtataagaggatttatttgctagtttgacaatatagaatatttatgttttcaaactggttacacatgtttaaacatatttgtagacgaatggactatggatcatggtcccaaaatgagttcaatcatcactacatatctatatgtgcatccatttgctatatgttcaaaatgcggcacagcctaaccatccatcagaattcagatggtggtcattcctgtttgtttactcctcagttcttcttgaaccacctggtgtttgtttgcaaatcacctgctgtttgtttgacaatcactagtacttttatttgcaaataacttacttccttggtaaataaatcctcttgtactcagaattcagatggtggtcattatagaatgacaataaaccactagtacttttatttgacaatcaccatctgaaccacctgctgtttgtttgacaataaaagtatctgtaggatcgagatgtcgactagagggggggtgaataggcgatttaaaactaaatgacacataatcaaaactaacctaagttgctaggcttggtgagggtcaactctaactaagcaactaaattatgttttgcaaacctagggtgatagtgactcaattatatctctagaaaagtaaatcacactcctatgtcaatgtttagcaatcctagggtgatatgatctcaagtatgtctctagaaatgtaaattgcacaaatgtaaatgcgacaatcaaatgagataaggagacaagagatttttcaccgaggtttggaaactcgccagtttcctactccccattgaggcgagcccaactccaccgctcaaccacgaagccaccgcacgcccccttcatcaaggggtgggcaaggcgggagccggcccacggagaggactacccaagcctcgatcactagggtagttcttccttcactccgaaggtggtgaactccaaaccactcacaaaccagcaccgggcctcctccacaatcttctcggaaaggtcaccgggcaactcctccacaagctgtctaggaggcggcaacctccaagagtaacaagcaatgacccggcgtggagatgatcaatcaagtgccacactagctctacaatggaagcaatgcacttgactcttggctaattaaccctctaacacactagatggatgaacacaaagctcaagtgggtgtgagagaggtgcaaggggtgtatgcaattgaattgggtgccaagagagcccccttgctgctggagggggagtatttatacttccaccaaccaaaagtagccgttgggggcgaaatcccccaactttgtgctctgccggtctgaccggaggtatgtggccggtcagaccgtgctactctacaacggctagaaaactagccgttgtagtgttgtcagagggccccgtcggcctggccggtcagaccgaggttgagtggccggtcagactggcctcggctgaccgactacggctccgtcggctctgtatcggccatcccgagcagcaccatcccggcctccagggggccggtctgaccgcgcatgtgccgtcggtcagaccgccgttgtgtgtccacaattagtgcttctcattaattaccaaaattaacaacgggggcctagatgcttcaatctccccctttttggtaattgatgacaaacaccacaaatatatatatataatcaaaagctccccctaaacatgtgcatatcaatcatagacaacaaatatggagccaatgcacattttaatttcacatttcaacaagcacaaacacataagcaaaatttcaatgtgaacttcaagaaatattcatccatgagcataagatggtcacatatatatcaatatcacatacaccatccatcatcgcacaagttcacatcacttaaccattcaaatcacataagtcacaaatcattgctcacaaataaacataggctattaagaccatgaagggtccaaatgacatagagagtcaaacaaaatgataaagaacacacaatatagagtaatagcccatacccatacaaaatatagcctaaacctccttaacctattagatatgaggtgactaacctcactaccactaatcccaacccacaagacataaagcgcacttttctcccccttttggcatcaagtaccaaaaaaaaaggtcttcattcttgtggaggagaaggaggacgcgccgaagtggaaggatgaggagcatcacgacgacgatgatacacaaatgcttgggagctctccaacatttggacttgagaatccaatgtacccactctagtgtgcaatctccccatggaagcattcaagtctccaacatccgtgcgcaagccacgaacatcctcatgtcatgcttcatgcccggtagacaagcgttgaatacttttacttagggtattaatagccccaagtaccgggttgaaatattcattgggttgaattccaaagtaagtatactgtggatggaagaaagcatttggatcatacccatgaggaggaggaggtgctgagcttgagctagctccaagatgagaagagggcaccatcctaagcatgtggagctccaagctgaaggcggggcttgtactgcttgtgcttcttcaaattttgccagcagccccaagcttgtcttgaatcaacctcatgatgtaaggggcataatagattccctgagtgaatgtccccttggagatggcaatctcctgcatcatgagagacacaatgtcgaactgacgaccctgaatgatcgtatcgatgatgtgccaagccacccctctaatgtcatcattgttgccaaggcgagggaggatagtggctctcacaatcctgttaaccacactggggatagtcctcaatccggcaaccttcccatgtgtgtaccgcactccatcttcataaaactgagagagatagtctatggagagcggattgtgagtgtgctcctcatgcaaatcatatccaaagtctaggcgaatattgaggagccgccagaattgcctccgagagatagaacactggagggtatcggacatccacttcatctcattatagtccccagccacccacactgtagcatagatctgtcggatcaaatcttcattgtagtcttgcttgagagtcacaatccggtcaatgccaacagtcttgaagagatcctacaagccctcaaactctggagtctcgttgatgtctctccaagaaatccacttatgctctacaaatgctttccctgcataaacctgctcatacacagacttctggaaagcggtgtgaaaacggggatccggggtgtcccgaggccttaaaaactgatcatgatgcctcaagatggtatactgcgatggattcctcatgttcacatcaaactagatggagggatcaacgtgcatatcatcacttccttcatcctcatcctctccacttccactgtcatcatctccacttgcctcctcactagccccctcaatatttgcttcaacctcttcatcactttgagcgtaatcctctccgctcgattcctcaggctcactcacgggatccggagtgggcgcacaacgaccatggcgagtgcggggaggcatcactgtcaaagagcaaaggatgtgtaagcaatgattttagaaaccacatagtgaggtggacggaaacggttgtcggccagtcaggggcagtcagaccgcggaccgatggccggtcagaccgacggccacagccagtcagaccgcgagcatgccgcccggtcagaccgccgtggtgcggccgtgttgacgaaaaaaatcgaacacaccggcctgggagatctgcttagctcatgtgcaggtccaaatcttgatgagatgcgagcgtgccagtcagtttgatcctgcaactgacaagatatgcaaatagtagacaaaacagccgatcggttgacaagtcgatggagtatttccagccgatagccgataaatagccgatgctgataccagccgatagcgatagggtttaagcaatcggctatatgtccaatgtagatagtgatataaacgcaattggctgacgacgatgtaataaaataacaatataatccagtagaaaccaatcggctagaaacaagatataataagtactgatccgaaggttaaagcacacatcggctcgaggtccgatgtcatgaaatccacaagattagattaaacagtgaaacctttgttgtcatcggctaaatccaacttatatgtatatgcaatccttatgagccgatgcaacatccagataactcatcggctgaaaccccgatgaaacccttattggcaatcaagaagcaggctagagattatggttctaagcacgacttagtagatgaaactcaactgatgcagcactaagtatgaaaagaaacataatacctagacaatcaagccgttgactgagttttcagggtggtagatgtctaagctaatctaatctagcaatgcgttttagccgataccggcagaaaccctaaaacgagaagcagccgatagagctaaattgatatgctaagactagattaacagagacatatgataaataggtaggcaaatatatcatccaaaccagagcaatccaagaggtcgaatgtaccgatgcagccttgaacgatgccgatgtagatgagacaattgcctgggccgacggaacattggacttaccccttcgccggagatcgaacaccgatgcagccccgcgtcaggtgccaagtcccgccggacgataaaataaagtagaaaaggtaaaaggtggcgatgcgccgaattgtattgatcgtggagatagattacatagaccccgggtgtacatatttatacccatgggttgatacaagtccttgtcggacaagaaagaaatttttctaaagataaaaggaaaagataaagtccttataggacactaaacacactttcctaaagataaaaggaaactaacaaactatttctaattaatagataacttgccatgctgcattctctttgaactcggtctcttctggataatcttcttttagtagatcaatttccttaaccgaatatagcaagaatgcgacaactgacgacttgacaactctcatcggctaatctcaggacttcgaagccgatgctgactctaagccgatgactactccgggcttaccaaatttcactgttaacaggccggtcagaccgaccaggagccctcggtcagaccggcgagaggcagccggtcagaccgcccctagggctagccaaaccgccactgacagggtcaaccaaaaattcatccacaatcacacagttgattccaacaaaaaaatgctaggacagggttgcacaagattggaatatgaacatcaaagggtatggcctatttcatcaagactggaacaactacccatagccctagggtgaaatagatcgatttgagagaatgcacaagagggagagtgatttaccggttggaggagttgaatcacaccaagaaactaccctctattgacgcaaatcgaagaacacctcgtgcttcacctagggttccatgccatggatcaaaaactcaacaaaaacacaaacaaatccatggaatagagagaggaaacggaggagaatcacttacggtgtaaccggagagaaatccacggtcaaaccgaggggatttggtggagggatgtggctagggtttgggagaggagagaagaggagtttttttcgagttggggaagaagatggctgaatgagaggagatggagtcgggtaggggaagaagagagaaagaaaaggaagattcctaggcccaccattcccggctggtcagtccggctatatgcggccggtcagaccgctagggtgcggccggtcagaccgggccctagtggccggtcaaaccgccgccaccaggccggtcagaccgcctggcccccagccgactgtgcacagcccttgcacagttcggttacccccactcaataaaattcaacaaaaatttgatttttggagcaattttgaaatgtgtgagttgaaatattgccaaccattcataacatttgaaaattataaagatttgcaacgaaactcacttgagtgctaggaggtgaccttttatggtctataggagtttttgggcgaatttgattttcaaataacttttgaatgatttggtttttgaaataggtttgaataccaaaaacatttcaaatcttcttctctaccaactttgttttgaaacttttctcaaattccttctcaatcttattttggggataaatctcattttggccaaaactaagaatctagattcttcaaaagagggccaaaatggcatttttcattcaaaaatcatttttcttgcaatgtgaggcttggaaaacatataggaaaccttttgaaacatttttcaagagatagttttcaaattacattgattttgcaaaagctttgacttatgttgacttgggcattttgaaaatactactagcaccactagttgatttgctcacatataaagagaggtagagcacatgcaagagtgcaaaactctcccttaatgtgacatgctccattttcgcaatgaagaaccaaatggcaacaaatccaaagcataggagcaaatgagagcaaatatacataatgcaaaagaagcaaccatggtgcaccatctcaagccacattagagaaatctatgacatttaactcattcctcaacttgcaaaagcgggtttcatcaagaggcttggtaaatatgtcggctagttgatcctcggttcttatgtggctaatgactatgtcactcttggcaacatggtctcttaggaagtgatggcgaatatcaatatgcttggttctagaatgttggaccgggttattggctatctttatggcactatcattgtcacatagaagtgtgattttggtgaaggatatgccatagtccaacaaggtttgtttcatccaaagcaattgggcacaacaactacccgccgaaacatattccgcctcagcggtagagagggctacggagttttgtttcttggatgaccatgacacaagggatctactaagcatttggcaactaccggatgtgctctttctatccactttgcaaccggtataatccgaatcggaatagccaacaagcttaaacttagcaccttttgggtaccacaagccaatagtagaggaatgctttaaatatcttagaatccttttcacggccaccaagtgacattccttaggagcggcttgaaaccgtgcacacatgcaaacactaaacatgctatccggcctagatgcgataaggtaaagcaaactaccaatcatggaacgataaagctttaaatctaccagtttacctccctcatcaaggtcgagatgcccgttggttgccataggtgtcttgatgggcttcgcatcctccaagccaaacctcttcagtaaatccttgatgtacttggtttggctcacaaacgtcccatccttgagttggttgatttgaagtccaaggaagaagctcaactctccaatcatggacatctcaaattccctagacatcatatcaccaaattccttgcaaaatacctcattagtagaaccgaatatgatgtcatcaacataaatttgacacacaaagaaatcatcaccaatgatttttgtgaaaagggtggtgtcaacttttccaattttgaaatcctttgacaaaagaaaatctctcaatctttcatatcaagccctaggagcttgttttagaccataaagagcttttgagagtttataaacatggttaggatttttaggatcttcaaaaccgggaggttgttcaacaaagacaagttcggcaatttcaccatttagaaaagcacttttcacatccatttgaaatagttttatatcaaaacatgatgcaaatgcaagaaggatgcgaatagcctcaagtcttgccacgggggcaaaagtttcaccgaagtccaaaccttcaacttgtgtgaaaccttgtgccaccaaccttgccttgtttctcaccaccaacccgttctcatcttgtttgtttctaaagacccactttgtccctatgacattgtggtctctaggtctttcaaccaaagtccacaccttgtttcttgcaaagttgttgagctcttcatgcatagcattcatccatccggatcacaaagagcttcatttacatgtttgggggatccac

SEQ ID NO: 18597 - DNA, 27034 bp, Oryza sativa
gtggatcccccacatgttttggctcaagacaagaaacaaacgagtaatgttcacaaatcgaagcgacacgagatcgagtttgaacacccttacttatgtcacccaacacttggtcaattgggtgatccttggaaagagcggtgtgtatccttggaggcataggtggatcttgtgctttctcctcctccacctcaacttgagcttgacttggcgtagcggaagtagatggcttatcttgagtggaggtggatggcttgtcttccacttcaataggcttgacatctccaatagacatgttcttcatagctctcatcaagccttcatcacctacatcatccaaattctcgtgcccctcttgggagccattagtttcatcaaattgaatatcgacgatttcttccacaatacctttattcttgttgtagacccggtatgccttgctatttgaagcataacctagaagaaacccttcatcacaccgactttcaaatttggttagtctaacaccctttcggtaaatataacacttgcaaccaaaaactcgaaaataggcaacatttggcttcctcccaacaattagctcataggaagtctttttcaagagacgatgcaaataaagccaattggttgcatggcaagcggtgtttatggcttccgcccaaaaggaatcggaaacaccatattcatcaagcatagtccttgccatctcaatcaatgtacgatttttcctctccactacaccattttgttagggtgagtaggtagcggaaagttcgtgtttaataccaagatcatcacaatagtcctcgatattggtattcttaaactcggaaccattgtcacttctaattttcacaagagtgcaattaaattcattttaatccctttttgcaaactttttgaaaaactcggcaacaatagacttgtcatgcaaaaagaacacccaagtataacgagaataattatcaacaatcacaagacaatgactattaccaccgatgctcttataggttgttgggccaaacaaatccatatgcaagagctccaatggtctagatgtggacatgatactcttagtaggatgagaacatgcaacttgcttgccggcttgacaagcactacaaagcttatctttctcaaacttcacatctttcaagcccacaactagatcacgttttgaaagtttgctcaattgattcatgccaacatgggctagcctcctatgctaaagccaacccaatgaagtttttgcaactaaacaagttttcaaatttgctttactagaattgaaatcaaccaaataaagatttccatatctaaaacctttgaacacacaagacttgtcaagaaggctagaaacaataacttcttgcgggaagaaagcatatgacaagccaagatcacaaatttgagcaactgaaagcaaattgaaatttagagatttaacaagagagacattatcaattgacaaatcattggagatagcaattttacctaacccaattacctttcctttgctattgtctccaaaagtcactttctcttgttcattccctcctacttcaaatgtggtgaacatagccctatcaccggtcatgtgttgagtgcatccactatcaagcacccaatggctcccaccggtgcggtagttcacctacaaaagaagatcaagctcttttaggtacccaaacttgtttgggtccttggaggttagagaccaaaactttgggcacccaaatgacattctttttaccaccgagtataggggaacccacatatctagcaacaatgctaccatcatgagtcttccaaagcatataatgagaatcaaacatgcatatctaaatacatatcattgctcttgacaaaacgagtggcacggtgagaaggtttcttacccttctttggaatgaatccaagtccctccttgttaaggatgcaccgttgctcactcaaaatcttatcaagagtgttcttacccttgaagcacctctccaaactcttgttgagcttggccacttgctccttaagctcattgttctcaacaacaagtgaggcatcacaaatagaaatacaagagctagagctagagctaggcatatccacaagaccatcacaagaggtagaaatgctagatgatgcaacatgagcaatatggcaagtagcactatcatcaagcaaatcacaagatatgccaacatcaatgagagctccatgttgagtagtggaaaggaggttgtcatgagcttccttaagcttctcatgagaaatagtgagtctctcatgagaggtctttagttcctcatacaagacctctaaagaagcatgatccttttttagggccttgaacttgacaatctccttctcactataagcatggagctcctcaaacatactcacaagctcatcataggaaacatcatcacaatcatcatcactctcactatcactaagagatgttaccttagaggagccctttgccatgagacaaagtggagcgaagagtgatagagcctccttgatggcaacaacggccatcttcttcttcttggagcttgcatcctcaccaccttcttcctcggacccggatgaggcggagctctcctcatttgagtcccattccccgatgaatgcctcaatcttcttgccttccttcttgagcttcttcatgagcttatagcctccactcttcttcttggatgacttgtctccatcatccttggaagggcacttggaagtaaagtgtcccttctcaccacactcaaagcacttcaagttggagagagtcttgttgggtcttctatttcttctcctactggagttggagccccttcctctctcctttctccttcccaagagatcattgaaccttctagtaagaagggcaatctcttcctccaagtcctcattggcttcattcactttgcccttgcccttgtcttcaacttcggcttggagagcaatgcacttcttggaaggtgaggcttcctccatctccttcttcttcaacttgtacatgtcattggtgttgatcttccccaagaggcttgcgggtgtcatccttgacatgtcggagttgatgagcatggtgacaagggtctcatacttccccggtagagccctaagcatcttttgggcaacctcaagatcggtgtagtttgccccaagccccttgagatcattcacaatgacattgagcctcccatacatgtcattcacactctcatgaggcaacatggagaatgtctcatattggatcttgaggaaatgaagcttggcatccttgtactcgcttgtgccctcatggatcttcgccaacttgccaacttgttccaaatctcatatgcggtctcaaggtggctcactctatcaaactcctcttggctcaaagagttgaacaaaacattcattgcttgggcattgagttggaggttgcggtgatcaatctccgtcaagggcgtgccggtgatagcaaagcctacatccacaatactccaaatatggaagctcatagctttgaggtgagtagacattttaattttccaagtggaatagtttgtgccattaaatatgggagccttccctacatggttcacctcgttcgacatcttctctctaggcagtgaaacccaatcaagagagaccaagctctgataccacttgtaggatcgagatgtcgactagagaggggggtgaatagacaatttaaaactaaatgacacctaatcaaaactaacctaagttgctaggcttggtgagggtcaactctaactaagcaactaagttatattttgcaaacctagggtgatagtggctcaattatatctctaggaaagtaaatcacactcctatgtcaatatttagcaatcctagggtgatatgatctcaaatatgtctctagaaatgtaaattgcacaaatgtaaatgcgacaatcaaatgagacaaggagacaagagatttttcaccgaggttcggaaactcgccggtttcctactccccgttgaggcgagcccaactccaccgctcaaccacgaagccaccgcacgcccccttcgtcaaggggtgggcaaggcgggagccggcccacggagaggactacccaagcctcgatcactagggtagttcttccttcactccgaaggtggtgaactccaaaccactcacaaaccggcgccgggcctcctccacaatcttctcggagaggtcaccgggcaactcctccacaagccgtctaggaggcggcaacctccaagagtaacaagcaatgacccggtgtggagatgatcaatcaagtgccacactagctctacaatggaagcaatgcacttgactcttggctaattaaccctctaacacactagatggatgaacacaaagctcaagtgggtgtgagagaggtgcaaggggtgtatgcaattgaattgggtgccaagagagcccacttgctgctggagggggagtatttatactcccaccaaccaaaactagccgttgggggcgaaatcccccaactttgtgctctaccggtctgaccggaggtatgtggccggtcagaccgtgctactctgcaacggctagaaaattagccgttgtagtgctgtcagagggccccatcggcctggccggtcagaccgaggttgagtggccggtcagaccggccttggctcggtcagaccgccatcggctcggtctgaccgactacggctcagtcggctttgtatcggccatcccgagcagcaccatcccggcctccacggggccggtctgaccgcgcatgtgccgccggtcagaccggccttatgcgctggtcagaccgccgttgtgtgttcggtcagaccggccaggacacgacagtcagaccgccactatgtggccggtctgaccgcccctgatcaggccgaacccagtgaatacaaaggtgattgtgtgtgtgtgtgtgatgaaaatgtgagcacaagtgaaaatgcaatgacctaatgtggcaatttaatcatctctttgctaggtcattaccccccttgatagtacgcgaaactaacaaataaactagcaaatttgatcgcccttcacctcgatcaattttaaaactaaaactctagttttaccgttttcttttcttcgctccgcgccatcaaatcttaatccatcgatagtcatccatgcgcacacatgacgtggacctaacttaaaatatgtctcaatagcaacggttagtccacaattagtgtttgtcattaattaccaaaattaacaacgggggtctagatgctttactatcgcccgccacatccactacatttttgcaaagaaccccctggcgaggctttcctcttctcccattgaggggtcagggccatcaggcacacaaaacattttcctgtcgctgcaattgaaggggatgccctcaacggccgcggcagcgacgccttctcgccgtcaaatttgaaacatacaacaatgaatcaagtaacgagtggcgtttcaggttctctccaaaaccaaatctttaaattttttcgctccccctaacttggtcctcaactaggcttgtagatcgcggcggctgatagcggtcgcatcggtagcacgatggcagaagcagcggcagcggcggaggcacaggcagccagaaatggaggctaactctgtgatgtgcccccttgctcccgtgccctcctgcatcgatccagccccatgagctcacttttttgatgaagttttcccagagcagccaatttgttgaagcacactactagatgatgtgcaagaacaagattttttataacaaccattgctacttctaggtggttcgcaagaacagtaattagcaataacaagaatcaagaaacatgttgacaagaatttcttattttgaaccattctgaattttgagaagaaatatggttaaggctgccaatttgtcctagttgtgaagctagatgtattgaagaatcttgctgtataagttgtaaattcatccaataagcagctggtgattgacaacatgcatcttttattacttttgtttttccttttttctatatttgagagatgtgccagcaagcaatacactggatgaaaaatcttctaaacccctgaaactgaatgcaatggtttctgaaagactgttgatatgaatataatagattttgtttgcttatccattcaagtaatagcacgagcatcatgtttaattatatgaacgtgctagtcatcttaattaatatgcatgttctgaaggctgaacgcctgaacacactgatatactttgcactaggatcacctaggttagatttagtcgggtggttctatttgggattgatgaacgacattgtagatgaaagggagaggggtttagataccgaccggttgaggtgttcgtggaggaagaagcgccggacatcgtcgttgtcgtcgcagcttgacgtggacggcggcgacggtgtgcttgacggcggcggttgtcgttgcagcggtggtcgtgggcaatcccggcgaggtcgtggcgcggcggtggcgtttcccgtcactagctgcgccccctcgatcggattagagtttgtagggcggagttggcggcggcgacgaatctcgtaccttgtgccgtgccgacctccacccctcttttatatggcgcagtgtgacggggacccaccagccattaggctgggcgcccccgatcagggcgcggtcaaggtccgttgtgccgttgggcccgacgggtgggagatctatctaacacacatcaacaaagaaaacgaggtaagcaaaagaactgggaaatcataacatttactttaaaatgaactgaattatcctgtcaaatactaagttcttgtgttgaactgaattatttttcagctgctagccgcttccatattcttttgcccccatcatcatttaaattgcttgcatatattgcacaagcgtacgtgttgttttaaactcttccctgctaggatgacaagctcctccagagtctccgtttttgcttcaggcaagaagaatcgagggagaatgaacgtgtggggaaaggaatttttggaaaacgatgagggccttgagccgccgctggaagacgatctggttgatctgaataatcgtgggatggataaccaagggtcagggggttctttgcaaaaagtagtgtatgtggcgggcggtttttttttttttaaattgctgcatccggttggcagcccttggattgagatcgagaggaccccattgcacgagtgcatgtgtgcatatgatggctcgtgtgcacctgatacgctgccgtgctaagcagctgcttggcgcaatatatatgtaacaatttgagtggtttaggccaactcaatttgtgaaaccatacttaccttgcaagctttcatatcagcatttcttaaaagtttaaactcggtgaatagtcattgggattcgagcataaggtcatattcgtttggacacttttctaacttttcctccctcgtacgtatttatagagttgatgaaatgccgagatgctaattctgcattaatcgtcactgccctataacaataatataaatacgaaacccccatgcctcatcatgacgattctcaaacccgttcgtgcacggaccataagcgcgtgttggccaaattaatagggtttgcattatgcaaagtctaaagacaaagcatttgcagcctacttccagctaaggatgcaaacaggtcaacccacgaacccatttatagacgaaattagtggataacccactgattgattcacaggttacctactaatttaatctataaattaatttattatatattgaccacttactccctccgtctcaaaataagtgcagttttgacaattcatgtctaacctttgaccgttcgttttatttgatttttttaaataattagtatttttattgttattagatgataaaacatgaatagtacattatatgggactaattttttttatttttttcataattttttcaaataagacggacggtcaaacgttggacacggatacccacgactgcatttattttaggacggatgtagtatatctctaggtgtgacaaaccaaaccaccacgtgaaaatttacatgttaccatttacatgtaagtaaattcgtggatccgcttgctattttagcaggtcagcactccgcacttcagtactctctccgtttcataatgtaagttattctagtatttttcacattcatattgatgttaatgaattagattctataatgacttatgctgtgaaacagacaaagtactcagcacacgccgccttcgtatgcgtgccgcgacgtccgtcgggacagggacgacgaccgggtgtatggaggcaacgtgccgcacccgcccccaccgtccggacgatcgagatccacgtggaccggaagactttcccgcttcgcgtgaggcggacggccgcgggccgcccggccggcctgcagccctgcacacgcgctggacgaagcggccgatctctccacgcgcgctaatccgcgcgccgcggcgttgcaaaatggcagcctcgatcgctctcccgtaccacgtcgcgtacgtacgcgcgccacggtaacacgatacgggagctcaccgatcggccggttggtgggggtggggtggatggatgtcacggtgaaagtagcagtggacaagttgatgttgatttggctgatgcgcaaaaccaagggttggtttggcttgaggcctatattggccttaccaatatttagcaattttaatagtgtttattgtctatttgttttggagccaaattttagcatgcctaagaaaatataccatttcaacagttaatttaggctattttggcttcaatccaaacacaattttatttttgccaaaattagccatgctaaaagttaccaaaatttgatattgataaaaattggtaaggctaatttaggccaccaaccaaaccagccccaagtcaacactcgagactagcgtgcacatcggttcggttcaggaatcaggacaggagggttcactttggttgtatcgcacgttctggaagcggatgtacttagtattactgtgagtacgctctagtgctctacacactggaagagccacttgtggagatcaattacaaagagccaatgtgccatgttcttgacttgaggacgtcaccacaaaccgttatcaacttgtcgacttgtgagttgtggcgaccttcacaaaatgcagtacaaaccggccgaagtccacccacctgcacagcagaaataaatatactactagcacttatatttaagcatcctttaaagcacagaattttgcaggaatcagtcacattcccaacaagtctttaaccccataggtacggagtgagtactccgtagcttgatatacacctttcgtttaaaaaaacaatatttactataaaactgaacaggtatatttccagcttcagtttgtatcaggttatttccggacctcataatttgcaggacagtcgggacagacagacaatcgacgcgtgcacactgtccgtcaagcctacagctgcgtgcgttctccccagccacgcacgacacgaggttcgcaagtccaacccacgcgccgacgcgagacctactcgaaacacctggacggcccggatcccccgcccgcgcccggtcacggacgccaagacgccatctcgtctcgtccattccaacccctccaaacccaaaccccccaattctgaccgcgcgaaccgcgactcgcgccaccaccagaccagacgacacgacacgctgcgccccaagtcatataccgcccgccgcgacctcgtccaacaaacgcaacgcaaacactcgctcgatcgccacatgccgacgcctcgtcctcgccaccgccaccatgcgctcccgctcgcgctcgcgctcgccgcgccgctgctgctgctagccgcggcggacgggcagccgaacgagtcgagggacaagaacaacggcggcgggggaggtgggttcatggcgcccagcggcggaggcggcggcatgggctctcagtcgccgagcttcagcgcgcccatggtggtgctcctcgtggcgctcatcgcggccttcttcttcatcgggttcttctccatctatatccggcggtgcggcggcgaggcctccacggggccgaccatcccggccgcggcgctggcggcgctgtcgcggcaggagcagcggagccggcggcagcgcgggctcgaccccgccgtggtcgagtcgttccccaccatgaagtacgccgaggcgagggagctccgcgacggcggcaaggacgccgtgctcgagtgcgccgtctgcctcagcgagttcgacgacgacgaggagctccggttgctgcccaagtgcagccacgccttccacccggactgcatcggggagtggctcgccggccacgtcacctgccctgtctgtcggtgcaaccttgcgcccgacgcggcggcggcggaagcgaacgtcgtctccggcgaggtggatggggagcagcaggaggaggaggtggtggtggccatcgacgtggaccgcgagggcgaggaggaggacgaggagaggcggagggaggcgatggagctcgagaggatcggcagccagcgccgcgcggtgcggtcgaggtcggggcggccgctgccgctgccgcggtcgcactcgacgggccactccctcgccacgacgcggctcggcgacgccggcgacctcgagcggttcacgctgcgcctgccggagcacgtgcgcagggagatggtcgccgccgccggcgaggagagcctgcgccgcaccgccgtccgggaaggccgcgtcggcggcggcgcccggagcgcgcggatcgggcggtccgaccggtggccgtcgttcatcgcgaggaccttctcctcgaggatcccgttctggtctgcgtcgaggagggtactcgacgccgcggaggccggagctgacgccgccgccaccaccaccaccacgacgccaacgtcaacggcgaggaccaagcgtgacaagacggccgccgccgcagatggctccgtgagctcagccaagggcagcgtccgcttcgactgtctcggcggcggcggcggcggcggcggcccgagcaacagagtcgtcgccttcgccaacgacgacgaggaggatgacgacgagaagccaatcgcccggcaagtttgagctcgcgccatgcgcggtggcggcgccagtgcatgcatcatctgatcagaaaaccaatccgcggcggcttctcgcagcgatccgccatggctggaccttcgatgaatcagctcgtgcacggacacagatcactagaaaagatcatcaatttgagttgaaaataccactcctaaattagtactagattgttaattatacatttttctctccattgcttctttggatagagaagtggcgtggaaacgttcaaagatccaatttttcttcccctccgttgaaaaactggagcggggttgtacttgtaccggcactgtattcaaatattcatgtgattattcgtatccttcaaacgagcttaggttgctggacttatcaaacactcagctcaagcatgccagaatttgtttttttttgtttttataaaaaaaaacactgatactagcagtgttccctccaaatggaaattctttagcacgttttccctccacatggggattcgttcttctgatcttgagttagttgggggagtatgattgatggcctagttgaagaagaaattacgcatgcagtgacatggtcatggtctgcaactccgcatcagctcagacgatgcaattggaacgtgtcgtcagtcaaatgatgcacttcccaactgaattctcaacgccgtacctgtacagtatcaacttattacatgtcatcctcatttataattattcgttatgaattatgatatcaggagctgcctagcagtacttcgtttcccaaacggcatagcataaggtcggaaaaataaactatgatgaaaaaactctaaaatcaactacaaattttagattaaaaatttaaattttgacttacaagcataagcgaaaagatgaggatgttctcttctcctggctaggaattcaggcccagtttgagattgatgagattaagattaagtaaacataaaatgagagagccattagtgaatcattaatttactaatcattaattgagttttaataactattgcaaagttaaaaaaattgatttgtcgtgaccttacgtcacggacaagttcggggataaacagaaaaattcatttttcctgcctatcctaagaaataagctcaaacacaaaatgcacaactttggtgattgatattcctctattaaattatgtccccccttgctacaagatttcggcaagcttatatagcctatagccccgtatatgtgagattacaactttgcccctatgggcccttgtgagtttatatccttaccatgtcagcaaccctaagggcattttgctatattttggaggtcattatggtcttttgacgtcagctagcacgagtggttgcgagtggtccccgtggaatcttcttttggcatctttcttgtccaagtagtgttttccctcgagttattacattgagcgtatttcccatcttgagtcgtcttttttatctcgagggttcgaacacttcttcccacctacctggctctcggaattttttttgtcactagttagaaatctatctaaacaggacaagttgtttcagtagcacaaaacctttcgaatagaactttccgactcgaatagtactttaccgttcgagtagtattttaccactcgaatagtattttaccgtttgaacacttagggtgtgttcgctagtacaggttcccaactgggaacagcacgtgcaaaaaacagagcgatccattagcgcatgattaattaagtattagctattttttttcaaaaatagattaatttgatttttttaagcaactttcgtatagaaactttttgtaaaaaacacatcatttagcagtttgaaaaacgtgcgcgtggaaacgaggaagagaggttgggaaaaggaggtgccgaacacatccttagagttttcaagacctccttttctttagtattttgaccaaatagggaggatggtgttgaccccgtgctacaacatgatttatttgatattttaaatcaacttctatataaaagtcttttgtacgaaagacaccatttagcagtttaaaaagcatgttaacgaaaatcaagatagaatctatatctgaattagaaaaaaaagaggatggatggtgaacactgcttttctttttctttacacgcctttcaaagtggacacaaaatgaagtatacttagataagaaactattccctctgttcccaatatttatcactatgcactatttaaatttcaactttgatcgctcagtcttttttacaaaaaatttaagaaacactcaaacaccgtttaaaaagtattaccatatttgtgtcctaaacataagaattaatcttccgtttatcgcaatctaaccatttaaaaattattagcggaagtattgataaacagagggaatataagctgatttaaccctaaaaaatgcgattatatatgtcgtgtctgcttttacccttcccccttttgtttcctctgtatcatatataccaattttatcatgtgactttgaagagaatttctctgctgatcgtgcaaacgctaatcacagttctacaacaacaaaaggaaaaccagttgtgcacaattgtcatcgtaccacaacatttcatgatgtactccatggccaaacgcccaaacggtacatgacagtataggagtactgaacatgttggtttcactataatacctgaggagatgttgacctcgatcttctagaggcgagaaaacgactcttttgactcttgaggtgagtgttagctcctccaagcctacaattaaacaacgggggaccctagactctgaaaattcatgtccttctagatactgatgcgggtgaagtgtgaactgagtgataagaaataattaagactcggcacatggtcagttggggcagctggttatgtgcaaactcttgtcattttcttccccatttcagtaacgctaggtcatttttcagttttcacgaagcttttcttctgaagaacttggtctttctttctttctttctttttttattctgaacgtatgttttcacaaagcatggtgattctcgcacttatgtcgatactccctccgtcccacaatataagggattttttgagtttttgattgcaacttttgatcactcgtcttattcaaattttttttgtaaatataaaaaacgaaaagttgtgcttaaagtactgtagataataaagtaagtcacaaataaaataaataataatttcaaataaatttgaataagacgagtggtcaaacgttgcaagtaaaaattcaaaatccattatattatgggacggagggagtatttttctataggaaaggtccaacttatacgaccttacacacttgtggttgtaggaaaatcaatgctaaactacataactgaatattttacagccttagacccataaaattctactttaaagactttactttgggggttgctatgtcaactggaaaattgtgatgttgccaatgccaaaaatttaagagtaaaaagtgaacaacaataagaaagggaccaggcacttttatgaaaactagtaatatatccgtactttgtaacggattagaccaatataattagggaattgcctggctgggtggattgagaataaattattggatcagtggttatgtacatgcgaaggagcggacctcttacgataaaagggacatggaaaaaagatgactgcacttttaaagtaatagaaaaaaaaagagaataataggcaaatacatttctgggtttgtctatagagcatttggcttggtagtattgctcaaggttctgaccgattgaaccacggttataaaccttagaaaaataatttaaaaaacccttagaaagatgaaagaagtttggagaagtggagaactaacgcaaagaaaacgtgcgctatagtatccggctcgttttctttgctgcgttccctagttgctcgtgcctgctcgcgccagaggtagcgaggcaaagtttcttgctacctcatcctcttcttgccgttcagaaggagcctcccatgcgacgagcacgtacatcttcagccagacatacaaataagggccccgtttagttcgtgaaaagaaaatttttaggtgtcacatcggatgtttgaccggatgtcggaagggttttttggacacgaatgaaaaaaataatttcataatttgcatggaaaccgcgagacgaatcttttgagcctaattaatccatcattagtacatgtggttactatagcacttatggctaatcatggactaattaggctcaaaagattcgtctcgtgattttctctctaactgtgcaattagttttttcatttatctatatttaatgtttcatgcatgtgttaaagattcaatataatgtttttgagaaaaaaatttgaggaagtaaacggggcctaagtcgacccacgaacccacttatacacacctaccttcacggcttcgcatgagccccttccgttgtttcgtgggctatagctccacctgtttctcttttgggcttggctctagcgccctctgctcttcctcctccaccacgcaactacgaccaccacctagtaaggcctgccagcgacgctgcgccctggtgtgagtggcgccacctagatccacctcctattctccaatgcaagggccactcgagcccactggaattgatcttacatttcttctctcactgattttgaaaactttaagttgaaattttttaaatcttgatttgaaaacttttaaatcttaacttaaaaactttcaaatttggacttgaaagttttcaaatctcgagttgaaagtttttaaatttcgagttgaaagttttcaattttttccttgcaaattgaaatttcaagttgaaaatttttaaagtttgaattgaaagtttttaaaatttgacttcaaaatttaaatcttaagtcaaaagtttttaaatctaacttaaaaattttcattttgttagtaaaaaaaatctcaggaaaaaaatatttcctaattactctcattatcgttaacaaacagagttagttacgtgtaacaaccctccctccagaaccgtgtagccagcccatccgacgagcggacccacttacactttcgtcatcgcttcatgtaaaagggttaacccgagagcagtgttgtggaaaacggtgttaacggccgttaatacgtccgataatacggatacggagatcagtccgtcacgtcacgccgatgcggtcatcattagtcggtaacgaacgcataaatccgatcattaccgattaaatcgtccgtctccgtctaatcagccgtataatcggcgtgatgacaaaggtcgattccacaatccagctcattagctgtgccctttactactattgactagaagtttgctcttccgaaattctcacaaggcagcaagatgtaaaatgacaaggaactgacttcctctaaagtttgaacatgagttccttgattttgacgatgatcaggttattggagtttgtatttgatgcagccgatacatatgctatttgggaccttgattacggtcatttatgctatgtactacattctcttgataattcatttcatgcattatgaacaaaacccatcactacgtcagaattgagatatacagtaacagctatccattatgaacttatttaaatatcatatatggttattctatttaaggatatatagaaggaatatattaagttatatgcatttgtttatcaaaaagggaaaactattatcaactatgtacatatattttcaaaatgttatatttccgccaaattccgattaatcgtccgcattccgattaatcgtttagcggtaccctctccgtccgatatccgtataccgtcttccacaacactgcccgagagtgctatgtttaaagggacaagatcttataagttggtttcacccttgctaaactagcagggtgatactaaacatgcgcatacagcttacatgagccacacatgccttatccaaattgtaccaggatatcacataccatatccacaaccgcccccgctctagcggctacaccaaatgttgtgccgcccatcgccatttcaattaggagtgggcatttagtctaaccgaaaatttcggtctcggtcttcggtcttttcggtctttgaaaagtgaagaccgaatttcagcgaaaaaagttaggaccgacaaattcggtctcggtcccggtcctgaccgaaattcaacaacattttcatatatacaaagaaataatagaaattttcaacacaaaaatcacaaaaaaaattcgtaaacacttatgagtaaagactcttattaggttgcatgcctagaaaaagtagggatgtgaaaattagagtttaatcctattaaacatagtagattgtaggttgtatttagacattttttgaaatttggtcttttcggtatattcggttacccgaggagactaaccgaattgaccgaataaaattcggtctttcactacctaggaccgaattgatgaccaaatttctcagtcttggtcttttcggttcggttttttttctgcccacccctagtttcaatgcatatgcgacctttctctaatctttatgaccagtgaacttttttcttcctccattttactttcctcacctaccctgaaactattgtcctcaaccaatcctaccaatctagcacctgaggtcctgggttcgactccccgtgggagcgaatttttcaggatttaacggcgttgtgctttcagtggtagtcgacgtacccgtcgacagcgaggcgcctgtggtgacttcgttaatctctccaggatttgccgggccagtctttgaagatgctcataggggtagggtttacatgcgtgtgttcataggggtgagtgcgcgtgtgttgtgagtgtctgcgttgtactgtgtaattctcaaaaaaaaaatctagctatctcgttggaggcgcttttgcagccgctcgctctttagagattgattgccaactcataatggaaaaactcatttatctttttattagcttatttaccagattattgaaacgagttatttgttccacttttttaaaaaaactttcttctattgcacttcttagataacttattttgagctatttattaattttttttgaaatatttaatttaccattataattaacttaaaaaatccgtgacaataattcgcttgataatataaatcattttgagttcaactggtagtagggatggcaatttctctcacttcatgtggggccagggccgaggctgcaacggggccccgaaatattgagcaagagcaacctgcttgctatcaaaagccatgtagcccacttaaattcgtaacaaatgcagcccaagtacttgccattagaagcccatcaagcaagaagcttatgcaggaagttttggtgcagatatagggctggttcactttgataccattttcaaccttatcaagttttgacattgctaaattttgataagattgccaaaattttgataaggttgtcaaaattttaacaaggttgccaaattttagcaagatttcatatgtacttagggctggtttggtttgtgacctaaattagccttaccaatttttgtcaatgctaaattttagcaagttttagcatgactaattttaggaagacaaaattgtgtttggattgaagccaaaatagcctaagctaactattgaaatgaactattttcttaggcatgccaaaatttggcttcaaaccaaatagacactaaacactattgaaattaccaaatattgataaaccgaatttaggcctcaaaccaaaccagcccttattaaaatttggcaacaaactaaacgtagccaaaatttttgtaactttgcttaaaaaaataatatggttaaaaatgatatctaagtgaacagccccataaacacaccagcaaaccctggcccatcaccacagtgcatcgacgccggcggcgaacaatcatgtgagctgaaaatagtcccttgctcgccgccacacgccgcaacgcgcgattcgctccctttccgcccgctcgccgccctgtgcttaaagtgctttggttggtttccgcccgcccgccactagcgccatcgagctttccctccatcccgatgaagcgatccatactgggccgccagcccacctacgccgttgaaacccaaaacctctttcttctccggggaatttaactatttgccacttttacgtttgccaattgttcaaatatcccttttaggtttgcagttaactatatgccattggagagagaagtttttctaattttttgccacttttcgcactgtacaccgccacatgggcttgctagcgtggaatgggcacctgaaatgactagtatacccctgcatctgaaaccctaaatcaggggatcctctctctcccgattccgttcgaccgccagccaccatcgacgggcgacgccgtgccgtcgacccctgcccgccccgcgtcggccccgcgccgtcgacgccggcccggcgcgcgacatcgacgcccgtcccgcgccatcggcccctgctcgcccagcgtcggccccgggccgtcgacgcgccgcccggcccgccggctcaccgccccacgccggtcctgacgttctccacccgcagtccgccgtcgacgcatttgtcagatccgcagctccggcatcatcccggcatttgttcttccccaacagcacatcgtgacctggtagggcatcgtcgccatcgtcctccggcggcgatgaagccctcagtttgtccttcttggtaagttcattttctcccttgccctccctgcttgtattgtgttgcatgcatggagttagatgtgttctaactccattttttttatgaatctgtttatgtcaggattgatcctggcaatgcgcttagatttcttgttagggttgctaagtatgttgcgaatctagagtatggaatgctaccaatgtcagagcaagactatgattggtgggttgatattagcagtgggtataatttggataaatttcatgatgaaatggctagcaagataatctgggggccaagccaagaaattagagtttggggtttggacactgaaattggcactgaatgtaagttgacaaccaatgaagaatttggccagtggatgaattctatgttggatgataagctggtagagtttggtgttgaagttatttataaaaagggatatgaacctattgaaggcattgcaaatccagttgattcagctattcaaggtgtctctggtgtggtaactgcagatccaattgatcagtcaagtgctcaagttctctctgctatgattagtgctgaagtttcttctcctggtcatgaagaagggacgggtgatacctctagccatccacaaaatgcagaagaggctaatgctgttgtagattggagtaagttggctatacttgttgaacctgagcaagattgtgatgttaatttattgttggatgaggatcaagtttttgaggccatgggcttcaaagcagcagatcagagagcagcagctgctgcagcagctatggaagaaactgcaattcctattattccaaccgagattcagcaagacatgttagatgcagccattgtagtggacgatgaagtacccattgatgtgttggattgggacagggatgacccagatatgtcagtggggacattttacccttctatggatgagttcagaatggcaatgaagcaatatgccattgttcatgagtttgaactagagactgaaaattctgacaaagaaaggtttagagggaaatgccatgcaattggttgcccatggataattagagcaaagacccaacctaataagagtgtcagggtattatactaaccatttaaattacctttgcaatttgacaccttgcttgctgaattcagattggagtaacttttgcatagttgctaatattgtttgcttttgcaggtccaaataaacaaatatgatcacaagtgtgcttcaagaagcagagttcgtggaaggatggcatctcaagcttgggttgctgagagggcaattccatttctcaacaagaagaatgggatgggtccaaaggaacttcagaaggagctgcaggacacctacaagataaccataccttatcatacagtttatcatggtaggaagagggcaacagacaaattatttggtaagtggtctgattcatttgattggttgtataggttcaaggcagaggtggaaatgaggtccccaggtagtgtagttgagatagacacagttaaaattggagataaggttcacttcaatagattcttttgtgcatttaaagcatcaattgatggtttcttaggggggctgtagaccctacattagcatagattctactgcccttaatggatattggaatggacacatgcctgcagccaatgcattagatggacacaattggatgtttcctttggcatttggtttttttgattcagagaccaaagagaactgggtttggtttatggagcagctagccaatgcaattggtccagttccaaaattagctatccacactgatgcatgtaaagggttggaaactgcagttcacaaggtatttccatgggcagaacagagggagtgtatgaggcatttgatggagaacatgaagaaattatttcatgggtctatctatgcgaggaagatgtggcctgcagctaagacttacatgcttgagaagcatgacaagtggatggatgaagtgacaacagctagtccagaggtgaaacaatggcttaaagaatatcacaacctactgtgggccagaagcaagtttgattgtgctataaagtgtgactacatcaacaataacctggcagagtcatggaacagttggatcaaagacttgaaggatttgcctgttgatgctcttgcagatgccattagggagaaaactttgatcttgtttgagaagaggaggaggatctctacagctctcaatggagtgattcttcctgttgtcatccatcagttgaatgaagcctcaaaaggtttaggccatctgaaggttactaaaggaaatcctgaccaagcagaagttacagagacatacaaggatgaggaagtgactaggcatgtggtgtaccttgataagtggacatgtacatgcagggaatggcaggtcactgggaagccctgcccacatgcattggcactgatcacaacaattaggcagccaaatatggagaaatatgttgacacagcttactctgtgcacagatttcaggtagcatatgcaagtgttatccctaacatcacagacaagaagcagtggccaaaagttgataaaggtttcaagctcctgccacccgttcccaagaagagaggagtgggtaggcagagaaagaataggatcccatctgctcttgaaaagggcaaaggaaaggccacaaggcaagttcaatgtccagactaccaacggtttggacataggaagggtagtataagatgtgaactgactggaactaggaagaggttagttcagctatgatttactttcttttagttattgtacaatgtattgcttaagctaaccaatgttttgcaggaagaaaaacaacaagacaaaaacaaatgtgggaaggaagaaagcaaagggtgccattgatgcccaagctgctgcagttgatgttcaagcgaatacgccaagaacaagagctgctgcagttgatgttcaagcgaatacaccaagaacaagagcagctgtagcaaaagaagcagctgcagaatcacaagtgcatgcaacacaaacaagcagtcctggaccaatcactaggaggtaaggcataattgtgttgtttttcatttcatttcacttaactttggttcatgtcttgcttacacccatcaaaaacaacaggaggctggcattagaggttggtcaaagctccgttgaagtagcacttgtacccgtgcaggtgcaagcggcagtacagccaaccaagaaattcacaccaaggaaaaaactagctagcaagccaaaaaggcatcaccaccaaagcttctgaaataaaatgtgtcaatctgctatcaatctgcaagtattttgctatgtatggctgaaatgcgtcaatctgcaagtattttgctatttatgtctgaaatcgtcaatctcgaagtaatatgaacttctaatgtgcatggcctgatgatgtatttttgcttttgtaatgatgtatgccatgatgaacctgttatatggcaccctaaacctgttatatatagaccattgtatggtctgatggccctgatggacctgttatatgtatagaccaatgtatggtctgatggacctgttatgcatggcctgcttttgtaatgatgtgtggcctacaatgaacctatgaattgtatggttgatgaattaagatatttggatgggacgtgatgaattaaggcacttctgctattgtgtgcatgttcagtttgttgagatatatgtctggatatgtatgctgacaaatattaatccttgtacatatatgtgttgtcatgaagttgtatattatgttatatattgccaaaaaaaatgctattgttcttgcaatcctatatatatgtatggtttcagtcaaatgaactatacatttagctagtagtaataagttgtatcattttacctaaatattgtttcagattcggctctatattgcagccaatggctattaagggtatactagtcatttcaggtgtccattccacgctggcaagcccatgtggcggtgtacagtgcgaaaagtggcaaaaaattagaaaaacttctctctccaatggcatatagttaactgcaaacctaaaaggggtatttgaacaattgccaaacgtaaaagtggcaaatagttaaattccccttcttctccccaatccacgatccccctcccctctctcccgaggcgactgtcgaggcagctcgagctgcttctggaatcttctcgaaccctccgcttcttccgcgatcctcctcctcctcctcgtcctcccactctctcgcgctcgggacctctgcccctcgcgcttcttccacgaggctccacgggccacgggcaagaccagccgcccgttcgccgcgtgcgccgccgccgccgtggatgggacggctggggtggctccggctcgcgtcgaggtctctcgcgctacgctccggcgaggtgaggcgatttcgtctcgtgcgatgcttgtttccatttccccgatttggtattggggggctttgggaaggtttagctgttcattttgattggagtttgtgcctgcaggtggctgcgcaggggagcaaatggattcggcattccacgcgtaatttccttcgtcctgataagctttgttctatctcgcgttggtttggttttgcggaatgatttatcggttcgttcctccgccaccgcgggcgagctacagctaacagctagatccaaatgttcttttctttctctgttttttcctttcctcttatgtgatttggggatttttgactgaaagagacaaattaatgttcagattgtatgtattcttcaattgaacgctaatcaacaatgcataaaaattgtcggtgtgtttcctcttgaacagaaattgggtggcaacaatgtgcatcttttcattaagaaaggcaatgctacaataatctgtagaagaattgaaattcaataatgttacaatttttttctcagatgggtcatgctacattctattggcatgcatctcttttgcctaggagaatttatttgtcaacaaagtggtgaaaaaaattctgaataggggcattctagtctttatacacttagttcagataatgagcctatcaacaatcaggacataaattggcaaattattcaaccaacagattctttagatagttccataatctataagttgattataatctataatctgtataatcataagctgtcccaaaaggggccataaactgattttctgctgtcgatgtgtctgtttgggatttagcacataattctttaatctctacttgcaaatgttgttcgaggttgaatcttatggatccgtaagatggtgacaaaggcacatgattttaaggttgttgtttgcattattcaggttctatttagactatatgtgacttctttcttcttaacttgtggtgaacagtgaacttgactacatggctgcagaataatagcttccgtatcgtacaatacattttaggaaaatgtgttggtgatattgattactattgggatgttaatgtagtatgggattagagaataatttgatatgctatgaggactatctcatgagtcgttctccagaaagagaattaagattttttgtctctgcaggggtacgatgctgatttaaatcaaacatatcgtctattggctaaattgaggccatgggaattgaactgtttcaaatagtgtggtttatgtaatcaagttgatgttgtttgtaaacataatcctgtaaaattcatgtgttccaaatgggccccgtcttttttttcctcctgtcattctctgctcgttaacacttcccacttttttttgtttcatctggcgatgcagcttgcagctccagtggcatctatattggtgataaatgctatggacggttcatgttgacatcatttacattgagcaggtcttttcatgctacaggttgctgtcctggtgttacatgaatctcggtaatcatattatcttgttatttcaaacacaaaggccaatcaagcattttctgtcgcatctgccaggtcaacacagttcaccagagaaggactattacaagattcttggtgttcctaaagatgcttcgcaggaagaaatcaagagggcttttcattcagtgagtgtcacattatagttctctttaagtccacaaggcttgctcagtttttttttttggcatgggcatgagcatgccataaagttaatataatttctcaggtggtaatattttccatttctagcattcttgtgtgttgcagtttactttggaggaaaaaacacattgccgtgttattttcgtctgtctctgtgaagaatcaaagtattgtcttgagttgtttctgatgtatatcttgttgatcataccaacaatcagtccaacagcttaaaaccatttcttttattatacagaaaatgccgccatacctccataggtagatgttttaagaagtggtttcagactaggattaagataagataaactagatgcactggtagttgacttgcgttagattttgatgatgttctacttgaattaattacagattactacttgtatgtagcttgcaaaaaggtaccatccagacacaaacagggggaatactgctgcaaaaaggacatttcaggaaataagagatgcatacgaggcaagtaagttaccacatctattttgctttgtaatgttttaatctttgtgccaaattaacagtatcataagtttgataatgctggactctagacattgcgcgacccttcgaagagagagcagtatgatatggtaataaatccctacctgctgtacgctatttctttatcatcttccccttttttagggaatgtggtatctttggaaatacatcatttgataaacatctcaagttaatagtttatggaccattgttttgcaagatctttaaatagcatgttaatatttgaggtctggtagtatgtccgtgaagttcatggtctgttgtaatactgcagctattttatagagggtctgagacaaattcctcaaagagtgggatggattttgatggggcctatcaagatccattttcaggattccacaagcagggtcataatccctttgcagaattctacagacaagggggatc

SEQ ID NO: 18598 - DNA, 18631 bp, Oryza sativa
tgttgttgataatcccaaacatgggggcaactagtcagtgcatgaaattttacagataacagcgtcagcatctcatacttcattttgatttacgctgagctgacgtttaatattctatgaccttttgaccttacttttgctccattgtggataaatctcaagtcatcaatacctttctattcaatttggttcatctaaagggatttacactggtctttcgcaatttcatctaaagagatttacacagtgcatcacacttcaatttgatttctgatcaacacaatttaatctgcagaatggttaatgaacgtcaacgtgccctgttagaagaatttgcagtagaggaagccacgaaggaacagagttccttttcagctggaaactggtaagcaaccctcacatcattatgtgaacctatattggaatagaatggtaatcgcaggatcaatcattgaaagatgcatgatttattaatgtccatctattgatcaatttattcacttgaagaaaatgtaacgatcaatgtgtttgctttattctggtctttttagtttgttggacctggcaagcaagcgattcacctgacctaccgaactttcattgctaatatttgttgtttttatttactgcttgcatcgtctggtagtaataaagatgaaatttcaaacaggctttaccagcagctgtctactggttgatacttacaggtgggagctagttgaaaatatgaaggggcaaactttcttgcttgggcttggcttcctcgtactggttcacctgctactgaccaagactgtgaactaggcttcacaaggaacatctggcgacatcacatcgtataaattctctggagatttaaaacctggacatcggtcatcatgattattcagctgcagggatccgtgattttggaggcgcagggcagaagattgctcgttccattggaagagatactcatactagtttgaattttgattcccattacagtcgaatcacaagctgtacggagttttattttgtaatgctccaataatgggagaacaatggggatgctaggtttcaattcctagtttttgctgtgttttttgtttttaccagcatataatttgggtgcttaatagggaggatagctacaaccagcagaaagtgactttttcctacgcccgtgctgcgtggagtgttgtcttgtaaattcatgctgtcatgtaggagtaggtcttcatggaggcctaaaaactcagccaaaaatggcccacatattgaatgttacgttgtacaagtttgatcttgaattttgcatggcagatgagaagagcatgctcttattcaaattccttagtatcaacaaatttcaaattcgagtttctgttgtgtcatcctttcaaaaaaaaattctaagtttgactagtggatttggcaactactccatttctctgttttaaaataaatcaatctagcatatgaagggatatattacttgatggtacaacaaaaaatttgaactaagtaccatgagaatctagacagcaaatttgaacattagtacaatgagaatctagacagatactttatccgtcctaaaaaaacttaacttctagagtatgaattttatctaaaaaatcaacttctatcattctatcttacttttttttaatgattatggacatttcagtcattcttcatctctatttttttaatgattatggacatttcagtcatttttcatctctatttttttgtcttgagatactaggattggctttttttataggacagagggagtatgtctcatttaatattagtttattttgtataaagagagaattcccttcatcccataaaaaaccaacctagtattaagtgtggcatattctagtactaaaaatttagacatatctctgttagattcgttgtattagaatatgtcatatttttagattcgttttttgttttttttgagacggatggtgtattgttttgcagcacgggtaagaagacgttgaccaccgtacgccatggccccgccgcatgacatctgtgccactcgtcgtctgtccaggcgctgcgcctctccagacatcggtgcatcgcaggaccgagggctcctgcctcctggactttttgagagggaaccacccaattgtatagtggggacgaaaacttttttttttaggggaaatcaggatttccattactatgacactgctaaatcatcagcaaccaggtacatgatttgtgccggagtaggagccaaaacaggggcctccgccggatcgcagacactacccatagctgccagttcatgagctactctgttatatagccgaggtacatgactaacactccaggaaatgaaattcaggcgcagtaaggattgaagctctgccaccaggaacgacacgtcgctcagctcgaaatcgtttgtgtagaccgcttggatcacagccgtcgcgtctgtctcaatcatcccccgccctattcccatctccactgctgcctggactccctgtaagcatgcaataagctcaccatggagaggatgcatcagattattcactctcccccggtaagcagccaccacatcaccatccgtatcacggataactttggctgtatatacatgtatagttctttttttttttggagagattcgttcccataaacatccatccgatactgccacattttcaagtgttgataataaaagcattcaaaatggacagctccagtgttttcccatacatcccatcattacaacacgcggaaggccacaacaaaaagaacacatttcgaacacgtatagaagctagtgagtgtatcgtctcaaatggctccgaagcacacagccgcgaaggatctgaaacaggagacactcagaagcgaaggaatcgatcgcggaaatagagatgcccccccaggattgctacacaggatcaggatgactctcgactgaaacttctgctttggtatctacggttgcatctcgcgggcactattcatggcttcttggaggctacacacggctttgtcatacatcagaaaacccatgaaccagaactcgtggccttcaactgaaacaacctgaatatacttttcagcagggtttactttgctcactgaaggattagccgctcttagctggtgcagaggaatgaccacctgtttatccaaaaagaacatatgagataaatatggacgatgcccctacgtttagaagtatttaaacatcaaattggatcaagctcgttttgccctttgatccaaaaaaaaaaaaggatcaagctgctactacaaaagttatgaactactaggtattagtatgtagcaaaaagcatcaccaagctacaggaatgactataagcattatgaacatgccagattcaactggtagctatctaggcaaaaattctgttcttcaggagtagaagtgttcataaatgagtcatgcttgaaaagtaatggaactttgattctctaattttgttccatctttccatggtgcaaaattaagagctgataactgttcttatcatgctaactatccaacagtaaactacagttcacggttcacaaaataaaggaataatcaaacacacaatcatgggacttaggcataaactaagcacgtaaaattaaaagaaaaggtgaagcatggaaataagatgaaggtctcataagcactgcatagagtctacaaggaaatgaacaattcttgccttgtagtaactccattcagttttatttccagctttgtaagagagaggattgtcgctgcagaatgcaattttagctgtagaaatgtacatgactcccatgacaggaccagcagatgttgatagatagcatgcataagatattttcagctgctcctcaggaagaacctcaaaagtttgcctgaatattttttcatagccaccttctgctaagactttagttccttgagcaagccgtcccatagcagcttcagtaaaactaggtcctgtcttgactgattaagaggcaaagagtgtagtcagacatctagtagatattctacatctgtgcaaaaatatagttcatgtaatatcctgcatagcaccgggttgaccatgtacaaaataacgtttgggtctctcagccttttgcataagaaaagtgaattattcgcagactgcccatcatttgaccacaataactattctaaagtaattaaagtgtgaaaattgttcatggggcagatgatcattgctttgaaggataattcacccaaatgtgtgacttctttggatgttcatctatatgcacagttgatatttacaaggtttgctagttcaaggacaagttgacataagaatttatacctggctccctaccccactggctcctaggagccagctatttagccctaaccagttatcatcagtattttgcaaaattattatcattcttcctaagaggttcatcgtatattataattgcaagagaacaacagcatagacatgcatttgctggtttgtatagaaaaactggccggtcaagtctctaattattaatgctgtcatgatcattcaatcagttcaaattcacacggaaaacaaacaatggaattaaccaaacagaagggacacaaaacaagtttcttcatcactaactctccaagatcaattcgtcctactacacaattaccagttcctttggatattcaattatttgagaaagatgaagaacgtcgttagcagaacaaagctttctggggaactgagcacagcactgaagctttaaaaacaacttacaaaacatgcccgtaaaatagagggtataaagcatagaaagctacgccaaatgttttcacaagcttcaaaagatgctgatacttccaaaccaatttctataaccatcatctaactgttgaaggaatctaccttaagttttcactttccaactttatctactcccacattccttccttcgatcattacaaagccaaaagagcctagtgcctacgcgacgcaatccgtggacctcaagaaatgaatcttgcaaacaatggaacaaaaaaaagctaggctccggtaaaattgggagagctgaagtgggctcagagatctcacagtgctgccacgtgtcccggctgaggctctcgaccatcttggtcgtctcccccaccgacttcccccacctggacagcgtctccttcatggcctccaccgcgcctgcgggctcacaaagcaccagagcaaagatcagaaccgaaacaatcccccccttcctgagacagcatcagaacgaaccccagcggcggcgttaagcgttacccttggaggacgaggaggcggggccgcgggagacgtactggctggactcggcggcctcggcggtggcggccgccacataggtgggcgactccgacgtcagcttctcgctccacgtgacggtcttctgcccctgcggctgcgcggggggaggcggatcggcggtggcggcggccacggcgacggggggcggcggcggcggaggggaggaggggtcggaggcggcgggggggtcgtcggatctgggcaccgcgggcgcctcggcggcggcggcggcggccggcggaatctcggcgggcgtctgcatctgggccgccgcctcctctccccgactccgcgcgaggaaaccgaggagaaaatgggtcgcgcgtttcgggtcggagcggagtggaggcgtggcgatgggctggagtggtggtggtggtcggggtcaaaccttttgtctttgttggtgggtaaggaggagtagtgcaggagagggagagggcgggtcgcacgcgattccgcaaccgcaacggccaaagtaggggatttcgggtcgtcggcgcaccgcagcttccaatggaaggatgcgtagacgacgtggcacgtggccacgtgggtagcaaaattgggctgcatggaccaaaatcccggtccgtttcttgggagtaaataagtccatattgcctccctaatgtaggtagaatttgaagctatgcttggggagcttcagattataagaatctattggttggtagccagcttctaataatctggagaagttcgatttttcagcttctgggttctagttcattttctagattctacaactacaaattcttagaatctatgtgacaatttgcactgtttagggagctgaagattttgggagaagctgcagcagctagaagctccccaaacaagccctcaattcacccttagccgctatattgccgccttcaattaaaccagtgttttttaaggtatgtaacgtgtaaggctgagtttccaactcacttttcttgtttttcgtgtgcatgattttcaaactactaaacggtgttttttttaaaaaaaactaacttttacaagaaagttgcttaagaaaatcatatttgtaaaatcaaagtgtttgtattcttattctgtgatgaacaattggcatctgcaattattggttttgatatttgaagattattggcgaagtggtttttgagatgattggatttacaggtgttatacagatactgttgtgatttgggtccggtcagatcgggcagtggttgccggtcagaccagtgtgtatcgcgcggtcagatcggcttagcccgagatctgaccggccgactctgtgtcggtttcgggttgtttgttcggatatccatgattatttcgtgtttctggcttctagacggatactatacgtatgtaatactgttgtttgctaacaataagtcaagttggagatagcttggtctcggaatatggtttctttgtttgattcatgtgtaagtaacttgatgcctcgggagagtattgccggtgatggattgggagtcgacttggggataaggcgatgtccgtgacggttagatatcatgcgggatacttaggctagagttcaatgcacgtggttggtgaagatttcatatggcatacgatggaggtattgtgtgcatatgggatgtggagtcgaatttagaaggagtccaaatttggtatgattagagtttgtaaagtttgtttcttgtacgggaaggtttcctacgtggattaggacttcttgtataagttcggttcgtggctttaggctgcctacctcatgtataaataaagatggagcgtgaggcttcccggtatcgcttttgagagcattgtgttgagagttgagttagggtttcgagtttagtcgagattttcgtgaggagtgctgttgttgcactctgtaaacacagagataagtaataaagttgtcatcaactttgagagttctttaatttgtgtttgttcgggttcgacggtctaaccggtgagatactggcggtcagaccggcgatatcgcggcggtcagaccggcggcatacctacggtcagaccggcggcgactacagcagcatctgctgatcttgacggtccaaccggacgatctactccggtaagaccgacggcttccagacggtcagaccggcaggactacttcggtcagaccacgatccatcgaatttgagggtaacttttatttccgctaaaagttttagtttttaggtacaccaactattcacccccctctagttggcttagttcttgtgtttcgatcctacaatattaattcattttaaaaaacagatacttcctccgttttatattataagactttctagcattgctcatattcatataaatattaatgaatctagacatatatgtgtgcctagattcattaacatctatatgaatgtgggaaatactagaaagtcttataacataaaacggaggtagtacttgattaatcatgagctaataggtcactccactttacgtgtgggagtaattagggtgtgttttgttgctcgaatgccaggagtaattagagtgtgttttgttgctcgaatgccctcagcctggctcgtatgcctcatccaggctgggtttagcctggttagaatgatgcaatgggagttgtttggttgtatacattagatgagcccggctcctaacaccaggcaaagaacaccgcctaaggctgtgtttagttccacgtcaaaattgaaagtttaaagaaattgaaacgatgtgacggaaatattgaatgtttaaagaaaaacgttggaatctaaacaggccttaagtggcattatagtccacgctggtttggtccacctacactgcattctgcaacgcctagttggcctgcatcaaccagcaggaaggaaagcccgactgacttgaggtggtccgcatcctcgtttctcaggttctgaagacccttgatgcagatagagattatatacaactaaaattaaccttgaacgtatctgactgtaatggtgataattcattccacgagtattgagagttcatgtattgcattatttgtgctgctttctagttatatctaacgtacgtcttagtgtttattaaccgccattgagaattgagatatgtagagaacccaaacgagaaaatctgaaggcaatttattaactgataattcacccttggccatatgagaaaattcacaaacaaaacgaaatacaaagaagatgagatcaaagttcttgcttacaaggacagtataccatcttgttggtcactgatgcttccccttcttcatctgagtcaagaactgatcaaggtggaacggatcctcctccatctccggcccgtcaaactcgacgggcctctccctcttgccggcggccacgctcgccggagctccggtgaacgccttgtcgggcacgaacctgcgtgtcttggcaatcttcccgaggtgctcgtcggcgtcgccgtaggcgtcagggtcctcctcgccgtgcttgctcggcttgtagagcgtcgacagcgccggctgcgccgcgaagagcctcccggagtagacgttgtactggtcgtcgccggcgaacccggagcccattcccttctcctggttgaacagccgctggtcgtaggtgacctcgccgccgccgccgccggtgttcgccatgcccagggcgatcctctcgctgacgtcgcggtccctgtcccgggtggccgcgctcttcttgctcgccgcggcggcggcggccctcgcctcgagccgcctctcgcgcctccgctcctcgcgtatcgcgtcgcgctctgctgccgccttcgaccgctcgctcggcgccggaggagcggcgccgagcatctccgcgcgcgccttcgtggcgagctggaggagatgctgctcggccttctccttctccctcatcttcatctcggtgtgtaccttggcgcgcgtctcgacggcctcccgggccttctgctcggcggcgtacagcgcctcggcgagcgcggcgaaggcgtcgctcacctggacgtcgtgcaggccgcggccgtccaacgccgcacgcttgtcgagcgggatggagtagcccttggggttcttccagctcgagatgctgggcggcaccttccagtcgtcgtggtccttctgcgacggtggccgcggcggcgagcgcagcactggcaccggcggcgacccggcgggggcgggcactcgcttgtgcttgaacttgggcggctcgagcgggtcctgctgggtctcccccatccggatgatcctctccgccgcgccggagttgaacgccgatgtctgccgcgcaggcgtgtacttgatgaattccgggtcgtggttgctggccagggtgttcgacggctgcacggcggagaggcgtttctcgacgatcgcacgcagcgcggcgctcgtccgcgccgtggtctcctccacggccgcctgctcgtcatcgtcggcgtcggcggcggcggcgttgatcttgggcaagacgtcgccggggctggagtacacggtcttcccggcgttctccccctgtctcacgacggcgtcgaactcgacgcggccgccgctcccatcgacggtgaggctgagcacgccgccggaagacccccgctgctccccgtcgccgtcgccgccgcggcggcccatgtcgagcgggtactgcgcgacgtggacctcggggaaggcgccgccgtcgccgaagtcctccttcctccgaggcgcgagcgccgatcgcctcccgtagggcggcacgggattcaccgccctcgacgacctcggcgcgtcccctccgccgccgccgccgccgtaccgctccttgaaccactcgtcctcggtgtggtcgtgcggcggcgcgccgccgccgtgcgaggggtcaggcagccggagaaccatcacgaatcacgaggcaaatcaatccactacgaccggagatgcgcgtgtgggtgatggacgtccggggcccgcctcggcctcgacgtcttgtaggcgatcgagacgccgactccgtcaccgactcgagctccgaattcttcgtggcgttggacccgctcgcgcctgtgtcagcggcccatgcaggcccaatcatatgggctgcacgtaagtagtaatctggcctactctaatccgttccggcccaacagcatgggccgcacataagttgcagtctattctggcctagaatattttaagtccctcaataaaatggaaacaattttgatccatcgagggaatgttctcatattttttttttcatgtccctcaaatggtcatgaaaaaatttaaaaacattaaagaagatgtattaacatgtgatatattactccacaaacatgcaagttcaaattcaatctctacatctcacaacgaaaaaaacaaattaaacaaattaaactatagctagttaacgcatattcacagtaattttttttcgttgtgaaatatagaagttgaatttgaacttgcatgtttgtggagtgatatattacatgttaatatatcttcttaattttttttcataactatttaagtgacatgcaaacaacgagggaacatcccctcgagagatcataatccactctccttaatataggtccaatttcctatagttaggtctagagtatgcatactactccctctgtcccaaaatataataacctagtatcggatgagacatgactattataaatctgaatatgaatatgtccagattcgtattctaagatatatcacatccagtattaaattactaatatgtataatgagtagagatcaatttgatttggaagaatgcatgcagcgttagtgcgttaccgacctactggaaacaggataggtcttttgagctgtaatagaacttttgagatgtaatcttgtaactagaaaccactttacagggtgaattggtatccctcgacgtagtctgtatctgccatcgccctggcgcaattggcctggcagctggccagctgccggttgaggaggaaggatagagggaatgacaaggagagacaggatgatatgtgagtaccacgtaatgattctgtcaagtggattaggtcaataaataacatcagcaaatacgtctctaaaattaaattgcaccgattaatacgtctcgaaaattaaattgtaccgattttagtaattagatgtttagatattcgatattgcgatcaaatgatacgcatcagattgtatagtaattaaagtggactttattccttctagcctatccatgatggaccgcgagcgtacgtgtactagatcgctcgattttcccttctttcttcttgcgaataaaatttaaacaccggatgctgtcatgctcgcttccttcttcccgccacagaaacattgggagaaaattccaattcccatggtccctgaacccccaaaacaaaacagatcgtaaactcacatgcaaatctcgccgccgcggcgtcgccgaccggaggagctttgtcgtctgtatcttctccggtggttatgactcatgcgtgcgtacgcacgctacgacggtggggggccctgggccgcggctacgccatggtcgcggcgagctggagatggagaattttttttttttttgcctcccggcctccgaacagcttcagatctgttcttttgctatcattgttcttcgctcgtccggatgcccgacgcttccgaccgaggaatcctcggctccttgcagcggtccacggaaactggtgatgatagacggtaattaattcagcctccagtgtacgagggccagggccaccggtagatcgatcgcaacacgcatcgacacaggtatttctcgtgattttagtacaactaatgactgttttttcaccggtttttcacgtactctgctttcgttgccgcagattgagagaaatgattctacatggttctacatcgattttcagcataatgtttttcacgcacacatttttcgaactactgcaccatactccctccgtcaaaaaataaacaaacttctagatttaaaatttgtcaaaaaaaaaatctaacttctaccttctcatctacaatcggtttgaaaatcgataagttttatctattcaatacccctcatctaccaacccatcgatataactttgctattaattaggagtattttggtcttttgtctctacccttatattcaccttgggaagctatagttgaatattttgtgggacagtgggagtttgctttttcaaagaatctaatctaatataaaaattgttttaaaaaacatattaaaaataatcattttattaattgtatgctaatggttcaccaatctactcctatcaaccacgtatatgttatcactatgttataagtggccaacttatcgtctcattgggttaactaacgatttgcccagcgaattagatggagctcaataaacatttcagtaaaattgaaggtgtcaatgtatgaagaggtgaaacgaaattaaagaaattaagggcatgttcactttgatgtcattttcaaccataccatttttttaaagtaaagttgtcaaaaaaatctatgtttaatttgttaccaaatttggtaaatacataaaaaatcctgttaaaattttggtaatattatcatcttgctaaaattttaacattactaaaatttggtaaggtttattttagccacaatttaaatggtaagatttattttagctacaatctgaagagggctaactcgcggtggttaatcaagtttcacgtactgctgcagcaaaggacaccgctgttgcgtgcataattgcacgcgctgcaagatctaagaggccgttcagctacaggtcaagcgcatatgtcacgtccactaagatccacagggccagacaaaatcctcacctgacagcgacaccgtgaacctgtcctccgccgcccccgtccatcggacggcggccaccaccgccgccgccgcctcgtcgccatcatcgtcgtcgtttccaagaaactgaaatcccagtagcctcaattccattagtgttcttttatggtagcgtgattgaatattagcagtgacggagccagaaacaataaaattcatttgttggtgaagggtgctaataatgctaatcttctaaaatctcaagaagaaaaacagtaaagataatatgtttttttttttgccaaatttgagataggccaggccgaaactgattggtgcaggtaactcaataagccgaacaatggcttcggtatttcgcctttacagagtgccacagaagaattggaatcaactgtgtgagggctggattgtagagggatggagcagctgctgagcattttcctgagggtgctgagcaaattattgccttctgcgagtctttgccatttgtttggagtggcaagcatcagcagaagcagcagcatttgcttgcgtacagactgacagacaaatgctgggctaaaggtgcagacgtggtgaattattattagcatgcatacatctggtcgttggatcggccggtgtgtgatgggatgctactatctgaattctgaaagattgagatagataagctctgaatggcaggcaatgcctctcactgccttgcctggtacagtggtactacatgaactgattacttgatgagtcgccagcaagatcataagctggaggactaacggttttggctgctcgacagcccaatcaggggcatttcagttcttttttttgcatgtttatttacaaagattatcaagtgcagcagcttagtacgtttttattactgtaatatgcatctgaatgatccatgtgcattactactgtgctaggcactgttaaatcttcagaaaaggaaaaggagagagatgtctctgcagactgcaattatgcagccaaattccaatctcgtaaggctccaagaaagaatctgagaattttctcgtctgcctgaaacagagacccttcgagatcagctctgcaaaagattagtgaaactgtcatgccgacagtgcagcgtcagaaaatgttaccgctaactttactacaggccgaagagcatgttattcagttactggcagtggcagatactcctatcagaatgctggatctgaaattacttctgccgcgccaaatcaccagtggtttgacttacccagaagactggcatcaagtggactaatagctaattagcagagtagcaggtgatcactaacccattacccatagcagcatgttcaatttaggtaaaatttgcaatgtctttttttttaataatggagagataaactgtttgaaaacggtagtagggacgaagctctgattataattgagatgtagcagcaaatctgggatctcgagtattatcttcttaactttcgcaagttgttgcttgctgcccagaaggccagaacaatgccatcaagtggccttgcagcacagtagcagaactgtgtggtgccactgtaccatcctagaagatgaccaagagttttacccatagaagaatgcccaatattttttatttttttctaaggacttgttcagttcatttccaaaaaaacaaaaaaaaacttgcaatttgttagtaaagctaaattttggcaagatcaagaaagatatgaaggtgatgtttagttcgacacattaccaaattttagtatagttttatgagcataagtttttatagttaccaaatgttggtaggaattgagaagagttcgacacattaccaaattttagtatagttttatgaacagaagtttttataattaccaaatgttggtaggaattgagaagattacgatggtaaagccttgtttagtttggtattgctaaaatttgatatgattcattttagcaacaaactaaacagggtctaagataagattgcataatagacaaatgggccttgtttggagtacaggaatttcgttgcattcaattgagaagtattctatcaaattcattggttcctaacaagcccttagtaagggatcaatgcctaacagttagattctcacctttagattttcgcttagattttgaggatatgtggttatagaatccgaaaattaactagaagctagaaacaaaacaaactcggtttttctatattatcattagttggctcccaatcacctgtttctctcagaattttccctcaaacaagagccaaagacatgtttcagtgacaagaccacaattaatctctaatgtgataaatgataatgttgttggtcgtacaaagctggcaaagtggggatgaacaaatggtacattggtccagcaacaacgacagtagcagcattcaagatcaaaagagtgaagggccccggaaatctcagagctatccataagtgtcaaaccatcaaggcatcaactaggagcctggactacaaaaactacacaataatagtactagtaattataaatacacttggatatgaaatgtacatgagcatgatggtagttggatcaaggcttttcttatagattgcaatgtttaacattgcaatgttcaactaccgcagtacttaagtacatgtaaaaaaaatacatttttagaatttcacatctggttatatagtattatcccgcctattgaccatttccagactgttgcattcacagagttacttaaatcaggctcctagaatcttcagcaagaacatataactaggaaaaaacataatgttttaggtaaagttatataacaatttgtgtgtccgatttcattttcaatgggatattttattcagcagggcataatggatgcaagttaatcatgctaagccatgtagcatcaaggataataacatattgtgacaaataaactgaaaatggaccagtgaataagtgtgggcaaatccaggactagaaaagaaatcaatagacacattttctttctcagattgtttccttttcctctgtttttatattttctttagaatcatcaaagcatatccattctccaaggttctctcaaaaatgaatatggaagcatgaatgcgaaataacaagagattgctcgtctctacaaaaacctgtcctaatgaccatgttcttgggtccattaaaacaaatgggtgagcaacatacttgaaggctacaaatgtacaacgaaaacaatcatctgcaaattctcctccttttgcttgacgccgagctctcataatttgttgcaggtgatccaacaaaagtgtcctcactttgttggcttatacatgcagctgcatccaatacacctatggggctttttggaatggagaaaacggagccggctgattggcgcataatgtttctcataataatcttatcttgaatcatttcatagcaccgtaataccctctcctacaacattcaagtaacattctattaaaatttgaaaagcacccgatcacagatgaatgcctcttaatgcaagcaagacaaactaacagagttactaagaaattagtgtcatccaacaaaagacagaatcttttgtcagtttaagaacagtgtattgaaagatcaagagattcagtaccttctttaaatttttgtaacaagttgccaccctctcaaacatggaagtttcatgttcctccgatgctcctagagctacactggccgcgatctctgatggtctgaaaaccaagaattcagcaactgcagaccaagattcccagatttaagagttcatcaccataacaatctattatattgatggaggcatggagtggaactacaaacatgtctaccaaaattcacacctttacatgtactcaagatgaggtcaactgagcgtgagagtgcggatgtggacggagtatcatcatcattgaacttgtgaaggtaataatcgataaatgagcaagcagtcacagcttgcatcctccactttagggcattaagcactgcaagctccatcctttttatggtcctagtctcaaacacatattttgcatcacacacctacaaaacagaaaatatcaaactgaaagaaatgagaaaagaaaaactttgatagtatttgtgcacaactgttgcatgtatgataattgatttcacctgcaagtccaaggggtgtggaacaacggtttcctccatttttgcagccaaagacaaggaagctactgctaagagttgtgtcatacaagcctcctcttgctgaaactcagaatgcaattgctccatgacttggcatttatctcagaagcataaaaaaatcgagtttgtatgaaatacagtaacaatgcaatgcagagaaagatctttacaggaagatcgaacacggagaggaaccggtccaggtagttcaccgacaggactgcagtcaaaggcccaaacttataaagctcatgtacctgacaagcaacagtttcagtcaaatcgtatacagggcatgacaggtaaaccagcaagaaccaaatcaagaacaggagaacacaaaacaacgcaacaaaaggggacatttttaccgaaatgtataccatcacatctcatcctgaatagtactagcaaggagtgatgaaaaacaacgaacagaagctcaccttccaaatccagtcaatggcgtcgctcctgacggctaccaaatcgagcccatcaggctgcagcagaagccgctggaggtagccctccatggggatgtgctgctgctcctccctccccaggagggcctcgatgcaatcatcggattgcaaggggaaatccatcgacaagtcccctagagaagcatcaaccccaacaacccaagaaatctcctcgctctcttcgccaagatcaagaatggcggtgttgtcctccgcgcaaaggaggattgatgccgcaaaatcaaagctcggtgccatcctagatcactcttcaaggtgcaaactagtagctaatctctaatccactacttggtagaagaaaggaactaataaactagtagctaatccactattatttggaagaggaaaggactaatcttgttctaccactagtaaatttttcagattctgttggtctgtttcgatttgatgcttctcctcccccttcaagcctccccagactattactgcttctcttcttggtattatataggagtactacttgagagctagaaaatgttcttagctttctcttgttcttcttgaaatgagaggaggggtgaggaagagaaggcgagaaggggtcgagagggtgcctgggtgagaggcactgtatacagacacagtagggagatgagggggagccggagaggcggtctcgtctccattaggtaagcttttttctttttctttggaacggtgtgagctaggtttgcagtaaattttggtccgtgtttagatgaccctcaacttctaactttttcatcatatcacatcatatcaaa

SEQ ID NO: 18599 - DNA, 6892 bp, Oryza sativa
tcagaatcttaaaattcatattggaaaataaaatgtaacatcatatgtttaactatgtatggccttataactagagtggattacgagccaactcagctcaactcgttaatgagaaagactagctcagctcgtgtcgtgagttggctcgttaacaagttatatctcttttatatcatattattaagaaaaaattataaaactaaccttaactttaatcgtatgttcacctaccaccttaaactttgaaaccggatatccaaccccctcgaactgtacagtaacattcatattgcaccctaaggtggttttgaaactgagataatccatgaaataccattgacaagcgtctaagtcccagaaatatcatcgacatgtgtgagttccaagaaatgttattgtacaaacaattttatcccaaaaatgccattcccgttagggttccgtccattctgcgccattaagttctatagtatgaacagtgtatttaacggcgtggaatggatagaaccctaacgacgatggtatttttgggacaaaatcgtttgtatgatccatttcttggaattcacacttgtcaatgacatttctgggacttagatgcttgtcaatgacatttcatagattatctctttgaaaattggtttcatctaatttgcatatatgtttgttagatttgactatgtgacatctgcattggatatatatgttaaactctccaaaagaggttctcaaaaagattgattactatagatcacgtttcttttggtaagacgatgatcataagaagaagtatagactcacaagatgggatatgatttgtcaacccaaagatcagggtggtcttggagttcataatttagaaattcaaaatcaatgtcttttgagtgagtggctatttaagttaataaatgagcaaggtgtttggcaagattcgttgaaaaggaaatattttaataatcaatctttaacccaagttgagaggaaatatggagattcccatttttggtcggatcttatgaaagttaagtattcgttcctaactatgggttcctggattgtgaataatggtgaacaagtcagattttaggaggataaatgggttggtaaccattcctttaaatataggtatccatctttatatgctatagtttgagggagaaactcctcggttgcaaatgctatgcattctgttcctttaaatgtttcttttaggagagttttagtagggcagaacttgactaattggcataacttttgtgcttcaattgtgcaaatccatttgacagaaaacaatgatttttttagatggaatcttcatcaaaatggtcaattctcggttcgttctatgtacttagctttaattaataatggctacattgagaggaataagtttaattggaaacttaaaatgcctcttaagattaagatttttatgtggtacctgcttaaaggtgttgtcttaacaaatgataacttggttagaaggaattggcatggtaatttgaaatgttgcttctgtatgaaaaacgagactatccaacatttatttatggaatgtcattatgcaaaatttgtttggagagcattacaattttttttctggtttaaatattccacatagtatatctcatatttttttagaattggttcgtagggattgataaaaaaaccagtaaacttattctggtaggagcttccgctatatgttgggttctatggttgagtagaaataatatggtttttgataaatcaccatctatatcttatatgcaggttcttttcagggcaacacactggctccggtcctgggcacaactacaaaagtgtgaataagatatcaagttaataaaagctgcatgtcgtaatcttaagtcaacggttatgcagttttttgccaacttcggatgaaaatttacaaatagaattcaataatgttatgatcttttcttgcattggtttttagtacttagtgtatgttcctatccttttaggcatgtgtttttatgactttttttgtcatgcgtttttatttgtatgaattggtgtaataattggttgtagctcattgagcaaagactgggattctattcaattatctaaaaaaatatatgttaaactctccacctaattctttcgttattaccccttctttttgctctcgcttacataagaatgttgatatagtaccagtatgatattactacatagtataaatttgtggtcaatgattaacgatatgtgaacaagccatattagttattcaaaaccgttgattcaagttcccagatacacaaaaacactatccaaaaccgttgataaaatggtattgcaaagtttagatgattggttatccagttttaaagtttagggtgctagagggattttgaccgataggttaagggggtatggacttgttcctattaataatttcaaatttactattttatcacaaattaacataataataaacactgactaataaagaactcactaaatatgaatagttttgtcgtaattaaaagactaagcactagttaagaagcactatcttgtagtaacgagctaaacaatcaactcgcgggctagctcggctcgacttattaaaactatgaatccgaaccgatccgagttgagcttgatacaagcctatctgagccacgagcttcgatttcttgtccacccttacatagagcgtcatcctccatacaaacaaatcacataagtatagtcacactacatagctatataatgaattgagaaagcgacgcgtgaaaaggaaacaacgtaacgcagtgacttgaggaggcggccaagggtctcacaggcggatagtcggagagatggagagagacaacgacgagcacagcgcccccaaccccaaccaggttaggatcatgagcatagtaaagatacagggtgaactgatggttgaatcgaaaaaaagaaatccaaaccagccacctttgcggctggttctatgaaaatcatgcactattaagtaaggccatatttgtttcagcataagattattgtgatctagattactgtaaactggattgtaataagccgacataaaataagtttgttgtttgtttatctggattattagttgtttgctagttgttagttacccaataatcttaaaaaacacctttagagtggattaccaattatagggggtgtttgagagagggactttagtccaaagacttattttttggagagagggactaaagtttagtccctcactcccaaacacccctatagtaatatgacttatagattgtaataatctatcataataaactatcagtttgtttaatttcaggttactcgtaataatctagattataataattctaagttggataaaaagggcctaagttgaaatccctaaataacatgcatagaaattttgtagagcttctacagaaattagttgaattccgacaaaaatcatgtattaatccaagcaaagcctctgttttcgctgttttacttccagtcgtccgtacaattcatttactgtagcttctgtacggagtaggtagaaacacatagcgtggtacagagttcagagtttcagcggtgatcgttcagacaattgatgccagtgctacacacaatttgacctgcaggacctgcagactgcagctcatcgcccagtgcctgaggactcaggtcatggagatgcatgcaaaagccgagacttgcttgcaacaagttggggtactgtttgtggcatactcatactaagatctctagacttgattagattagccttaaatttcgtatggttgtgtgagtgaacttgcgatctctagtattgccctgttgtgaacttgcgattatatgggtcgagaaggtgaggccagtgaagtgaagatggtcttcacttctcggtgaagataggaatggctaaatggaaaacgagtccgatcacaaaatctaaacattgggtcgttctggtgcccgaccgactatttggtacctcttgaagccaatgcctttgccaaatcaatacgaattatactatcttactaaaatattgacgaataaattaatagaaagggaaactataatagcccgtactattgatggtgtgtgggcggcagccttcaaacaaaagttacctcatgaagagagtatatctcaactggttattgtaagtttgtaactgaattactggcatatatggcggggaacacggtctatgcacgtaagttttttcgtgtatatcacaaacaattctagaaaaattttattacttttagtggcattacatctatatgtaaaattttattttcaaattcattatatatatgaaaaaaaaaacaaaattctaacatatttatattattaaaactataatattttttacggctaatataataaatttgagctaagactttacataaagtgtaattttattcgacgcggatataaaatatatatttttagattttttttatgaaaatttgttagctgacatggtgtgtacgtattcgtacatatgatatatccctgcatagtgtgtgtcttagactctttgttccactagtattcgtttaaaaaagtaaaggaaaaaagtataccgaagatccctctacttgtcatcgagttataaattcatcctccaaccgtataaaactagatattcggtgtcccttaacttatcaaaaccggtcagaataggtccttcggtggttttagcctcgcttttagcctatgtggcggctgattcagcgtgggacccacatagaccccacatgtcaggatgctaggtcaatctctctccctttctcctctctctctctcacactttccttctcctcatccgatgccacgaggagggcagcgccgcgacgacggccgacgacggcacggtggcggagaagctcatactcttagtgatgccgctgccgccgaggaggaggaggtgaggcgagagcccaggggtggtgggcacgtcgtccatgccgaactgggtgctctcgtcatcgaagtggtggtgctttgcgaggggatgtgccagcggtggtggtggaggaggcgaagtgatgtactccagcatgtgaagcggcggcgtcggcgggctcatggtggcggagtagcggcgtcagtgggtgagcacgactgcggagaggcggcgtaagcaggtgagagcggcggcgacggcgggcgagtgcggcggcggcgagcgagtgcggctgcggatggggagaggcggacgccgacgactccgcagcgctcggctttgtcgtcggcggcggctccgggcacgggcggagcaaggcggggaacgcggagcagaagggcgggtgagcggcggctccgagcggcaaccatctccgagagacgggctcctcccctgtcggctgctggccgccggcgcccatcgctgcggcgcccggccccgcctccacctccgtgcccacctcatgtcgcgcgtcatggagacagacacctcgtcagcgtggttcctaggctcgtcgctccgtgtcgacgcactcgtccaggagggcttctcggcgccgtcgacatagcaacctgataagagtgagagagagagggtgctgacatggcatcctgacatgtgggtcccatgctgactcagccgccacgtagaataaaaccggtgtcaaaaccaccaaaggatctagattgaacggtttttaagttgggagatgtcatatgtctgtttttgtggttgggggacgattttgtaactcaatgacaagttaagggatcttgggtgtactttctcaaaaaaaaaaaagagcccaaatatgcctctctcagaccaggccgtcgtatatacgagcccacccccacagagtccatttcaaacccccaacgtccaaacctaacggaacggatcggcgaatcccatcaagataactctcccacatcctcggcgcgagacgtgaacgaaacgtcccaagcctaccgccgccgcgaggatctctcgaatcgcgcaactcacagcagagggagaggaagaagccgagcgccatggacgccctcgtctgcaccaacgccttcgccaccgccatcgccgccggcaggtttcccctcccgcgaggccgctcgcccccgtacgccgcggcagccgtccccgccctccgctcccgccgctgcctcccgactcgaggtccgggttctcgaaggcaaaatcgatcgggtttatcggaggtttttttttttttgcgtgaatcctgacgggcattttgtgtcgtctttcatcggtgtgtttgtccagggctgctacgcctgcgctgcgccaggggggtggattggactgatccgtcgttcgtggcagtcgcggagaagcccgacgcgggggcggaggcatggaaggcgctcgcatccgcgggcggcggtggcatcgaggaggaggaggatggcccgtttgaggcgatcaacggtgatggaggatactcggtggaggagtctgtggtcttgccgccattcgagcagagcttggtggcggcggtggcggacagtgtcgaggacgatgcgctcagtcaggcgctcagctctaaggtagctttactgttttgcacgtaacccgtttgttctattgcgtctaattacttaatttattagtatgtgattctgtttatgtgggatggtggatttgaggtagaattggatgtagctagactaaatcaaaacactaagtttgatgtttatgtcgaagtgaattaatgtgattgggaataagtagaaatagaaaggtaaattgttatgctggcctgacatggtaagatatgaacaatttaaccttttctaagatccttatgagaacagctctctggtctctgcacatgtattactttttacaggctctattaatactttggcgtggccttttttttttgcgagtttg

SEQ ID NO: 18600 - DNA, 622 bp, Oryza sativa
cgccactggacgccggcgaggacgcgtctccggtgatttccccgcgaaacggaggcgaagccgggaaagaggaggcggctgcgacgccgggagaggtggcggcgcggccggagggtgcacgggcgaggcgggaggtgcggctggaggtggccggcaaggaggaatgagaagggcgacggcgggagtgcgcctccgatggtcaccgcgcgaaacggagggcaggccggggtggaggaggtggcggcgacgctggaggaggcgacggcgcggccggccggcgcacggtcgaggcggcacaggcggctggaggcggccggcaacgtgggagagagagggcgacggtggggaggtggctagagaccacgggagagcttgggaagagaccaaaacggtagaacgcaaagagggggttctattttataggagaggagagggaaccggccacgggggaggtcggaacggcggcgagaaccacggccggcggcaatggagggcggccgaggaagacgcgggcgttcccggcgattgggggcggcattcaagggggaaaacgggggaaatcgaagaggaatcaatggggattaattgcccccaatcaatttggaaagaggggctgcaggaa

SEQ ID NO: 18601 - DNA, 2720 bp, Oryza sativa
gcaccccgaccgcatggtcgatttcagaaggatgcaaaatggacttcaacggagaaaggaaacaagctagatacatacaatagacacaagggagggaatataaactttctatactcagcccaaacctgaaagggagtattttgattatttttgtaattaaataattgttaaatgagtttgtattattaaaattagcaatcatgttctgaaaattccaataaaattccaaagagcgtaactaatcatgaagaatttaataaaaatagatttaacctgttattttatttctcacttgctttaacgcatacacgcaaaccctacccctttgagcctcttcgaagaccgggccagcaaataagattgacgaagtcaccacaggtgtctcgctgtcgacgggtacgtcgtctaccactgaaatcacaaagctgttaaatcttagaaaattagctctcatggggagtcggactcaggaccaaaggagctactgaggctcttgtatccattagactacaagcccttttgctacttgtaaattgatttaattatacacatacctacttaaaaataccaaatatttcatcaaattgttctcaattttctggtctgtacacttcccgttacaacgcacgggcacttttgctagtagagatagagatatggatagatgaaaataaggtcgccatgtcatctgaaggatggaactgaaggatgacgtgggacatggaccgatctggtcttaggacgatgtgggacatgggccgatatggtcttgggcctgcatgcaataaatcctggaacgcgtgggaaggaaatcacacggaaaaaaaatcgatcccataaaagaaatcgaacgacgatacgtaggatcgcacaagaccacataaacctaccagaggggggtaaattgtaggaaaaaccaaaaggaaaaagtatgaattaccctccccccctgaactatcacggtcgaccgaattaccccctgaaccacaaaaccgggcattcttcacccccaactatgcaaaccggacaaatcaatagagtgagagagagaagagacaggaagagaggatgaggagtatgacaggtgggtcccacattttttataaaaagagtgctgactggactgccacgcgtacgccatgtagaccaaaaccaccacggatttagtcgatgggagtaatttgtccggtttgcatagttggggtgaagaatacccggttttgtggttcagggggtaattcggtcgaccacaatagattggggggaggggtaattcgtactttttccaaaccaaaaacctaaaaatttttagcggaaataaaagttaccttcaaattgatggaggtcttgacgtagtcctgtggccgccggtcgaaccgctcacaagcctccagtcggactgccaaaccttcgccggtcagaccgcccgaacactgccggtcagaccatgcgcacacctgcagttagaccgtcgggacccagaaacaccggtagatgacaaactcgaagatgtagattgaaactttttgactttattgcatcaactagtgtttataaagtgcaacaacagcactcctcaccaaaatctcgaactaaactcgaaaccctaattttctctcaactcaagcctctctaaaaccgataccgggagacctcaccctccctctctatttctatatgaggtaggctgtgcaaagcccatggatctaatacaacttaggactcctaacccacgtaggaaaccctctctctctttccttatctcaatcaatcttaccgaatttagactcctttccgaattcgactcctcttttcatacatacataatccttcttgtataccatatgaatttcttcatcaccacgtgcattgttctctagcctttagtatcccgcaggatctcttgatccctggacatcaacttctcccaagtttactccgatcattcaccggcaacactctctgatccctcaagcaacacctgcacatgcaacaaccaagaaaccatattccgagcacaagttcgtcccaacttgacttacattagtataacaatagtatccgtacgcatagaaaccatctagaagccaaaaccccaaaggaaacatccaaatctaacaagacaacccgaaaacaataacaatcaggatcatgccggtcagaccatcaggtaagctggtttgaccgccgcaacacctgtgctctgactggcggcacatgaccgatctgaccgccagggtcaaccgaaaacacccacttcacaaattcaaccatctattaaatctccaaaataacaatagcaaaccaccaatattttcatcacaaaatctaaatcaactccttgattttacacgatatacacttacgcgggtttaaaaaaaggacgaaaaataattgtgcatggatagagtcgaacaacgtacgaaaaacttagcgagccctccaagggcataaccattatcagatcgttagatcaatatacatccggcgtatgcaatgttcaaataggagtaggtacctctcatcgagagggcttaaacctatctaaatcctcatctctggatctttttaagtctcgttcgctacctctatcgacgtttgatgtcgcgatttcggtatttgcatagtatggggatcgttggtattaggatatacgcgagagtaaggtaaaagagatggagacagggatttttatacaggttcgggcccctgaattgtca

SEQ ID NO: 18602 - DNA, 2841 bp, Oryza sativa
  unsure (1)..(2841): unsure at all n locations
tagtgtagaattagttgataatacttgtaacgatactcgatttctttcacaatatcaatttaatcagctagaccaaatacataaaagcctaacgcaatatgaatgttagtttaatctcacaaccagccggatcgtttcttttattcttatacttataagccgaaagtgtaaaatgattttgtggttttcttcaccatagtttcttttataatatatttgttgtttaatcgccaaggacacggatatgcatacagaagttttacccataatctttttataattaaccgtgagaataagtatgagcagtatgagtagaatgttaaggctcaacttcttgttatagatttttttaattgtagagtgagactttaattttacttttttaaaaaagagtagaacagaaacctctcgtacgaaactggcaataacactgctacttattaccggcttaatcgagactcgggaggaaacaagaaagaaaaaaaaacataaagcaaaagggcctcaaatcctcaatgcttcgtgccttcgtccctaacgctgctagtccccatcgtggcccgccgtgtctcagtgtcgttggagtgaccatggccgctgaatccggttggttgaaggatgccggatctactggcttagagacatgatcgacggatcctatgcatcggagctttacctgtcaccttggtgctggaagggaggcaacagcagttgaggaagacggcgccgacgagaacaaggagaagaggaaatgtcgatctcttccctcgatcatccaaatcgacgagaacaaggagaagagccctttctttatctggatatgcccaaacttgaggtcatggtcattgctaatgtnggatggcgtggacgtgcttgacctaaatgcatgccgaagggtgtcggccatgtgcatcttagttatggatagaccggaagtattttcaaaataattgtatcaccttgatataattgactaagttcaataaaactttcattatctaaacagacgagtgccggctggttacagcctatgcgctcacagctggtatggctcgacgccctccgtgtcacgaacactcctcaatctggcatatgccagctctagtagtcgtcggattgggtagaatcgagaggatttgggggtagttaggaggaagaagaagaacagagacagggaagtagttgtattgtttgatttctcattgcataactctggcctgaatggcacccaaagtatttaaatgtgtcgacctgtgtacagttgaaccaccactagcccgacatgggatccacacatgcacccaggtcatcacaagatagtgtcgtgctcacatgagctgaaccagtcacatgagaaacagggtacagaaacagagtacataacagagtacccccaaatgcaaacaccccgcttgctccatcaggtgagaggatcttgctcgttggctatanctctcgtggatccaaanaatgtcacgacaaacgtcttcnttgtccctggtttgcggcaactaacatcanctcgccgnttatattttgtcttatccatatttttccccgacctgcaatccttttcactcattgtatccgttttctcgtgttatttttgtacggagtttggaatgctctggatttttcctttattttatctggagtcttcgcactcgtgcacaggaatggaacggcgctccaccttaacacgggaatagaacgtgctcttctggacacttggcacgttttatcaatatgtaaacttgcttttaggtttggccacgtggcacaatgagctgatagaatttgcaccctgaattcggtcttttagatagatagattgtttaggtaactgaactcttgaacaggacttgtctgggatgttatacatgttcaaacgaacttcaacccacttttctttttgaaaagaaactccaacccacttcgtagtacatgctatggtaacgtctgcacgtttaatccgcacgtctttgcacaagtcgagcagggtagcgggctaagctaatctttgggctgggctatatgctggccagaggtgacaggttaattagtaatacagagttggaacaggccatcaccggtgcaattgtagagtagggatgactgtctttatttgtgatatgcaatgtaattattttaaactaactagtatggacaaatgatagtgaaactcaattggcatgatgctaattcagctggatgtcaattcagctagctataatttgattttgtagtctagctaggatgtcaattcagctggagtgtctgaggattgagatgactgtcaagcgaggaaactaaggccatcgagattattgtatcattcacttgcatgtagggatgaaaatggagcggatacggacggataatgctcataccgtattcgttttcatagtttttgcctcgtacgaaaatgaatacggattatctcgaatacgaataagaatcgaatataatcggacatgaatacggaaacaattttttctcggaacacgaaaaccaactcaacttataatagaaacaaatatcaacctatataattacctcgttttatataaaatgtagtataatttataaatattttaaaaaatttaaataatgttaatattgtgggttagtgttaagagatgagctactattaaaatctaaaaaggtatattgaaggttatagatttataaagaaatgaagtatttctcatgacttcggcggttatccgaatagcactgttcacgggatatccgaattattatacgtatccgaaggaaaccccgataccatattcgtatccgtatccgggaggaaatatccatattcatatccatatccaa

SEQ ID NO: 18603 - DNA, 9468 bp, Oryza sativa
ctctctctctctctaccttatctctaccttatctcttccttatctcagccacacaccttcccccactcctccccacttgtcacgcccggaatttctatccaaaattccaaacgcttacatgtgtgtgaaccctcgtccagaaatcagccgaggcacacaataacaaattgataatagagtacaattattactctaattaataagcgaataaaatgtcattacagaggtagatagttcctctcaatcaataaagatctaagcagcggaaagataagataaacggcgcagacgactccactccacaggcagcttgaccagggctacacctaatcctccacaccatcagcttcactatagaactcttcctctgatgaatgattgcaaggtgagtatatgacatactcagcaagtcacgcagcaaatatgcaagtgcacaggataacaaaggatggcatagtagggtttcatttgcataaacagcatttaataaacatttcagaattttataaaacagttaagtaataattaaacaatattaatccaacgctatacaacataccctgttgtataggcccaaccattctgaacaaccatcctggctgcacagttctatctccaaaccaggaatataccattccaaaccaggagctaatcaaattattaccagttatagcatcttttattatgatgagaagtgtgagactaatcacgaaagacattgttagacccgcccataaccgcgggtacggctatttgaatagttttactctggccagaggtgtaccactgtacccacaagacacagcctcacaacatgtcaccatgtgcctcaataccaccacggtacctcggaaaggagctgtgacaatacccctcgcacaacacaatccaccacagggcacctttcctggatgataatcacccccttataaacaaggcatggactccccagcgacccccgtgggcttatctccgccacttctcagtctggtgctccgcaatgaaccatgctatataaaaggtaaagccgttacccatgctggcttgtggttggcacggttaatgtttcacaaccgaaactcgtgaacacgactctcaaaaccatgtgctcacaacccaccattatcaagttttagttggccagtaattaattaacctaatcacgattgaccatcgtgaacgatcattaagccatcattaaataatagtgagtcataagttatcccaatagtgcgctaatgtttctaagcatggctaagcaatcatatctaatatctagctgaaccaatatatatagcccaactagtcaagttataataacccaaggtatcaaggaataaagtaatcaagatcaaaaagggctataacaaacaataggttaattccacccaatgacattcgaaaataaatgcaatatttgaatagaaacaatagctttaaacgggatcaacatgctcaaagggttgtttgggatctgtgtgacttgccttgctggccttggaactcttcaaattcttctcctgcaaaaacggactctccggaaacgtcggaatctaaacagaaaagagcaaaatcaccaaaacagcacataaacaagcatgaacagtacatgtggatatttttaacaggtagatcttaattttagaaaaatttagagacttgaactaactaaatccgagctaagatgaattagtaatgaatttttaaagattaaatcggattaaaacacttatatggattttaattgaattatgacgcaataatgaattatttttgaaaaggaaaaggggtttattgcgtcagcggctagggtttgcggtggaccgggcgcacggcagcggttcacgggaacgaacggccgagatcgatccatccaaaacggacggccgagatcgatcgggtctacggcggctcacggcagacggaccctgatgacgtcagtggtgacgtcatctccggcggcggctcgggcgcgcaaactcgccggcgaacgacggcgcgaggacgcgaacggagggcaccatcacgtagagagcgacgcggcgaactcaccgatgaccaaaacggcggcggaagatgaacggacggcagcggcgtcgaggaaaaggcggcggagaagatcgggccgacggcggcgacggtgctccggcggttgacagcgacggcgaaggggcagacgaggacggcggcgacttggtgaccatgatggcgatcttcccgagcgacgacgacgaccggaacggcggcggcgcacggctggagcggcggcgacgatggcggcgctaggtcacacgacgctagggctcttccgacggcgagagacgaaggcgagggtggcgacgggtagcggtgggcttggggatccttttataggggttggagggcgacggcgaaggcccacggcgaccggcgacgcgaaggaaacattggggttcggaggaaagagaccgatccgattcgacctcgaatccacgaatttccaaagcgatttagatgatgattccaaaagagaaaaggtagaggagatcccgaagatcatttcccctctattgatttcaccggatcgggaaaggagcggccggatttggaaggagacgacggcggcgcccgtcgtcgtcgtcaaggcggcggacatcgtcgaggcagcggacatcgtcgtcgtctccgcggcgaacgtccccgccgccagctgcctcctcaccgccatccaccaccacccgctccacccctcgccgctacccctcgccacgttgctcctgggccacctcctcttgtgccgccgcgcttgtgaggccacctccatcgtccgttggctctgccgcccggactcgccctggcggcccaacagtgccaccttcaccttcaccatcacggcgggcgggcttgacggcgacgatggtgaccggcgaggcggcggtgagcgggcccacccagatccgacgagttgtagtggtcagttgcgtgtgggccagcgatttttgttttttttttatttttggtttttttggtataacttgaccacataggataatcgattatcccgtgcggtccacttaagtgaaccacaagggaaaatgattatcccgtgcggttaggccgcccgcacgcgaaaatcgtgtagtagtgcgatgtctataatatactgcacctaaaaaccgagacaacagagcgtaagtcgccattttagccggtcgcctcccctcccaacccacagtcgatatccttatccacactccatatccttctcctttcccatccctctctccttcctcttccacatccttcgcctcctttcatgtcctcccattgaggagaccctccaaacccctttcctataggtgcgggccaagggtgtggcattgccttccccttctcctcgctgtcatggttgctgtgcctgcactacgtggttcagcactatgtgtggggctgacacggggaggcctccctgtcgcatgcctctctggatctagcggcttagtgtcctccgccagatccatgcatcttcaacagcatcaacgacataaagagcatggccgacagcgagtcatgttggtgtcaatcgaactcggagggcttgacgcatcagcttgattcaattgtatgcaattgagatcttggcggtgaccttattcttggatgttagtgtcagtcgaatttttttggggggcgggggcggggggggggggcctcgatggttcaactcgattcaagcctatatttttattcgtggaacattaaatgtgtcagtttagaacttttctttttttttattcgtgaaacataaaaaaaaaactctaaactgacacctttgactcttctcatcaagtaccgtcaatggggtgacagttgagaaattcggtaatacctataagaaatttccaaccaataccaaggtcctttcctgtatagcagtgtctggaagcgctcccctacaatacatatgaaaatccaataaaatggttaattctttgacaagatcatgcgcgcgcacctataatcgaagtagttgttgtctttaaagatcctcacaacccagttgaaatcacgcatttgacagcttaatttactctgttgtttcccatagtcaaaagtttagccaaactttatcagccaatatgcagattagcaagttaacgacaaaatggagataacatgcatccttaaatatatactccctccgttttacaatgactaacggtaggcactattcacgtttaaatttcaactactcatgttttttattaaatatttacagaccctaaatgatgctgtgttagtaaagtaggatatgtcctaaaataaaaacataacacttttgttcactttgatctaacaatttaagcatgattatgatcaaagcttaaatgagaggtagcatttttttctatcataccacaacaagatattatttgccccgagaagcaggtgcaatagaaatttccagaaagttactcaatggtgagagctagttaatatggttaccccaccataaattgcctggccaaggtggagaatccacaggctaaataaccactgcgcactgacaaatggaaattcgtttatggacaaaaaataaataaatagacaaataattaattggtttacacatctttatcgaaccatgtacatgatctgtgcctataaataacatatatatcatcagcacctctcaagtcttaacccaaaacaagagaaccattagtcaaaccaaattaccaacaaagtacacctctcccttgctagggtttgttccctctcccaatctccaaagtgtcatttcacattgacttcattcttcttcccagatcccccaatttctccctttcaccatgaagcttctccctcttctcatcctcgcaatggtcatggccaacgccttcggcgccgtcacttctcgcacggcgccgggggaggaggcgctgctggcgcacggcgtggtgaagacgacgacggcggaggggacgtccatcgacaaccaccacgcgataccgcggccggagtacgacagctggagcagcccggggaacatgccggggagtggccatgacattgggagcgaacaagctcagccatgatcgagctagatgcagcttacccagctctacccatgtcctgtacgtatatacatagcaagcttgcaagccatgggttatacacttattacgtacgcttgattgcatgtagctagtatccatatatgtacggttgtggctctagttgtggttgcatgataattcgaagatgctttgtagtttctacagtgattgtatatttgtattgctcatgtaaaagtgtttaactgtatttaacctcatcacgtgtactaatgttaattaattaaatactgaataaaatttatacgtccctacatgaagggagagttcttgttttctcatttggggagttcttcgtggtgatcgatcgatttagttatgttagtagagccatactgttgctacttgtgaacttgaatgatctaattataaataattaaatacaaataaagcatgcaattattagacagttgatggatcaattagttatattgctgcttcacgccatagcatctactgatttgcgcccttctacattacaatattataccgtacacagataaaaattatgatgaccaatttgtagttccatgcctcttttttttttgcatcaattccaaatatgcttggataaatatttacatttcacattaaggacaaattatttttatcgaggaaagaacagctgagggaagtgctccccctccggtagtggactaaattttcatcgtttcatgatctaaggggatgtttagatccaggggtgtaaagttttggcgtaccacatcgggtattatacagggtgtcgtatgtggtgttcgggcactaataaaaaaataattacagaatccgtcagtaaaccacgagacgaatttattaagtctaattaatccattattagcaaatatttactgtagcaccacattgtcaaattatggagcaatttggattaaaagattcgtctcgtaaattagtcacaatctgtacaattagttatatttttagcctatatttaatacttcatgcaagtgttcaaacgttcgatgtgacaaagtgaaaaattttagggtgggatctaaacaggacctaaatctcgatcttattgctgcttctgtgataagaaagttcatatagtgccagcagaccattgggaagggatggggccttctaatgcgatgccccctccgtacacaaatatagcaagagatagtattggattatatacatattaatactacgaatctacatgagtagcaaatattcaagagttgtgactctgttcattttgactatcaagcatacacatggtatatttgtaataatcaacaggtggtgtaaaaattaatatataaattgttgcattttaatataacattaagcaaacgcataacattataatagcaatgctgtgaaattttctgaattaattactaatattgtagttcggtatgcatatatttacagttgtctatctacctaaaaaccatgaattatacaagatagacatttactaacgatgaatatatgtacatgaagcacaaatgtggagtataaaacagccataattctcaaaaaaaaaaaagccattcttaccttagtgaataaacaaattaatgattcgcttgcaattaatggatccgcaattcgcagtttgattatggcatgatatatatgcatattctttcggtcatttattcaaaaaaacttgttcgcaaaatcatcagtagttttgtttttccagtagtgtccaaataaaaaaaatgatagaaattagtttgtccagagacaacgccacttacctaactgaaaggaccccacttgcgataagttgaattattatatggtgagatatatattagccaataagtgatgtgtcattttaggggtacagtaaaccttatatctctaatctataatattaattaattagataactttgtaattaaccacgtatatatattttttactggttaagtgtttagtggatgcttaacatttctgcatttacctctatatgcttagatgttagatcaactgaccatgacacattcagtggccgattgaaacggtcgggttaaagtttaggcactgatattccccaccagtaaataaaatattaagttattgctaagcaaagcataaaccactaacttagtgggaaatactatcgctagtgtaggatgatttctgcataatttattatttcaacgacaaagattgggccacgtagtcaaacgaaatctttaaaattacgatattatgacttattttattttaacttgccacagtaaaaagatgaaaatttgggtgtcattttgcactaactagattctactggtccaacagaacaaaaggagaacctttaattttacatcccacatgaatgtttttctatactagtgtagcattcacgagccatttttttgtaagcttttctcactatataaagtgtagctgaccgaacccgtagccttcactacacagttgaatccgaacgaattcttcctctcctacagtagtagagatttttccaggtttgactcgatcctgttcttgttaattagttcttgcttgcttgattacgatcaagtttcaaatgtctaattaaacattttttatccctgtaatttctctctctctctctcaggcagctataggtttgatcaccatgaaggagaaactgaaggcgaggtttcagatcatcgccgtcttgctcgccttcgccatggtagctcaagctatggcgattcgcggcacgggtacgacggcggagcaggataacaccggagggagcacgagtgcgaaacataccctgcctcaggctgttggaagtggcacctctgtggacaaccaccatgccatccctcgtgatcagtacagcaaccatgggggtgatgatggaggtggcagtactggtactggtgatacaaacaactagtgagttgatgatcatggatgtgtggagattaatttctgagcttgatgtgaggggagatttaaatatatatgttgtgttaattaaggtactaagtactggttgtgatgttgttttgatatcagtagccctaatcctgagaataagctgcttctcttcatggggatagaggagagcttctaaatatcaatgtatgcaatatttctgttgtgtgccataagctgtttactcttatgacaaattaattaaatctattgtccagaaaacgaccagcttagttcatatgtgcttccaaattagtatttcgtcgtgttgtcttgatgtatttccaaattagttcatatatatgtgcttccaaattagtatttcccaattagtatcatcacctaacaagtaactacaaacaaaggcttgtaaacttatagtcgacactaagaaaatacatcatttccacaacataatttcctgataccctagaccatcaatgtaccctttcccttactttcacttaatcttgtatcagaaaaaattcaccctatcgacgaaactcttgtacttattgcatgctctggtattactttctgcattgggatctccattgaaatttgcctttgttatctattggaagcaatctggcaaaggatgtgggtgtagggatcgagagggggatgacaagccatgatgatgggaagattggttgctcgtcgactcaactgttgtgttgttgagagctgcagagctccatgtggccgtgagactgaggagggaggaagaaataagttagtgcaattgagtggtggtaactggcaaggcattataaatggaagggagaagtgatgggaggggtaatgtcatgggaaactattttgatccctcgtgaggatgtccccttattgtttgcatgttattccaatggttataaaaatatttgagaagatgtaataacatgtgatatatcactccacaaatatgcaaggttaaattcaacttctatatatcagaacgaaaaaaacaaattaaactatagcgagttaacgcatatttacagtcaaatttgtttttttcgttgcaaaagatagaagttgaatttgaacttgcatgtttgtagagtgatatatcacatattaatatatcttctcaattgttttcaacttttttcgtaactatttgagtgacatgcaaacaacgaggggatatcccctcgagggatcaaaatccactcctgtgatgtcattagagaaacaaggggaggtgagagtggaactatatttgaagaagttagcttgtacttatttccctagttttgttgattggtttaattcaaaacagagcgtacattttttaaaaaagaatgaagtttgatgttcttccctatgtatttataaatcttacttcgcatttggacaaggacgttttatttaatcagcgcatttggatatggagtttttaatttctcagacacatagaaggcaatat

SEQ ID NO: 18604 - DNA, 2936 bp, Oryza sativa
ttcctgcagcccataaaatgattcctagtctaatgaatctggacagattcctgctcagattctttggactagaaaacatcccatccaataataggttggtttttttgggacggagggagtataatttgcatgattttgtatttacttttacatttttaatatatagtttacagtacaatttcatttgacattttaggtcagagtagggctgcagcgttagctgccgtactgctatatccgcctctcaatgcaccaacgaagatacagtaggacttttattactaccggagcatgaccttttctaattaaggaggctgaattatcgagcgcgtccactctcctaattatccgtgtgatttgtaaaaaatattgatttattcatcctaattttctaaaaaaggaatatcaacttaccaacttctaattaatatttaatttatttttatccatatcatgcaccagaattttcaaacggatcctgatgggagtgcaacaacaaaaagttcatatataaatgaaaataacaaacgaaaaataatcaaaattaacataaccacataaaaacaatatgtcaatgctaatcctattaattaatagtactattaagaaaacagttgtagaatgtcttttataggtgaaaagttttcaaatataataatactataaattgtagttaatgtaattgcagtttaacttgaatgcaatcataatgtaaataggatatagttacgttgtgacttgaaaggatatgccatggcataatggtggaggcacatgcctgggatgcccacatatcgtggtttgaaattagaccacgtagggtttattaggtttatgtttcgctgcacacaaatctcaaagctaatcctgtgccaaaatatccaaagttttctcccttgtatagcaaatcccttaattgaataggctagatcagtcgatctaatgcaaatatttccaagataaccgtctcaaatgggcagcttgccatccatgatcgatgttatttcctcgttttgtctttgtgctgtagtagagtgacaaataacgaaaccaatacattcccttcaaaatttaaatgacgtccatagaaataatatgcgtccggccgaggcaaacgttcgtgttttatctctcgacttaacaaattataacttgattactatacgatgacggaaccaaaaattatcaaagtctaaggctgtgttcgataccaggagttctcaactccccctctcgttttccgcgcgcaggcttttcaaattactaaacggtatgcttttaaaaatatatatatgaaaattacttaaaaaatcatattaatctatttttataaaaaaattagataatacttaattaatcacgtactatggaccgctccgttttccgtgctcactttggaactggctagaacgaatgcagccttaggcagccctaggcttgcctccggcgctagacgtatatgcaactcttgcttagtcatatattaaagcataattatgtctattataactgggtatacattgttactattttgcagtttactaaattaagatggttatggctatcgtgttacatataaaatattaatacaatctttatatggaaactataccgttatctgcaacgtaacagtccgtaaggtatgtggggttaattatatatttatcacatcctgctggtgtcttattaatatatctcacgaaagtactcacctttctgcaatccatgcatctttttccgacaaacagtttaaaaagatgagcggacaaatcaagccagcaatctattggtcgtttcagattagacaaatggtgataatatatcagtaagtggaagatctacttttcatcatcagtaatataatatatcatcattaacagcaatatattagataacaccgcacttgacttctattgactttggtggatttcagctagatctccaacaaaatcctcttttggaaaacattcagctgtccctctagatgtatacatgcctatttttactagtttattgtactgtttgcatttcctagaacatttgaaagtgccacagttttcattattacaaggacgagattataaagtcaatatagtacgtgtggaattatctatttattttaacttgataatatatggccagtttacttaatgtcagttttaaattttataccaaagttgctacaaataaaattactgaggttgctcaaaacgtatttagtccaactcaaacaacttttatacctgggagaaatatcatggaaggacttgttatattacatacatgaaatgcatcgaaaaaagaagagtggtgtgatttttaagattgattttgagaaagcgtatgataaaataaaatggtcatttgtacaacaaacattgaggatgaaaggtttttcacataaatggtatgaatggatagcttcttttatctaaggtggacatgttgcgataaaagtaaatgaccaagtgggctctaatttttaaacatataagggtctaaagcaaggagatccaatgtccccagtcctttttaatatagttgttgatatgctagctatattaattagtggggtcgttccacatttggtggacgatggtctatccattttacaatatgcaaacgatactcttatttttcttgagcatgacttagagaaggcgaagaatatgaagttgttattatcagcttttgaaaagctccctggcctaaagattaatttttacaaaagtgaattattttgctttgatcaagcacaagaatgccaggaactattctaacatttttggttgccaatagggaattttccatcagaaaacttggaattcctatgctttttagaaaacttagtaacaatgattagaaaacagttgagcaaagaattgaaaaaaaaaaacttagtagttggaaacgtaaacatatgtttgtacggggaa

SEQ ID NO: 18605 - DNA, 7474 bp, Oryza sativa
ttcctgcagccccctaaagcaaaagataaagatactctacatgagcttaaccatgttcttcaaattgaacttaatctaaactataatgtaactcgtgtattgtaaaatactatctcaaaagaacgaatgcaagattactgtcattactattcgtctccccttgagttgaacatcaaattcaaatacaccaaattcctttccttccacaaattttgagttcttcatgaacatattaatagtacaagtcatatatgtgcgtgcaaatgcacatgttgacagtaatacaacttcttgtgtatcaattctaacaactaaacatgttgcatctaggccaaaattgcttcaaatacaaatgaccaatttactcaaaataatttgcatacatccataaaaacaatacttcatttgtaaattcatttatacatagaagatggacataacattatcaatcaaattaactatagacactgcataggtacatagtattttgatagataattttggtgcagggcatattggcatatagacttcttgtctatatattcgcaaattcgatgacattgtatctacttggacacaattaatataaattagttgtagcttatcttctctgatagtcatgcactaataaatatctctaagtcaataatatactctcttcatgatgagtgtatacatttattctatacggagaatatataattgtgcgttctgcaaatgtggcgtcaattagacaaagagaagatatatgaataattttattactcatttgcccaataaatgtatttgctacatgcaactacttacatgatgtccttttatgcaactttctaccggtttacttcttgtaaataaagtgcacaaaacgagtacaaaatagtaaagaatggttttctatacacaccttttattacaatcctagcaattaacatgattttctaatattcaaaggtatgtgtaatttacagaactactaacccacagaacaatcaattatcccaaacaaacaattgccaggaaataaaccataaaatattatgcttccaaaaggggtgctaaaacaaaggtttcacaagttcatggaagctcttttgcctaaaaacaatgtttctaggattaattatggttattcaagaaactaactaaatagttaaagcaaatacatagaaatacgggactaaggaataaatccttaattcttctctatttggcgtaaacccaattcatgaaggttcaaagtataaatggcgaatgtatatttcccttagtttctaatgtctcataggacttttccgcataatttccgagttccgcataatgccttggaaaccaaggacttttgaaataaaataccattttcggaccaaaatcacggttcgtgcccgactccttttaataggccaatttctacttggcccacctccttatactggctagctttaaaacctggccagcccatctcatatgtcgcctaatgggctattacgaccttcccccacaagaagtgggtgaggtatgatccaattgccattcttcaatggagacaatggatggaaccaatggcaaacgtgctagtgagccctcggtagagatggacgtctatggaaagttgccatggtcagaggcgaagcggcgatgcaacatctagtagcaccgacactggcattcgttggcatcaggccgtgtccggcgtccgacaatcatagctccatgttacgtgtcgatgaaactcagctcggcatataggccggcatggcggacggctatcgacggcgggtgctcacggcggcttcgaccctcgtcccggccgcgtgcggtagcgtgggaggcaagccgtgcgtactggcggcgaggggaggcgggcgtgctccttggcgtcactacgggcggcgaccgtcaattgcgttgtggatggcctcgaaaggccgtcgagtcggcatttcagatggcggatcgacgagggaaagtctctggattgattcggcaaccgttgacaaaggggaagacgtcatgcggtggcgtccgggtgtcgctacgtgcaggcagcggcggtggcgcctgcaggtgccgatgactcggatttgttaccatctacttcatacagatagcaatatgatggattattaacatacaagtcacaaccgacagagtatcccaagcgcgctgatccataagatcagcgatgacgagtgtgttaatatattcatagattaatgactatgttagccagaaagacgacaacttctaggtggtgtcgtgtgttactgagtgttaggtgtcgtcgttcgggacaacactccgtcgttcaattcaacggattatgtatgtgcaccttcctgtgtgcatggtaagcgcattcgggcgcgtggtgccaaacttcgtggtcggcgatataacaagggaagagtcggcgcaaatgccggataaatacatctattcatgcgagaaaataaaacgactagaggcatgatctagcatattactctcgctactgcaaagtattagaatagataaaaccgatactgtcgaaacatgatttcggcaataataaaagggggtagcgcacgagacctaaaagtggatggatgcggagacaaaggatttagacaggttcaggccctctcaatgagaggtaataccctactcctgtttggggatttgaatccgccgggtgtagtatagatctgacgatcaggttgtctcatcatgcccctagaggggctccctgccctccttatataggttggggggcagggttacaagatagaaaccttaaccaatacggtatcggtttcctaaatctactttacaatcttatcaaaccaggactttaggctgttccataatatacagggaaacgtaatacccaagtcatgatctgttacatatttcatatatataagttatcccctataactagtcggataaccatgccgtgtgggtatggggtacccataatctccacagtagcccctgagaccttcacagtcggaaagataatcttctctcgaactagattactccaaagccgagtgcttcaatcatcttcgccatgatctcccgagtactttttccaagtcagaagactgtggagggctgaaaaaataaagtcagatgcatcgactagatgcacctaataggtgtaacccccgactatgtggttaattgaacaaaccaaacatatagtcaaggaataagtcatccaattaaccgagtggtttttgataattatagtcaaccaagtgacttgataccaatatatagcatatgcggtgtgaatccccgaataatatgatccaagtgatataccgactgcttggcaaaatatgatgagtgatatagcaaaatagctataaagaagcttgtatattgtgaataaagaaatttccaaagtattgggcatacgccatgcgcacactgctttaacagatgtgcttaagtccctagaagacacatggtttcaccacacctggaaatatatggcatatgtggtgtaaaatccgagtaaataaactcataaaggatttaccaaccgcctagaaaatgaccacaatatataatcagcctaagccataatattggtcaataaaaatgcacacttacgtggcgaaaagcaatgatattgtatccaatcaattgcttaaaaacccaaacagcaccttgacttatatataaaaaagtcagcgggacagctatataaagctttactgtttgacaccttttaagatgcattgtaccaactcctaaaaagttaagtaactgcggtataaaaggattttaaggtattgggcacttgatcacgcgcactttggcctaagcaaaaagtgcctaagtccctaaaagaacgtgacaggccacacctgaaaatatgggctgcagacatattaggcctaggccaaaacatatgccttcgacaccctttaaaggatgacgcatataacatgctcccgagtaataaatcttccgggtaatatagaccaagcgtagctcatatgaatagcttctgatctgagtggttatcccttatgggatactccaaaatagatgtaacaattgaatcccgactggcgcaagtattcggttgataacctttacggggaataataattggtccagtctttgagcatagaagatagactcatgactatgaatccatgtggaatgtatccggaacaagtccaaattggagatataatcctcacgcttgagttgatgagcccctgagcatatagcttgtccttctgtcatagtcaaaattgtctattggcaatagcatggaggcgaagaaacagtcggtgatgacaaaagcaaaccgacgatgaagacgtagacgcacatcaacagtgatggcgaaatccaccaatcatgaagatgaagaaaatagttgacgacgacaaacgcaaccgacatgatgaagatgacgatgtcggtgatccagccaatagcagtgtagcaaccaatgataatgacaaagacgctcatcagcatttgcatagtaggtcaaccgtcaaggtgaaataataagtcggcgaaaacataatcatccattagcaacagcagagatgtcagggtcgatgaagcagaggtgctggtgatgatgtcagtgacaataatccatcaaattaatgttatagctgttgtagatgcttcacttgaggagagttgatgttgttgcccaactcatctaaaccgaaatatttgaagttgttgaagtagaatgtctgctccgaagcaaagatgaagataatgactcctggagttgactcggggttgatgaattgattttgtcagcttgacataaaatttgtcaaattttgagccttgtatttgtgtagcccccgactctttgattagttgggaaacaactgaacatagagtcgagaactgtagcctcttgtcgtcgaatagttattgcttgattgaagatatgtgttgaagatgtccaagtagaaatcctgaatattggagagcctcttgttgtagtaaaataacatggcatcgcatgccgagatgtcgagattcacaacaacgtcatggttggtgatgtagcaaaacttgtgaagtagcagcaatagagtttgctggtaccgaagataataaagatgaagtcgctccaccatgatgacaaagttgtgttgccgtgatgaagtgaacacgagtcggcggcaacagaagcaaaccggtagtgaagacgcgcagttgtgaagataaaagcaccagtcggcggcggcataacacgagtcggcggcggaagacgatgatgtccatcagtagtggtagctgtataaaccagatgtagaggcgagggcactagttagcagcagacgagacgaccggcgatgaagatggtaaggccaatcaacactggcagaatcatgcagccatggaagtgaagaaaccagtcggcagccatggcaaacgtaggcagcttgtgttgaagatactgatgcctattagtagtgacagcgatgtagccagccgtgaagaagatagcatcagttggcgttataacaggccagccgtgcaggcggtgacaccagtcagcggcagatgcggcggccggtcggtgaagacgtagacgcccaacaacggcagcatagtaggccagccgtgcaggcggaaacaccagtcggcggcggtcaaagcggccggtcggtgaagacatagacgcccaacaacggcagcataatatgccagccgtgcaggcggaaacaccagtcggcggcggcgaaggcaagccagtcggtgaagacgtagacgcccaacaacagcggcataataggccagccgtgcaggcggaaacaccagtcggcggcggcgaaggcaagccggtcggtgaagacgtggacgcccaacaacagcggcataaaggccagccgtgcaggcggaaacaccagtcggcggcggcgaaggcaagccggtcggtgaagacgtagacgcccaacaacggcggcataataggccagccgtgcaggcggaaacaccagtcggcggcggcgaaggcaagccggtcggtgaagacgtagacgcccaacaacggcggcataataggccagccgtgcaggcggaaacaccagtcggcggcgacgaaggcaagccggtggtgatgttctgactgatccattcctggagcgtaagagataagcttaaagccatgaatcccttttatgcatatctggatctagatcctgcagaacaaacatataggatgagtagtatctgatataaatataatactcgagaaaaaatcaagtattttaaaatatttataaatatgtatttctcctcttgtcaattttgatttccccgagcagatgactctgtacgtttaaacactctgtccgactagtcatagcccccaagcatcgggagtcggcctaggcatttcccaaacatgcatatgagtgacatgagttcatcattaatggaacaaagtttcacggattagaatttactactcgggtacttttgcaattattaagagcagaaaataaatttatctcatctctatgcttttgatttattccgaataatacttagcaccttgcgttactcggtccatccaacgagcccccgagtgctaggaatcggcccaaaggcaaccatccattggcaaaccaaacggaaagcataggaagatagaactccataactcgataggtacttttgtactcaaattatgtcgcaagcaatcaagataaatattataaaaaatatgatataacatctgtagcccccgactcactactcaatggaagaccaattggtgtagtgaggcagaggaaaaggaaaaatatcatataaagaataaaataaatgatgacttagctttgtaatattccccttggtgatggcagaagtggccaatgtgggaacaaagtcgtccatcaataacaatgaagacaccagtcagcggcgacgaaggcggtcgacggtgaaagcgaagatgcccactaatggcggcataataggtcagccgtgtaggcggaggcaccactcggcggcgacggaggcaggccagcggtgaagtcgtagacgcccaacagcggcggcataataggccagccgtgtaggcggaggcaccactcggcggcgacggaggcaagccggcggtgaagtcgtagacgcccaacagcggcggcataataggccagccgtgtaggcggaggcaccaatcggcggcgatggaggcaggccggcggtgaagatgacgatgcccatcaacggtggtgtgaccaaccgaccgtataggcggggacaccagtcggcggcgacggaggcaggccggtggtgaagtcgtagacgcccaacagcggcggcataatagaccagccgtgtaggcggaggcaccactcggcggcgacggaggcaggccggcggtgaagtcgtagacgcccaacagcggcggcataatagaccagccgtgtaggcggaggcaccactcggcggcgacggaggcaggccggcggtgaag

SEQ ID NO: 18606 - DNA, 2810 bp, Oryza sativa
ggccagccgtgtaggcggaggcaccactcggcggcgacggaggcaggccggcggtgaagtcgtagacgcccaacagcggcggcataataggccagccgtgtaggcggaggcaccactcggcggcgacggaggcaggccggcggtgaagtcgtagacgcccaacagcggcggcataataggccagccgtgtaggcggaggcaccaatcggcggcgacggaggcaggccggcggtgaagtcgtagacgcccaacagcggcggcataataggccagccgtgtaggcggaggcaccactcggcagcgacggaggcaggccggcggtgaagtcgtagacgcccaacagcggcggcataataggccagccgtgtaggcggaggcaccaatcggcaaaagtagtgccgcggcgttacatgcaaacagcagaaaataccaagagagattaatctgacatttagagatcaatctaataaacaacaataagttgaaaaggaaaaaacccggcgaagtcggagattaaaaggaaaaaactcgccgagattgatctcttcgactgactccgagacggagcggaggaggcggaggtcgcagtcgcgggcggcgttggtgtccatcagcacgacgcaggacggcaggaaggcatcggcgtggctgcagccgtctcttatgcatccgattagatcggttttggcatgcttcgtgtttgtagatccatcttgcaacaccatggcatcctcgttgggtagattggaccagtaggcgtggtggtggacgaggacgaccatcaaatccgtcgaactgtcgttgccccgtcgttgccgtcgtgctgatgcaaacaagatcaggcagagaatagcagcgacgattcgtcttgttgaagtcgtcggcggcgaggaatcaaggagctcccaaagcgaagacgaagccggcgactcataaagttgattccatcgcactcgttgtcaggaaactcggcgtttacccctacctggcgcgccaactgtcgaaacatgatttcggcaataataaaagggggtagcgcacgagacctaaaagtggatggatgcggagacaaaggatttagacaggttcaggccctctcaatgagaggtaataccctactcctgtttggggatttgaatccgccgggtgtagtatagatctgacgatcaggttgtctcatcatgcccctagaggggctccctgccctccttatataggttggggggcagggttacaagatagaaaccttaaccaatacggtatcggtttcctaaatctactttacaatcttatcaaaccaggactttaggccgttccataatatacagggaaacgtaatacccaagtcatgatctgttacatatttcatatatataagttatcccctataactagtcggataaccatgccgtgtgggtatggggtacccataatctccacagatactcatctcgtttatctcgtttatccgatgtaaaggtatagctggtccggatatgcagctgccgctccgttttacacaagggaactcccgggggagtcgatgtggaccatagccgaggcgctcggctccggtgcaatgcgcgtggctagagtccagaaacaatcttcaacagcccacggcatgcagctccggccgtacatgcaagacaattaatcacgaaaataaatctggttagtgtcagtactataaggatatatgcatatatcagttgtatgcatgcaacatgcatgcgtgtagatgcatgttaatctaatcctccttgcatgcatcagattggtatacgaaaaccaatctgcacagtgcaccacatcggtactgcctcctgcatgcacagtgacccgcacggcgacagcgcaccggcgtgccgcgtgcctccatgtgcttgtaatccatccagccagccgaggcagatggttcaagtcgcgtcgttcctgacgtccatttgtccaggtggcttgcacggatggtgagcaaccacaccgtaccatcccggcgatttgcatcacgaggctcgccatcatccggacatgaaaacagaaaatactagcgcattaatctgtaaattagaaatcaatctaacaacaagaacagattggaacgacaaaccggacagacggtcgtgttggccggcgacgagcagtacacagataacagatcaatctccggattagcgtacgagcaatctcatgctgataacgtgttaaataactagtggcctattcgctgatccggagtagaagacaacgatttcattcacacaatcatatagtagatgaacacggatatagagagaggcatcacagctttattgctttctcatatgtggatacatcaaccaacctctcaaaccctctatctcagtatatatacccataataggaagagtcctattaggatacgtttccatatatttggtatgagctcatatttatctctggtaggagataatagtttcataacatatacatgaacatggacgatatttacaaggtggcaagccacacagtagagatttactcgtgttgatgaactgcagtacatcttattgatttctactgtagaaggaagcaacgacataattataacatttggagctttgacatactaattttatattactgttacacgtactatacatacgtgctcgatccaagtctcgtctacattgcaagaaaatacaaataatagtcctctcatacatatgttcatgcatcacctgtgtagtaaatttgatcaatttcctccacatcttgctctgttcgttgattgctctgagaaactccttggcagttagggtaggttccaa

SEQ ID NO: 18607 - DNA, 1406 bp, Oryza sativa
gagccatcggaagttttggaaagccagagacaagctgagactgtagaatatatacattctttcaaaaataattaataataactgagttagaaaatatcgcaaaaagtaggaaagatttatatatatataaaccaagagcacattgttagttttctcattttgtttttcattgccaagaaaacattgggctggagcataaatgctttatgctaatgtctgaatcaatggcaaaaaccaatttaagtgaaactaacatagcccaattgcaaaaattcacccactttcagttgtttgttatctttagttggtggacgatcaatgttttcaggtcaaagaagttatttaataatggaaatccacagtaccgtttttatctcctataaatatagcatgtcatctgactacatttttctgcaaacaaagccagggaaggtgaaagaatattttatagcagtatcttttaccatgtttacattgagagtcattaatctcaaaatattaacctttcttttgcagggcctgcaggaattaatgaagatgaaggccgctcttttgatgatactagtggtggccgtttctttcaatttgtgcacttgcaatattccagggaacatggaagaagaacatggtatgtacaaggatgtgcatgctgggaaggacatgcgcaagctgatcgatattgatggaaggactgcccctacaggccatgactatgaccatgtctgtccacgtggtatctatccttgctgaataataatgtcctagttctcaataggaccagaagctattggagccaactagtaattaatagcatcatctggaataattgtagaacaaatatttggatgtaagatttgtgtatgtttgaatccccacggggctattggtgtgagtgcaatatatctagtttatatggtttgtaacgtgtaattcttaaaatagtatatatatgctataaaaatactttagtgttccattgcattatagttgcctgcgtttatttctaacagagattatgaattatgataaatctggcatttcacctatgtaggaaatagaaatggtatctacgtgtttttttagaatatccatgtatatagatcaccgcatgcatacatttaacatttgtaatttcaaattcatactgccaactaatatgatcaattttatatttggatcaagttgttagatttgcaatatatgatcacatattgtaaacattattggcaatgacaaatgaatattgcagacattgttgccaaatttgatctcctaaaaagtataggtcacaggataattgttcttgtagttccaaaaaaacgtatggattaatgcagcttacaaaatgcatctctagaaagttctggctggaattgagataaaatctacaattgccactaacctat

SEQ ID NO: 18608 - DNA, 506 bp, Oryza sativa
caaggccccaagcaacctggtaacgacatcgacgtgtacctaagaccactggtcgaggatcttaaacagttgtggaggaaggaaggtgtccccgtgtgggacgaggacaaacaggaggagtttaacctacgagcgctgctgttcgtaaccatcaacgattggcctgcacttagcaacctatccggacagtccaacaaggggtacaaggcttgcactcactgtatggatgaaacagaaagtacgtatcttaagcactgtaggaaggttgtatacatgggtcatcgtcgattccttgcagcaaaccacccggtacggaagaaaggcaagcacttcgaacataaggccgaccaccgtacgaagcctaaacatcgcagcgggaaaacagtgtttgctatggttaaagatcttaaagtagtgttcggaaaggggcctggaagccagcatatagagagcgaagatggtcacgcggcgatgtggaaaaagaactctatattttgggagttacc

SEQ ID NO: 18609 - DNA, 1665 bp, Oryza sativa
aagactgacgaggattacgatcagttggatgggcaaccccctttcacgatgacgattgacccttagcatctctcttatcaaatgaagacaccccttactcacgcagcgatcacaaggagggaacaatagtgaggagaaagtacgtgcggtcaactgtcaccgccgatgtaatgccgtaattattgtgtacacgatgtaaactattttggatgtattgattatccatataaatcaattgatgtatggcatatgttaattacgcacgattattagaggtttcaacaagttcaaatcatgtatatgctagttatatgtgatacttacaatttttaaaagttttaaatcacacaggtggcaatttcatatgtacgttaattagagtttttaacatttaatttactagcattcatatgctaattataattgactagaggatttttaaaagttttaaatcacgcaagtggcaattttatatgttaattagagtttttaacatttaatttactatcattcatatgctaattataattgactggagaatttttaaaagtattaaatttaatatatttttaaaactatcattcatatattagagtttttcacaatttaatttactatctttcatatgctacttatatatgactattcgaatttttaaaaggtttaaatcatgcatgtggcatttacatatgttaattagagtttttagcatttaatttaatataattcctacgctaagtatatatgatgattacaatttttattaattttaaatcatgcagtatgtacatacatatcttaattagagtttttaccaatataataatatcattcatatatatgctaagtatatatatatatattggaatttttattaattataagtcatatatttgcttattacgatttatccacttaatttattacagacaaaaataatttttcgaagtaattgtcattaatctttagtactttaaataatgttaatgcattaacttctattttataaacacatatgtaagcgaaaatcatatgcagtgctataatctttagtcccggttcttaaccctaaccgggtttaaaaagaatttcgaaatagcgggaaaagatatttactcccggttgttgaagatatctttagtcccggttgttctcaacaaccgggagtaaatatcttttctttactcccggttgttctcaacaaccgggagtaaagatatctttagtcccggttgttctcaacaaccgggagtaaagatccgggggtatatatattcccggtgcgccctcgtcttcttcaccaacacttagacgttttcggccgatcgatctctctcggcctctctccttcgccgccactgcctagggcaaatccccgcgccgacgccgccgtatctcgccgtcgtctcgagctcgtcgtcctcgccgccgcctccgcctcctccgctgccgccgcatctctggggtgagagccgccgccgccagatctccctttatctctcgatctctccgatctcagctcgatctctctccgtctctctccgtcgccgccgccacgccacgccgccgccgtcacggccccagaacgcaacgccgccgccgccgtcgtcgtcacgccaccgtcggcacgccgtgaccacgccgccgccgtcgacacgccgccgt

SEQ ID NO: 18610 - DNA, 5685 bp, Oryza sativa
gagcgaacgaacgtgaacgagttagggaacgtgaacgagcgaacgaacgaggacgatcgttaacgtgaaatgcaatatatatatatatgtatatatatgtatatatatgtatatatatgtatatatatatatatatgtatatatatgtatatatatatatatatgttacttcgcatttatcctaatacatttttttgtatttgcagaaaagacgtgttgtcggagtcgtccgtcaagcctgagtggaagagctagccctagaaggaattggagcaggcaagtgacgtaataatataaatgattgttatatttgtaatgcaattaattaagattattagacctgtaattagacttatcatataagattgtgtagtgttctaatattatttgagttttaatataagattattttattgcaaattagacttagtatgacattattgactacggattggtgcgactcctagcaattgactattgtagtcttaattagacttagcatatacgcacgaaacacttagcatacattactatttagtcttagcatgtaatattatttgagttttaatataatattactttatttgtaattagacttggtatgtaattattgactacggaattggtgtgacaagtagcaattgactattgtagtcttaattagacttagcatatacgcacgaaacacttagcatatacatgactattttagtcttagcatgtaatattatttgagttttaatataagattattttatttgtaattagacttagtatataattatttactagctagggttgtataatatacgtcacctagacttagcttatatcacgatttgtaattagacttagcacgtaagtttgtgtagggttctaatgtacgacatttacacttagcatacatgacttagattgttaaaacataaatgtctcgtgacttagcagatgtttcttgtatcaacagatggctgaccgcgatgaggaacaaatattgtacgatacaatcgcggagggaagcagccagtactggaatgaagaagaggggaacgaggatccaaaccagtacttgaacgaggaagggaacgtggagagggatgcggaggggaaccagcaggggcacgtggaaagggatgtggaggggaaccaggaggaggaggctagtggtagtcaaccctccgttggacagaagagggcacgcgggcaacgaggtgcagcgaagaagcttgagggtcggcacatcataacggaagtggaagaagatggacgtcctagtgccccggccgaagccgccaagaactatgtacgtcacagcggttgggttgtgcgggataacgtgcctgtcagtacggtgtactggcgaagaacaagggcacgaggagatcatgagagctttgtcccagattcggagaaagagatgctgtggaccacaatgctcgagacattcacccttcctgcgggtacagaggacaaagtgaaaaggtggactctgaagaaaatggcagaacagtttcagagcttcaagggagatctgtacaagaagtatatactgaaggggcagacaccgaacttcgacacattcccaaagctaagggatcactgggacgagttcgttgcatataagacaggtgaacaagggcaggcgatgatggaaagaaacaaagaaaatgccgccaagaagaagtaccatcaccacttggggtcaggaggctatagcgtcgcgatgccgaagtgggaggagatggaggctagcttgattgagaggggtatcgaaccggcaacagccaattggccggaacgatcgaagttctggtactatgctcacggtggaacgctcaacccagctgatggctcactggtattcggcgttcagatacgagaggctgcgcaacgactaacagatgcagtggaagcctcctctcagggcacgttccgacccgacagagatagggacgagctgacactcgccctgcagactccagagcatccaggacgaacacgagggaaaggggtgattccttggaagattggtttcaaggaggacatccacacgtacaggagtcggatgaggagcaagagagataccgaggcgaagattgcagacctagagttccgggtatcgagctacgaactcaacatgcaagaggaggtggcaaggaaggttgatgaacgcatggccgcacatcggtcccatgatccccagccgaccattcctcctgcaatggtgagcccgtcaggaaaccgtagcagctgcgcctcaacggggcaggtaggatcgcagagcatggacgccatgcaaacacaggacgaatcgacctgtcccgttgatgacatcactcagcggacaccatgtgagctgcatattcctttcaagaacttatcaataaaggtaagatttagccattccgctagttcctgcttatatatgttgattactaataaataatctctcacaacatgaaggtggcgtcgggcatggccatcccaacggacccttcaggtacttaccactgcaggccgattccagcaggatactcgaaggtcgaagttgagttggtcgaaggcgcgtacgaggacctcgagctggattaccctggaggagacggtgagacgcatctacgagacacaagccatgccattattctatggcgcaggcggtacatcatcctccctgggcgacaagcggcgtctcgtgcaccatctcctccggctccgccatctcctcctcatgatcctgcaccgtctcctcctcatgctccgccagcaccgtctccacctcaggctccagcatcgactcctcctcaggatcctgcaccgactcctcctcgtgctcctacacctactcccccgcaagctcctcttccggcaccttcaaagtcaagggcccccccagctgcaccgcctgcccacacaagggcaacgaagaaggcgaaagttgacgccgccaagaacaaggacccggggtacgattgcacgcaagaggagcttgacgcttacgttgcatcagaagtcaagagacaattcaagcctcgaagtccagaaaagaagattcctatagaccccagtgtcaggaacttcttcaggggtatgtctgcatctgtcaaggaggccatcaagctatcggactatgagcgaacgctgaagaaagcatcttctggaaagtccaaaccagtccctcagcttggagagcaaccaaaccaggagatcgagccgttggtgaccggtaaagaaatgacgatagaacaatttattactgacaccggtctaactacggatcaattgctaggagtcgcaccaatcgaaaaggcggaagtgaaatacatgtacgaactcggtaaaccgcttgtcaagcctgagctgctgcagtccctacccacacaaatgtacaagttccatcagctgtacatggagatgagcgccgccggtagagagatgatcggagcgaggatcagggacacggacttcttgcaaggagatgacattctctggatcaatttcaagggaatctacgaactataccagctggacgccctcgacgtctctattatgagttgctggattttgtaagtatatcgttcggttagatttcttactatacgtctcctttaataaattaggtccttgtatataagtagactatagaaaataatatactcccttttatcgttgtagaatggagattcaaagggcccgacggcggagggttttcgatactggattcatcgaccctcggagagtaaacgtcgcaatgctcgaccaatatccacaagaaacagaggacaatctcgtccatctcctgaaggcgcagcattacaagacgttcatactgttgccatacaacacagagttagtttaattttactgtcttcctacataccaaatttcattcccgtacgaacttgctaagtgtttcatatgtaatgcatcccacgcacattgcagattccactgggtgcttttactcttcgacctggaggcctgcaccgtcaacgtatatgactcaatggataaaaaagagtctacgtttgacaaggttttcgaacttatagacaggtaccgtcataagttcctttgttaattaagaaaatcttgttatgttaattgctactacgaatcatagctttaaactccatgtagggcttggtatcggttccgtcatttggtccgcggcaaatggagagaaagacttaggcggaagttcaaatttcctgtgagtacacatgctctatatttatatttctccgattcaaatacatacaagtgtatattaattagatctctcgttgtttgtcatttatttgtagtgcgcaaagcaaaagcagggaaataacttgtgcggctattacgtgtgcgagtattgccactgccttgcaaaccaaatcatcaccacaagagagctcgatgtacgtacaaataaattcaaaatttcattacgtagcgatttcttgtttaattactaatcaatttcatacattcatatagtttattcgcatgagggataacctgaccacacacaaggaatttatcacggcggttcaagaacaactcatgggattcatcaacgaagaaatccttgatcccaagggtgaattctactacgacggaaacacaattcaccggtccttagcttctgagctagcagcgagtactactacgtcgaaatgatagctagctagctaggacatataatggattgtaattaatacatgactacatatgtttctatatgcatgtgtacacattttctataatgtaaatatattttggtcatatatatatatatctatatacatatgcattaatttgcataacatatatatatgtgtataaatacatatatattatgcatgtatatacatataatataatataatatatatatatatatatacatatatatatatgtatgcatatatatgtattgaaacatatatatgcatggtttatatatatatatatatatataaactatatatatatatataaaccatgcagcaacagggccatgcaaaaaaaaaatggtcagctcgatctttagtcccggattggtactcccggtttggaaaccgggactaaaggggggttacgaaccgggactacaaagggtttctccaccagtgaaacataattagtttgtacttttgtttgaattgccatgttagattgaaaaggcacttgaagctgcaggaggccctaattacatatagagattaaaagataaatagacaaccaaataaatagacaaatagacagtacataaaatttcaagatgttcctacttggctcctagcaatcttgtgagcggtaggaaaatttataatctagttcctgcacactgatgacagatagaaaagagcaggacacactgctacagaatagcacagggaagatggccctataggtgtcataacagctaaaccagcacctatagtgcttttcctgcacacacacacgcgcctgaggggacaccaaaggcaagaacagacacattttgtgtacaataggtgccagtttttaattggaactgacacctatatttcctatcaaaaaatggtgtcggatccagctaaaaaccagcacattttgtttctatcccatcaaaatagtttataggtagaccaggatagaagtaatggttctttagatgaggaggagagccaaacacgtcattattttctccctccc

SEQ ID NO: 18611 - DNA, 4614 bp, Oryza sativa
aggggggaccggcgaaggtgtggtctggccacctcctcctctcgccccttcccatcgaccactggtgcttggcctcctctctgtctcaccccttttccacgctgggtggcctggtccaacaccgctcctcctcactggcacttaggagaggtcggatcgggtatcatccctcctcctctctgtggtgcctccttcccaccaccacttgggttggcctgatccgacactgcccctccctccagtatcgccccttcctaccggcgcttgtgtcaaaatttgtgatttctttgatttgtgcaaatgtggaatggatatgaggctgtgggatgtggagctgctagattcattgcctcgattcgagtcgatccattaagccgacatttttttgtgttcttgaaatttgaaaggtgcctgtttaggccccttcaagtccacctcaaaggtgctgcctgctaggtgctggttgaaaaatccagcacctaatgatggttcccaactagcacctgttgttatttttgtattagtaacccatcgcaggtacaacaaagttcagcatagagtatcacaattttcgcaactgatgccattgtcagccatttgaatttaaaatctataattatactagcaaactgctcattataaaaatgtggaaattatacatagtactccaatattatggccctagaagcctagaataaagacttcaagaaaactagttaaaggcatgtgctctataatatgtttgccaatcatgcagtccaccaatatgaaaatcaaatttctccagtcctttgaccactagtgtaatatcccaagaacaaagtttccagaaatgatgtaactaaagtgtcatgtgcaatttcatgttatttaaattgttttggcctttgtttggatatttcctgcattatgttgacgtcgaaaaatcttgtggcacatatgtacaagatatataataattcagaaaaaaaccatcataaataataaatggcatgaatagccttcttaaagggggagaccaaaaatggaaacattataaaccatataagagaaaggaaacaattacttgggcactcattcccaaatggtcttggccgagcaaaccaacatgtgatagacatttgattagggagctcacatataatcaagtgcatatattaattgctacaacatgtctatacgaacgttttgttttttttaacaatggggcgaatctcactaaataaagtaaaatgaagaattatgagttaagttttgaaatcagatagatataaaagctccatcacttgcaacatgtgcgttgccttaacaccgaaacataattaaattaagtagaaaaactggataatacacgttaacacaaaacgcttttattatctgcgattgaagaagtgttgtagtagttgcacgatatcactactgtaacctcttataaacttcatacgtgcatagttcagtctgaaagttacgaagaaacagtagaaagtaatagcatttaaggaagatgaaacacgcaaaagattacaataataagtaatatcgcacaagcaaaacacaaaccaagttatgaatcttgacaaatgcttgtctagatgtatagcttaaggagctagctacatctaggacaaagggagtagctcaaaaatgattgttgtcattcaaataagataaccatagcacaactagtgtagtggagcaagatcacgcgcattactaagtggacaagaaccgcgtattcacgatgaataattcttgacgtgtcatgcggatataaagggcaataataattttgtcatcaataacactgaaaatgattgaatgttacatttaccgaacacacactcttttaaaactatcttcttgtaatgaagttccatatagcataaatgaatgataaaacttttagcatctattaacggataaaaactgctactgcatcgccaaatagtttcttgatgtgccatcactagcacaaatcctcacacatatgtgacgggtcatcagtgacagctaagcagaaccgtcacggactcccttatcaataataggccgcataggcgaccgtttcagatgaagacccccatcttcagttgttacagatgacccctcatctgtaatggctccaaacctagccttaacatctctaacggctgtaggatgtagtcgtgacagatgaggggtcatctctaacagctctgcaaaatcaactattacagatgataccctcatatgtaatggtttctcttcttgagctgttacatatgagtatatcgtcagtcatccaactgttacaaatgacatgccacatttgtaacatttatgttctaatgggtgcccgagctgttacatatgacattcttcagctgttacatataaattacgtatgcgctagtccatacacgaggtgaagtgaacgatagaaattatgtcacccatagatttcttgaaaatacaggagaattgtatttcattacattaagtagaaagaaactaggttaaaatatataaaaaaccaggggagaaaaaaagatcccccaaaaaaaataaaagaaaagaatgcacacctcacacacatcacccaaaggcaatatctattaattgcccgggttaattgacctgaaattatgtcacctataaaaagaggaaaatgaaaatacagataccccaatgatttttcattgaaatgatctccatacatggtggtcgtacttgcattcattaatggaaagcagacaagagtaggggctaactagcatatggtgttcttacacaattaattgacgtgaatgttaaagcgggaagaatatggcagaaaaaaaaagcatgaaaaatggatgcatcgatccataatcgatgaaaaatggatgcgtttgcttgtcataacgacaagaattccaaagtggtcggctcagagggccatgcaagcatccataattgtaaaactgttcgtacatatatatgacaatctagcagggggtgtttgctgataaaagtgagcgcacacaggtatgtgtgtgtatatgtgtgcgcttgtgtagtggtatgtgcgcccacatgcgtgattctatcttcgatcccaaagaggaatttaagatagaaaactaacaaaagcaggatagtatatatgttcttttatatgcacatgcttaagtaatataatcttatctaatagaatacgtcacaactataatttatgtgaaatagaataaattaatacattgcgcacatcggcagagccagttcttaagcatagaatatgagcctaatagttctgtaagaggtctaatatcctactaattaacttattaccaaattaattaaatgattatattatgtaaaaaaaatgttccgggccactagccgtcgaaaccagcaagatgttgcaatttttgtggtggacggctagttgcttgcacgaagggtactaactaatagttaattcggttaatttaatttttgccaggaagctccaaatctaggactctagggggacatgcagcctgtgttgtggaatcatggtgtgggctgcgctagctctagtgattcaaaaaagctgtaaaagcactgtaggcattcgaaaaagctaggttacgaatatcttaaaatgcacttggacgttatggcagacattctatcaaaaagacaaaaatatgtcatcaatataatcaagagaagtggtccaatgacaagattttgttctatgtgtatgttggaggcataccacgaaggatcttcggccggacctgccgaaaccaaggacttaagcgacaagcttagactggaggcaactggcgaagatcgagaagggaaccgtgtggtcgaaagtctcatgacaaagaccatggctcggacactcagacttcgccgaacaagaacttcgtcagaaggcggtgtgggtgagggcgataaggtgaaagccttggcaggagggcccgggtttcgccagatgccgaacctcaccgaaaagtggctcaacgggccactgtgcccaggaaggtttcgctaagtagatgggccaagccatgtagcccaataagggcccataaatgtaaaggacacagtgtgtcctagatagtctctatcacaagaataaccatataaattcccctgtaaaatctaaaccctaaaggagagaatttgtaatggagctataaatagccctctagtgtcttgtaatgggggatcccaaaaatttttcgctaagtaatacaattgtttttacttccaaccactgttaagagaaccacgtctttcgacgtgacacagttgtctattcgacaacagtgtacattgtgcaatcgaagaaaacaaaagttgtaaagtacaattccatgcataccatttttctccttttatgtcatcgtgccattggaattttttcgctgagatcgactaaccacggagatgagaaaaatacttgtctccctttattaaataagggattgttgcgggtgagataaaaaatatctatggcaacgagctgcccgtaccacgacccctatgaaaaagatttggtaatttcggaccccagcaagcaattattgtgtccaaaaattttcggctaatttttcaatttttataaatatggttaaaatgtatatatactcaatcaga

SEQ ID NO: 18612 - DNA, 2066 bp, Oryza sativa
ctgcaccccggcttgttgagcaggatgaggctacgactgcatttagaacccatcaggggcactatgagttcaaggtgatgccattcggccttaccaacgctccagccaccttccaacgacttatgaacactatattttctgcagtgataagaaagtttgtgttagtctttgtagatgacatactgatctatagtaagtcgcttgaggagcatgttgatcatctgagaacagtttttcagttgctgcagcaacatggtctctttgtaaaagctaataagtgctcctttgcccaacaacatttggactactcaggtcacatcattggagttcatggggcatcaactgatccagagaaggttatgactgtacaacattggcccactcccaggaatctaaaacagttgaggggatttcatggcctagcaggctactatcggaaattcattaaggggtatggtgttcttactaaaccattgacagggctactgaagaaggaagtcaaatacaaatggaagcgataggagcagacagcttttgatgcagtcaaaatggcattgactaaatcactagttctagctttaccagacttttctaagcaatttgtggtggaaactgatgccagtgacaaaggaattggagcaggggcatccaattgctttcattagcaaggcattgggtgttaaatcacaaatgctttccacttatgaaaaggaatgcatagcaattttgttggctgttaacaagtggaggtcttacctgcaacatgctgagtttgtcatacagactgatcacaagagtttcaactgggtacaagtatgcaacagaaggcctttctgaagctcatgggacttcaatatgtgattaagtataaaaagggggctgaaaatcaggtggctgatgctttgtcaagaaggggagaagaggaatgtgtggcaatcactgtcagcaccccaaggtggatggagcttgtggtagaagaataccagaatcacccatagaccaaacaattattggtatctttgagtttgaaccctgaaggggaggatgggtttcagttagtgaatggtgtaattcgattccatggcaaaatttggttggggcatcatcctgaagcacagcaagctgttcttttagctctgcataacagtggagtggggggacatttaggcattactgctacatatcaccgaattaagggtttgtttgcctggcctgggctgaggaaggaggttcagacctatgtgtccaatgtgaaatctgccagcaagactcctggattgctccagcccttaccagtaccactgcaagcttggcacacggttacaatggacttcgtagaaggattacctaaatctggggtgtatgacacaattatggtagtggtggacaagttttcaaaatttgctaagttcattcctttaactcatcctttcactgcatacacagtagccttggctttcattcaacatgtttatgatgtgtttggcatgccccaagtgattatctctgatagggataggatattcactagcgctctatggcaagaattgtttcggttggctgatgtgaagttaaacatgagctcctcttatcatccccaaaccgattgtcaaatggagtgactcaaccaatgtttggaagcatttcttcggtgtactgtgcatgctacaccaagcaaatggtctggatggctatcacaagctcagcattggtacaacacttcatttcacagtgtgttgggcaaatctccttatgaagtactatttgcaaggaagccaacccattttggcttagtggacacaggtagtatcactgtgcctgatattcagatttggttacaagagcgtgcacagatgaatgaggtgttgcaccagcagcttactcgagcacagcaaaggatgaaacactaggctgataaaagaagatcataacgtcaatttgcagtgggagactctgtctacctcaagttacagccatttgctcaaatgtctgtggcacaacgttcatgtcagaagttaagttttcgctattttggtccttttactattttggaacaaattgggaaa

SEQ ID NO: 18613 - DNA, 873 bp, Oryza sativa
atgacgcatctgctttgtcacccttggtgaaagagatccgtattctcgggcctatgtacctacacaacatgtttcctttcgagaggtacatgggtgttctgaagaagtatgttcgtaaccgtgctcgtccagaggcaagcatcgccaagggtatggaacagaggaggtcatcgaattttgcgtagaatttatcgaagaccttcgcccaatcggggtacctgaatcacgccatgaagggagactacggggaaagggaactctcggaaggaaagcaataacgacggtagacaacaatttattccgtaaagcccatttcactgttctgcaacactcttcattggtagctccttacatcgaggagcacttggctctagttcgcgccaggaacatcggtaagtccgatgcatggattacacggcatcacattgatactttccccgcgtggctacgacaacatctcatgggtaacgagtcgatcaaccaacaacttgccttcctagcgaggggaccgtctgggtcgatcgcgacattccagggatatgagatcaatgggtacacattctacacgagagcccaagacatgaagagcacgaaccacaacagcgctgttcgtgtcgatgccatgggacacgatggaacaactgccacgtattacggtgccatcgaggacatatgggaacttgactatggtcctctcaaggttcctctgttccggtgccaatgggttaggttgactggtggaggcgtaatgattgatgacagtgggatgacaactgttgaccttaacaaggttggatactcagacgaaccttttgtccttgccaatgatgtaacgcaagtctttttcgtgaaggacatgtctagcaaaggaaa

SEQ ID NO: 18614 - DNA, 10403 bp, Oryza sativa
gattcctttttttctgttattggagtataagtagcagtagctaagtttccatttgtaagttttacaattcagtttgaatgaaagaaaccagaaaattgccccacaaattctctctctctcgcgaagttctgaaactcagtaaaactttgctttctctgttctgaattccttttctgcgttcttcagttttctcgtctgttgccgtgcccgacgtatgcagtgtgcgcacacggtgttcgatcgggtgactcgtagctaacaaatcttgtaccagttcgtgctatttcttcgtttagtgatgcagccatgtttatttgatttgtgtactaatatttgcaacaagagaaaattaacttgatggcgctacttaacttggtggcaagtacgtacgtattgaacaatgaatagctaaaattagattctgtatttttgttattaattacttatttcattttatgttgcaagaaaaaaatgtaatgttagtacttactccctccatctcaaaataactcaacctagcaggagatgtgacccctctagataaaggtagtccagattcattatactaggagagatcaaatcctctcgtaggttgagttttttttgacggagggagtaattagtatgaacctataagtagtctggccaaatgattgagaattcgttgtcaagacaggaaaataaagaaagctgtcgtgatttccatgcatatcgccgtcctcatgttcttcacccaaaaaggcttagaaatttggaataacaaagcatgtttttcttttaatacgctccatgcgtgacagaactttagaatacgtgtatattttcaataaggtcattgcgtaattctagtaggagtgtgttgcagaatatttacaaatactgtcttatgcttgtcgtttactctgacatgtattttatccgacgacctgttgtatgtgtgtaggcggtctgtttcactttcttgcataagacaatcatgttcttaagtttcaacacactagaactcaaagatccacagttttgatgtgttagtcttaaattaatatttgtgttgttactgtggtcgttaccgagtattagctagtgctctaccttctctctaagtagaacatagtctaatttaaagaacttttttttttgatttttttgtttttctttttttttacccaaaatactactaggcaccgtccagtagttttaatttaaagaacttttacggggtagtaacactataaaaacgatttcgtgtacagagactttatattgcagacggaccataactagtcgcgtctgggaagataggctcattttcgcttgcggtccatttatgaggaccacacggttcgatttttccgtgtggtcctcttaaatggaccacacgcgaaaatgaacatattttcgcgtgcggacctattaagagagccacacataaaaatacccattccctctttccctctttcccactttaaatcttctcctatttctttcctctcctctctatctctttttctcctcactccccttcccccgcacggtgtctctcatctcctcactcctccctcctctcctctcctcccgacagcggcggcgggcataggcgatggttgcgcacgacgacagtggcaacgcggcggcggtgggtgtaggcgatggcgcgcggcggcctcctccacgcggcggcggccgaggcgcgggatccagcgggcggcggccaacccccgcacggatccggcgggcagccgccctccccccacgcgggatctagctcccctcccctccccttccttccctcctagatccggcggaggggaggggcgttggcggcggtgcggccggaggggagcgcggatcgggcggtggccggcatggaggccggcgggagcacggatcgggtggtgggtgtcgcggaggcagccgctgatgacgacgagggtgggagcagcatcctcggctgacgatgacaacgagggcgggagcgacgtcgtcggccgacgaggaggaggcagcggctgggagcggcgttggcgctgccgattctaggactttcaacttttttgaattttttcagatttttgtttttccgtgtgggcgatataagcacccgcacgcgaaaatccgactttcgtgtgcaggtgccaaaaatcgtgatttttcatacccctgggtgcgtgcgggccacccactcgcacgcgaaaactgattttgaccgcacgcaaaaatctttctcgtagtagtgtaatcggtattaggattaattaatttgtctcctgatgtaaatgtacaggtaaaattatctttccatgctagtatttggtgatggcaattctgtatattttctcctctcaatcccattccttattcttgttatccttcaccacggcaaggcgctgctagccatcatgagttcacgtacgccgccaccaaccattacaatggaaggactaagcgcacgaaagtactaaagtaccatttttaaaattttgtgataaatttctaaattgacattatactaccagcatatatattgtaccgtaaaagaagtcggaggtttgtacgtactgcagtaaagtatttgcctttagtgcaaaaatgcaatgtataacaataattggtgttagttgtaactgggaagagacaaattattaaaaaaaacataagtacatagcaggaagaactagtaggaccgaataccgatcaactggatctattccggtacgaaaatattgcaagagagatataaggaaacaatagcataattatattgaatcatctttcaatataatataaattggcttgggaggcatagggcatagggcgtgtttggttagttggaagattgctcgcatgtgcggatacctaaggaggttgtttggttgcctgcacaaccattggggcctagaacctcatgtgagaaatggcctctatagctaggccctaaaaaaggctcaagttgagcttctctccctatctaggctgggctcgtgcaggtggcgtgacatgcggtgcaaaccgtagatgcaagaggatgaggggtagttttaaaggtatgaatatattcaatattaaactcatttttatatatttaaaatggactatggtaattcaaatggttcttaaaactaacatatggtttaaagcataggtttgataaaagaacataagaatcatgattggtattggcctctataacatgtggggcctcttgatgcttttaaaatattcttgcatgtagttatgttgtgatgttagtattcttaacacggtcttgacaatcaagcgtattgctcacttagtcgtaccgatgaaaatacatcacgcgataagatgataaagtgcacacatttactatattaatatacgaaaacgtttcatgttttaaacttgggaccttgtacatatgttatgtaacataattatttttgacattaggcaaacattatattacccggcttttagaagaaagccaaaaaagaaacacacagagccttgttacaggaaaaagaaaaacaaaaatatcgaaacatgaattcaccaataataaaaggggaaccacacgagatctaaaagtggatggatgcggagacaaggatttagacaggttcagcccctctcaatgagaggtaataccctactcctgtttagggatttgaatccgccgggtgtagtatagatctgacgatcaggttgtgtcaggccccctagagggcctcctgcccaccttatatacgatgggggcaggattacaagatagaaaccttaaccaatatggcatcggtttcctaaatctaatttacaatattatcaaaccaggactttaggctgtttcataatatacaaggaaacataatacccaagtcatgatccgttacatatttgataggtataagctatcccctataaccagtcggataaccatgccgtgtgggtatggggtacccataatctctacagtagcccctaagaccttcacagtcgaaagataatcttctctcaaaccagattactccaaagccgagtgcttcaatcatctttgccatggtctcctgagtacttttaccaaatctgaagactgtggagggctgaaaaataattaaatgtaaacttaggtgcatcgactagatgcacctaataggtgtagcccccgactatgtggttagttgaacaaactaagcatatagtcaaggagtaaataatccaaccaactgagtggttttgataattatagtcaaccgagtgacttgatatcaatatacagcatatgcggtgtgagtctccgaataacatgatccgagtgatataccaactgctttgtaaaatacgatgcgagcaacctaaagttgtgtacatcatgaaaaattcacatagcaaaacagctatagaagaagcttatatgcggtgaataaagaaatttctaaagtattgggcatacaccatgcgcacactggtttaacaaatgtgcttaagtctctaaaagacacaccgtttcaccacacccggaaatatatggcatacgtggtgtaaaatccaagtaaataaactcataaaggatttaccaaccgcctggaaaatgaccaaatatataatcagcctaagccataatattggtcaataaaaatgcacacttacgtggcaaaaagcaatgatattgtatccaatcaattgctgtataaacccaaacagcgccttgactatatataaaaaagtcagcagggcagctataaaaaacttcactattgggcaccttttaaaatacattgtaccaactcctaaaaagttgagtaactgtggtataaaaggattttaaggtattgggcacttgatcacgcgcactttggcctaagcaaaaagtgcctaagtccctaaaagaacgtgacaggccacacctgaaaatatgggctgtagacatattaggcctaggccaaaaaatatgccttcgacaccctttaaaggatgacgcatgtaatatgctcccgagtaataaatcttccgagtgatatagaccaagtatagctcatatgaatagcttctgatctgagtgattatcccttatgggatacttcaaaatagatataaaagttgaatcccgactggtgcaagtattcggttgatagcccttacggggaataacgaatagtccagacgttgagcataagaaatcgactcacgaccataaattcatgttgaatgtattcggaacaagtccaaattgaagatataatcctcgcgcttgtattgatgagcccctaagcatgtagcttatccttctgttgtagtcacaattgtccattgatagtggctgacgtggtcggcatggagacgaaatgaccaacatgaagatgatatcacccatcaaagctgacgaagatgttggtagtggtaaagacaatgacacaattcaaaggtgatgaagtcgcatagccatgaaggcgaagaaaccagtcggcagcaaacaattcaaccagcagtgaagacgaagcacccagcaatggcgacagagttgcgcagccatgacagcaaaataatcagtcgataacagacgaggcacctggtgaagaagacgaagacgcctatcagtagaggcataataagccagccgtgaaagtgaagactccatgggcggcggtggaggcaagccgagataatgacgattagcagcaacagagatgataagctgtgaagatgaagttgccaatcaatagcagaagagtaggctatgttgaagaggcttggcaagatgttgatgaagatgacaatgtcattgatccagtcaatagcagtgtagcagccaatgataataaaaatgatgctcatcagcgtttgtgtagtaggtcagccgtgaaggcgaaataataagtcagggccgatgaagcagaggtgctggtgattatgtcagtgacaataatccatcaaattgttgagaagatattgaaactcgagtagtttccttgatgcgagcgtgtgcataatgaagactgatgcaacaccctttgatttataaagatggcagtagaacttagagttgtagatgttgcagatgcttcacttgaaggaaagtagaaactgttgtccaactcgttgaatctgagttaattggttgataactccaacctcccgaatatgtagattaaatctcaaacttgatacttgagaaatttgaagtaaattgtggcggcatgaagaagccaaaattttggtgaaataattgaagttgctgaagtagaacgtctgctccgaagcaaagacgaagaaaatgactcattggctggttaattgattgtttcatgttgagataacatctgtcaaattttgagagtcttgtatttgtgtagcccctgactctttggttagttggtaaacaactgaacatagagtcgagaactgtagcttcttgtcgtcgagtagtcattgcttgagtgaagatatgtgttgaggatgtccgagtagaaatattgaagattggaacaccacttgttgtagtaaaataataaggcatcatatttggtgacgcatgccaagatgtcgaaactcttgtagtcgtcgtggttggtgaagtagcaaagcttgcgaagtagaggcaatagagtttgtcggtgccgaagacaatgaagatgaagtagctccaccatggtgacaaagttgcatagccatgatcacgtagacacaagtcggcggcacaaaagcaaaccagtacgaagacgcacgtgaagagagaaacaccagtcggcggcggcttaaccagcgatgacgatggcgccagtcaatgatgatgaagacgcacagccgtggagccaaataaaccagtcggcgtcagacaaggcggccggtcagtgaagacggcggcataataggccagccgtgcaggcggagacaccagtcggcggcggcgaaggcaagccggcggtgaagacgtagacgcccaataacgacggcataataagccagccgtgcaggcgaagactctagtcggcggcagcgaaggcaagccggcggtgaagacgtagacacccaacaacggcggcacaagaggccagccgtgtaggcggagacaccagtcggcggcggcaaaggcaagccggtggtgatgttctgactgatcacttttatgcatatctggatctggatcctacagaacaaacatatatgatgagtagtatctgatgtaaatataatactcgagaaaaattcaagtattttaaaatatttataaatatgtatttcttctcttgtcaattttgatttccccgagcagatgactccttacgtttacacactctgcccgactagtcatagcccccgagcactgggagtcggcctaggcacttcccaaacatgcatatgagtgacatgagttcgtcattaatggaacaaagtttcacggatcggagtttactactcaggtacttttgcaattgtttagagcagaaaataaattatcttatctctatgcttttgatttattccgagtaatacttagcaccttgtgttactcggtccatccaacgagcccccaggtgctaggaattggcccaaaggcaactatccatcggcaaaccaaacggaaagcataggaagatagaactccataactcaataggcacttttgtactcagattatgtcgcaagcaatcaagatagatattatgaaaattgttgaaaaaatatgatataacatctgtagcccccgactcactagtcaacggcgaaccagttgacgtagtgaggcagaggaaaaggaaaatatcatataaaggaaattaatgatgacttagctttataatattccccttggtgatggcagaggtggccaatgtgggaacaaagtcatccatcaaaaacaatgaagacaccagtcggcggcaacgaaggcggtcgacggtgaaagcgaaggtgcccatcaacggcggcataataggccagccatgtaggtagagacactagtcagcggtggcaaaggcaggccggtcggtgaagacgtgaacacccatgaacggtggtgtgaccaaccaacagtataggcgaggacaccagtcggcgacgacggaggcgagtcggcagtgaagtcgtaaacgcccaacaacggcggcataattggccagccgtgtaggaggagacaccagtcggcggcgacgaaggcaagccggtcgatggagaagtggacgcccatgaacggtggtgtgaccaaccaaccgtataggcgaggacaccagtcggcggcgacgaaggcaggccggcggtgacgtcgtagatgcccaacaacgacggcataataggccaagcgtgtaggcggaaacaacaattgacaacaatggtgccgtagcattacatgtaaacaacagaaaataccaagagattaatatgacatttagagatcaatctaaaacaacaataagttgaaaggaaagaaaccgatgaattgacggttctagttgtggccgtgacgatatttgccatgcggtcagctcaaaagaagtccatgcaaatatatgcgtgattatatagtaaattgtgcacgttgatcgatggatcaactcatgcatgtattcactccaggaaaatcgcagggaggacgccttggcagcagcaccagttgcagcgtggaggctgccgtggggcgcatcaggcgggtggattgatctgatctgctcgggagatgacgtcatgaagtcgaacaagctgcccacgatggtccttgtttgatacggagtacatgaatacatgccaacaaaatagccaaaaaagcattaattaatttgtaattagaaatcaatccaattagcaatagaaaattaatgatctggatataattaaggtgcatgcgcgcagcatccatgtaattagttgatcaatctggttagcagcaatccaaaatcgatctcccgtagagacgtatgctaggtccaccaatgcatgcttgccgtcagcgaaagggccaatttgcaccgatccgacaagcccggctccggcctccatggacgaagattccggggtgggttgctcccgcaggaaaatcgcagggagacgccggggcagcaacctcttcgtcggcgatgatcggcatggaaatcgcaggcggcgcagcgtggtcgatggctgctgcgtttctttttctcctgataggttgttaccagcgatggccaccacaaatcagttggcttcgacgatattgaagattggttccatcgcacttcttgatagggaactcgacgcactgcgcgccaactgtcgagacatgaattcggcaataataaaagaggtagcgtacgagacctaaaagtggatggatgcggagacaaggatttagacaggttcagaccctctcaatgagaagtaataccctactcctgtttggggatttgaatccgccaggtgtagtatagatttgacgatcaggttgtgtcgggcaggattacaagatagaaaccttaaccaatatggcatcggtttcctaaatctaatttacaatattatcaaaccaggactttaggctgttccataatatacaaggaaacgtaatacccaaaacatgatccgttacatatttgataggtataagctatcccctataaccagtcggataaccataccgtgtgggtgtgaggtacccataatctaaaaaaaaaaacacagaaagctaggatcaccagcaaccatccggggcaccgagacttatggatcctaaagaacgaaacaccacctcataaactcccaggaacgctaaaacatctacctcagcaaccataaggaccttatagagacccttcttagactagtgcatcgacaggcaacacatccttaggtcgcagatcctccaatttgcgcttcatcttgtcaagcaaggaagacagagcctttcgatctttttcttttaacagcaacatccatctctgcatcagcgaaatgatcctgaacattgcctgcaagggggacttgatcaatttgttttcaaacacaaaatcattccttacaagccagagcccccaacagcaacttgcacaaacgaaaagacccacattcctccctagtttttctttaagaaactttaccccatcccaaatggtagaaggagcaagccccccttcaattacttcagttatgagaacccaaacaaacttagctagaggacagttaaaaagtacatgattggttgattcaatgtccaggcaaagcttgcagaatttatcccccccccctttccaattccttttgacaagaagatcagcacaaggaattctatccctcccagccaaaaaaaggaaatgtttaactttcaaaggaactttgcaaccccaaatctccttcatatccctgtctacaacacccccaaatttcatcaatctatacatagacttagcagaaaacgttttgtttttttcatgaggccaaaccacagagtctggagaatc

SEQ ID NO: 18615 - DNA, 10917 bp, Oryza sativa
  unsure (1)..(10917): unsure at all n locations
aaactggtaaatggtgcgttttttacaaaaagtttctataagaaagttgcttaaaaaatcaaattaatccattttttaagaaaaatttagctaatacttaagtaatcacgtgctaatagactactccgttttccgtgtggagaggatgggttcccaacctatcgtatcgaatgcagccttaataacacctcctgttgcaattgcaaccaccggtctcatcaccaagaaggtggcacacagtacatgtattcttaaccgctcccatgttacacatgccttaatcagctgacaaaagattaaaagctgtcatgttagttagccatttagctaaaaatatgcatattcctgaaaaaaaaaagctacaaatatacatagcatatatagctgtaacaaatcccaaccctactgttctaccttctattcttgttggagaaaaagatgatttttttttgaccaatccattggtggtcgacacattgagctctgcctccggcaggcatctatgacggtcaattccattttgaccattgcctggtgtgagtcctttaaccatggaaggcatattggtttgatcgaggttctgtaatgaaataatgaaataaagtgttttttacttggcatttctgagttctgatctcaaataaaagtttacagtagccctgtatccatttgaatgcttggaattgaatttgccacaatccttataaactttaattagcattgcacatccaacgattaaatttgattcttggtcatattgtcatcatccaaaatgtatgaggagtttgtgttattttgcaagttagcatccagttttgctatttttgagatagcaactgctccttctgtccacaaatataatcgttattataccatttgtaatttatccacacatataatagattttagagtactactcatatcactcaaccatccttatttaatttttgatacaaggacacattgttgatggatgttttttatttgaactatagagatagacatagcaaaactcattgaattaaagtagcaattctgaaatgcaacatcaatgcagcaaaaaatcagggcatttcaggaaaaaaataacctagtcaagcattaagtacttgcatttatatgactgtagaaaatctcccatcgtgcttattgccatggacaagaaagctttcatatcactgcaagaagaaagaaaaaatatcgccataagtagctgctcttctctctatgtgttcagatcagatgactagaaatacacccaacacataccgtgcatgtgttacctagctgaaaccatatcaaataatgcaagttgccatctctaggcatgaaaggagtcaggcatgtcgccataggactctattggagcaaaggtcaggtgttatcaattatctggacaacatgccgccatagcaggataggatatgggttgttcgatgctgctttggatgagtacaagttagcacgatctcccagtcagtgtaggattcgcaatttcagactcaattttgaaccaaatgataggtttttgtaggattagccagacagtttgccgagtctctcaatttggattttttttttggttgatgttcagcaaacaacagttccaaatctgaaaacgtgttctacatattgtaagagtggcattcatgcattggtcatggtcatgggaggcaccggggatctctacagtttgcaatcaacgttgcatctgcaagcacagcaatttaatttggctattgaagctacattagtgagtcccttcgatcaaccagcagaaagccagaaaagtacacagcaatttatatttccctgaacatgaagtaaacgtgcaacacacaaccagcaaattctttttcctttggcaacgcacaggcgactactggcagtactctggagtctggacaattacaactctgcgatcttaatttgttaatttcaatgaatgatgcagcaaggtataaaattctgttcaattatatgattagattattattattatcaatctaactgcgtctggggtcatccgtctaaactggatatggcgaacatcctcccaaaacagtttatgataagcatggtaatttcatcggattcaaaattttcttgatttggcactgtgaacaaacagtttatgctctgtttaggagcaaaataatctttaggagcaaaataatgtcttgtttatgagagagaattgctacatgatgtttcccaaaatcaagtgatggaaatatgccttttgatatcttagttcagccatcctaacaaaattaagctttgcaatcgttcgcagcactacttttttcacacacaactaacacatacagctttctcatgacaccttaggatcaacacacttgcgttaaacaaatacacctgatgaaatatttatcggaatattgctaaccttcgtgcagattttgggtcacttgatgtacttctccattagtgctccaagacttctcctctaactccggctacctcctctttccctctgacgccgacacccttatgtaggaccgaatagtaaaaactaagccaaccaaaaaggggtgaatggttgtagtagccaaaaaccgaaacatttagcggaattaaggccccgtttggtatagctccagctcccaactccaacttatctagagctggagctgaaatggtacagattctcatttttggagcggggttggcaaagctgctccacaaatttgtactacgagggtggagctggtttttctgctccacagctctactccatcccaaaaaacctactaccctttaatttttttaatgtatttacacaaaaatgccactgaactacccctaaacaactccttccattctctttcctcatattctcccatcatcgccggtgagactggcccgattcggcggtgaccggcagcgtgcgggctggcggcagggcgcgggctgctggcggcgcatggactggccgatggcggcgagcggcggcggtggcgacacgctggctgaccggcggggcgacgccaaccaagtgttcgacgaaatgactacaagggacgtagtggtgtggagctaacaagtttagccaagcactttcacacccacctcaactcctataggagctagctcctactagagttggagttcacagttagaagtcggagtttggaactctaccaaacgggacctaaaagttaccctcaactcgatgtagactggcctacccggagtagatgcgccgcggtctgaccgttcgatgtactccggcctgaccggtgtagtacctccggtctaagcagccaacacgctgcatatatttacttgccggtaggggacgaaattgacaaccctgctgggaagggacacaataacaagacctatcgccactgaatctgtagagaacacacaaacatgccacccatctatggcagagttacaaacatctccagggaaaacatggtacccaaaccgaagtcacccaaaggtctcatggatttcacacaaaggtcccatcagtggagaaaaaagtaggcccggtaaaaacgccctcaagtgggatcgtctctcatttccatggacacaaatgtattcacactggcggagaaaccgtctttactctcagtttgtaacaccctgtagtcccggttttccaatcaggactacgaatccgggattatagatcgctataatttacttgtatagtatcacacactaataattatataatataaatagaatataacataaaattaaacataagtataatataaatagaatataacataaaattaaacataagttttaagtaaaaataaattgaacataagttcacatatctatctattatatactaaaagtccattaacctttctacaaacgctcccaagctgtcacgtggcatcctacaaactcttataagccgccacatggcgttctaataaattaggaaaaaaaaaggtggacccactaattaattttgccaattaaatctccattaaaataaaaaaaatctggtatcccaccaccgtacgcacacacgtacacgtactccctccacaccctccgaactcccccctattctcctattctcccccctattccccttaccaactcacctatccggtacacggtggttactcattaagtgttacttcctccgtttcaggttataagactttctagcattgcccacattcgtatagatgttaatgaatctaggcacacatatatgtctagattcagtaacatatatatgaatgtggacaatactagaaagtcttataatctgaaacgaaggtagtattattttgtctatgcctacacgaatcatttaacatatatttaatactctagatgacttcaaatatggcactatctcttatcaacatatattttgggccgtcagagtttttcctaactatttcctcgtgctggaagaaagcatcaggtaatttaaatatggatttatctctgaacaacatgacttccatttgactgcttggatgatatcacaatcatattaaccacttaatcttgatcccttttctacttgaacccacgcagcacttagttcactgcgcagaggttcttggaacaccaatttgttggggattacaagtatggacggcaagcgcatcggaactggatgcctcttcccctgccacgaacaatcgatgaggaaaccgctcaggaaagggaagcttccctttgtgcttgttgtgggtggtagaagcatcggtgaggagcaacctcagctttatctacactgcaatcaaatggttcttcctgatatcccagtggctgttcccaggctgtagtctgcaggtgctaatcccgattcctcagatcttgagaatctcaactctgttgctcccctgcaattgcatatgcggttgagttgggaaattccgaagtatgtgaagatgtggagataataagaaaattgtcacaaaaaacacggcgggggggggggttaatttgatctgtatcgttgcaaatatgtctatttagataaatgccattacaattcgtctattcgtagccgtggtactgaaattttacaaagttagaactatgtcatcgccgtcacgtttttcattttcttccccatatgcacgtgggacccagtgttagattcatcttcttctttttgctctctcttatcatcttccttcactctcccttatcgccttcatatgcaagttgttcttcaaatatttgtttgcgatttcttttgtcttggcagattcgaatcggagaatggaggttgcaggttactacgaaccagttcgacgaggaggcgcgtgcagcctattcggcggaatgctcaagaggaacgccatgctcaggccaccgcgccatggcgagggggagatgtcccagcatggaagggggaggtggaggcgacggcaatggcgatggctaaagtaacgcagttttgctattttccacaatatccgcctcttcttttcaaggttataggcggcacttttctttgtgattgttgctagcacctctcctagctaggaaggaaagagttgaagaggtcatactttactactgttcatgttatttgttttagcgttatcaaagttctttggtacaatgatcagattcatagttccacgttccaactatatataagtacctagctcagtatgatgtttcatggtggagtagtagtttgtagtaaactatgaaatagtacctctgtctcagaatataagaagttttagagtcgacacaattattaataagaaagtcggtacaactaaatgggaagaggttacgattggtgaagtgaatgatggaggattatatatggttggttgagaagggaatgttagtggataagttgttatattttgggtcaaatcctgagagctaaagttgttaatagagagtattaactaaatatttgtatttgctacttgtagtggcctgacaaaaacatgttgtgccaatatttgtcgtcaaaattcaaaattcattgtattgagcaagcaggcattatgctcagtatccctagctaagtcaacttaaatatatattagaatgcaaattatagaatcactaactggcggctattgagtctgaatacaactcaagtctcaatttcatcttaaattaaataagagtttctcaagtcaaaatggatacacaccagtatcctgtggctcagttaaatctatagtatccatatgcgacatccttgagaattttctaggtaatgaaggtgtagtaagtgttggactaccggaagaaacttggagaaagacatactagctcccaggtttcaaattatgtgtcgttttagtttttttctaagttaaacagtcctaactttgactaccaatttctacacatttgtatatagtttaacaacatgttatgaatgtatttcttgtagtcaatctaaaaacataaaaattttattgatatattacacaaatttatagaaaatgattgtcaaagttaaaagaatgtttgacttgaaataaaactagaacgacaaaactaaaacaagtaatttgaaagggaagaaatatagtattatctctcaaaagatctaataaataaaaaaaggtagaatcatgatttattcgtttgtaaaggtttaatttcaaatcaatgactagcttgtacatagaagaaaagtagtgtacttctacaaagacttgacaaaaacaaaaaagcagtctcacatggcacaataattagtttagtacacttgacgacccatattgccagtcattgcaaccattgaccaattcccacaatgtaggacaataaatttggttggagttaggaaaacatctggcatcagcattgacattttgtttcaagttcaaagtcatcactttgaattaagaaccggtcagcaaaaaacagtccagaccagtcgctatcctctgttagctagcagccttttggcaccaataattcaacttttactcagacctgctatctcactatatataagatagtctcatgggtttcatggtgtgccaaattgtacatgcttatttcaaaaactcagctcaaaatggcttctaggtctcctgtgctgctgtttgcgttgatggtttgtcttgtcatcgtctcgcagggtgtcctcgctgcaagggagcttgtcgagacaaccaaaggtaacatatatctctgtttatacttttgaaaaagactgaaatcttggtatgtcggtggtcaccacaatttcataaatatttaaaatttaacaacttttgcctgaatttaaataaatttgaacaaaatcataaaaaaatagaaaaatccggaaatttcatacgagatagttgcttccgcggggattcaggaatttcaatctgaaatttcaacccctgcatgtatccgttcgtatcaaatgctaggattttctcgattcctatggccagtcttctcattctgaaagtctgtacatatattggaatttcctcatacttggtgtgtgtcactcgaaccttttgttgacataatgtttgtcattttgatttctggtcatcagagggttaatgtactgttcttaaaaacatcacaaggttcatatatatagtgtgttctgcatgtgccaccaatttgaatggcatggcaggatcgaatatcaacacatgtcattatctaactagagtttgcctgctgattttgcagttgtggtagatggaatgaaagttgagcttcctgaaggccgcaaaggtgcagctgctgtctcggggtatggaggcggctggccagggacatacggacactatccatgatacaattgtatattctggatatataaaaggattaatttagcttaaccgtgtatatgtgcatctattttattgtgtatttagaatgtgttgtatcgttataaatctttaattttacacatgtatttaaagacgtcctgcgaagcaatcggagaagacaaaacggaacaccagggactgaggaaactagaagccgttaaagctcattctttttaagctagccattttatttgttactataaaaatcatttttccgggcatgcagtcaaaaagatttgcacaaacaatgaacaaaccacccctaataaaagacatgcgaaaattatcaaaattttcacaagcgatattactcgcatgtgaaaattaatttttgttggttggtcatctcaagacacctgcctgtgataacattgttttggaaataaatgaactggtgctcacaaccatcgcagcggaatgcggagagccgttgccgtcattgctgctgtcagggaggcgatggactagatacatcatacaagagccttgtggtcgtcctcacagacttggttcccccaactccagtacgccactgctagatccatgagactcgtagtcattgttgcagccttagctcccccacatccactatgataccgccacatgcatccaggagagcctcacgcgcggtaattattgccatagcctcgactccctctcccctaatgcgttactgccagctctaggagactcactcttttcgctgtagcatcgactccccatcccccatggtgccagctggtcatcgtcgtagccatgactccccctcctccactatgctaccgccacaagaatccagcagagcctcgtgtgcggaaattgccatagcctcggctccctctcctctaatgctatgctgccagctccaggagactctatgttatcgccatagcatcgactccctatcctccatggtgtcggccgatcatcgtcgtagccatgaccccctctcctccactatactatcgccacatgcatcaaggagagcctcgtgcgtggtaattgccatagcctcggctccctctcctttgatgcgttgctgctagctccaggaccatctctgttattgccgcagcatcgactccccatgctccataatgccggccggtcatcgtcgtagccatgactccccctctcctccactgcgccctcgccgtagcatggtgtaaaatcacttattgtcatatagtctcaactttgtactctgtatccattttttccccaacacgtgggagacctgatagtttaagagtaaaacttttactcctacaaattctatacttgaataaaactagcactgtggccaaacatgaagtctatcttgattgtatgtttagtttatatagataaagccttcccaggggctagcttaagaggcttgcttaagaataagaaagatatatatataatatatttcaaaatagtagtgtggaatgtatttatggtgattccataaatattctatcctaaaaatcgaaataatagggacttttcaaagatttggtactgttactaattcataatctggcatatacatgatgaaaacatcattcttaattctacaataacttttataatagcgtttctttttcttccaatgaagtttcattttttctaaaatgtaccctaattttgggcttagtcctgataattgattcaacttgttaaaagatagaacttggttttattttgtcttcaacaagttcagtaataagcataacaactctattgttccaatggtgagaagaacatatattagctttttgataaattttcaaacgaataatttcacagaattatttggctccaatatttgggtcataaccatccttttgttaatcagatttgcaaacttttccacgcacaggtatatatataccaacgaattccagaacataaaatggccattacaagtatggaagataaatggtgcttcctgtcgcggagaatcaaatgcatgcatctcgagtactaaaactaaagatttataagtgtaccaaagtaacgaaagatatatgtttaaccnnnccaggaaaatatatgtcgtttaacaaaatagaaagacgaacatgttggtcaatcccaacaatttattaatccattacatgtagaatatatatgtggcgtgttcgcaagtataaatcatggacgaggtgggctgggggcgtacgacgccggcaagccgctgccatacgacgatccatctacgttgattgcaaaaccagcaaataaataaataaattgcgattgtagcctctcagtacttggatacaattgatacaacttgtaagagaaaattttgacagtacttgagcaggtaccactggtggagaaaccatctttcgtcggtcggccgatttccacaatagtcctggatgcaataaaaaccggggctaaagatgatctttagtcccggttcaaaagggtaacgggcatatttgatctttagtcccggtttgtgttaccaaccgggactaaagatcatctttagtcccggttcgaatgctgtcaggtcatgtcaggcccccccgggatccaaccgggactaaagtcgtaactttagtcccggttggtaataccaaccgggactaaagatcccggtgatctttagccccggttggtgctaccaaccgggactaaagtcccacccctatatatatgtcttcttcctcctccagctgcccgagcaaacttcaaaattttttcaaaaaagaggggaggtcatgccaaaatttctattgaatttattttggtgattacatacaaatcggaggtgcctaaaaggtttgcaacttcatcctccaatgtttttttttgtcatactacatttgcacctatgttttgcacactttttttgtctccaaaatttagttgtaagttgatgagagagaaaatgtgtgtggggaagaaagaatatatagaaatttagtttatttgtaaacaaggttttataaaatagttgagaaggaaaactccagtgaaagttaatcttaaataatagaaaacaaactaaaataaaaattaaaagaagtaaaacacattaaaattagtttaaaactttacaaatagtttttaagaattatttggtgtaatattttatgattttgggctgcaggaa

SEQ ID NO: 18616 - DNA, 23310 bp, Oryza sativa
  unsure (1)..(23310): unsure at all n locations
cctttttctgtatttttgggcatatgtttcctgaccacttctttacacactcctcttgtttggtatgtatcctattcatgatttggctcctaatcttttcaagcatggataaaattggaagctctctggcttcaagaatgtacttgttgaatacctcggaattgttgttgagtagaatatcacacttggggaaatcactaaagaatgctctgcaccactggttgggtggtatttcctccaggtaggcataagcatctttgctaagagacttcatcttttccatgttaaattcccactctggtatagtacttgaccttgcaattgcccacaactgattctttagagtctcccctttgtatagaacatgaaaattttggtacaaatgcctaacgcaaaatctttgttctgaatctgagaatttatccctcacagctggtaccaatccctacaaaatttaaaaaggaagggtgagtactaatccattgaacagtaaataattcaaatattttaaaaaatgacaagttgaacaaaatcaaatatgatggaataaagtcataccttctgtctgtctgtcatgatagtataaggtccagtgttgtcgataaggagatcttctttcaaagtattcaaaaaccaaccccaactagctctactctccacctccacaacagccatggctataggatagatgcagtcattaggatcaatgcctactgcagtcaacaaatgtcccccaaacttggttttgatgtggcatccatcaaggaatatgataggtctacaaccacttaggaatcctcttttgcaagcatcaaatgacacatagcatgtatggaagcacatattttgtaggttcaagaaaaatttactacctggatttgaagtcctaagctcttgtccataatctcacaacatatcgtattgtgctatttcatcaccatatatcgctttcatagctagtttccttgctcgacctaatttatgtcttgatggtgttacatttagttccttttgaactactttagagaaacttttgagtgtcatcctatcattgtccctaaagctttcaacatatctatttgcaagatacctggcagttacataattcaactcccactccttctgacatttgtggccatctatatatctttttacataagacaattcgtcctgctgtcctcagctacatccaacatccatgagcactcttctttactttagcctcaatttttttcttggtatttcttgtaaatttaattgcgactctattcttcacactgtattgttttattgcttgcctaacttcaatagcatcagagaacaacatcccaaccttaaagattggtgactccatgtccacagcagccacaaagttcttaaatttcaacttaatgccttcattatcttcatcagatgactctggaagcaacaagccttcatcatcagagtcatgttcaggaagcttaacaaccatcttgctgctagccacttcttctatctcgacacagttgtcaaaagcatcatcatcccccttgtcagcctcataatcactgtcaacaaagtcaggatctacatcgatgtcatcgtcatcgtcaatgtcatgaccttctataggtttaacatctgaatcttttcgattcattgtagacctctcacggctagccacgataggtatagaagcaggggtagaaagagcaacatcatcccaattgatggattccagaatgtcttggggatccacatacaaaagcaatgtcctaaaccttggtgctaatgcaaccatgctgttggtgcttgcatcagagttaattctccttagcccatcactgaatgtcttcccaggcaataaccaataaaccttggccttctcagacatatcatatcctagttgctcaataaaatcatcaagccataatgaagaccatgtgtcactgtcacaataatcaaaccaatccaccttttcatccaaataaattctgctactaccaactccagagaaaaaaccaccatgatgtagttcagttgtgaactgttcatccttgcagcctacatcacaagacaaatcattctgatttgtcaaattgtaaataattatctgatctgttataaaaaaaagattataaagagtacatattcatgattagagcaaaaattatttctaatcacaaactattcgtgaaggattacttatatgacacctagccttataaacacccaagcagtggcggaggcagcgccgggccaccacaggcaattgcccaggctccatgcgtacaacaacactgctccaatgcatatacaacatattactcattaaacatatacttaatcactttgtctcataggttataatggagattaattaaatgaataaacagaaacgaggaagcaaggaccaaaccatcaaactgtagatacagacaccaaacaacacaatcacaagattcaagaaaaaacagagaaacatgcaattaccggtacaaatcaatgaaaccctaactttatcaacaacaatcaattgaaccaaaaacgaaaatatgtaatcactagggagttatttaccataagaaggaggggacgccccaagaattcgccgagtcggcgccatcccagcgcacgaggcgatcacgtcagatcagttcgtaggtctgaattactaagcgcaccagtttgggatgatctcagatcagcgtggctcatatatgatgccctcgcaaccggcgcagaggcgatgcagttttgctgtgcactcgctgctagccaccgtcgcctctcgatctgttgaggtgagtaaatcacggacagaaaaacagaaccaaggcacatatattttttgctgtgttaaaacaaaagaaccatttagaatataaaaactagtaggaggttttttgtaaaatgagatgggatatcactctatgatgctgatgctaacgtgggactttgtccaagatggaaagctgacgtggcaaaaaatcttatgtggcagccttttgaaccataaacgcacccacctagccaagttgttgcatcggtatgtccaattttcaagttctcgcacttaatcgcacccacccgccaagttcttgtaccgtcaacgcaatttactctttaaaatatatggaagtaaaaacattactaaacactaataagtattatagggaaaaatatgaagtgcaaaccctatatgtaatgcaaacgtagaaaataccgttggatcgaaaaatggacgcccgatattcgtccacgtcaacatgagttaaaattttactcgtaaactgtacagcaaaagaatccctgtgagttaataaattgctctagatattacgtttatagaagaaatattgatcagttaaaaatttactatcacataccgaacaaaaatacccattagtaaaaatttcaccaacggcatgaagattttttcactggaaggatcgcctgtcacgtgtatatttcattgaaacgtacaccctccgtcccaaaataagtgcagttttgcactattcacgttcaacgtttgaccgttcgtcttatttgaaatttttttatgatttgtatttttattgctattagatgataaaacatgaatagtactttatgtgtgactaaatatttttaattttttcacaaaattttcaaataagacggacggtcaaacgttaggcatgaatatccacggctgcacttattttgggacggagctagtacgtaccacggcagccaacccctatgagtaattttttaacttcaattacgcccgctccaagtcaaattttataatgagtaatttttttactcagttgtctgttgctgtgggaggggagcagggtggtcgataatcacgtgtttctctcataaaccaactactgtaactgatttagcccacggtaatttttttactctgtttgcacctgcaggatggggatgggtggcgggtctgtacgctggggatgcgggctcccgctctgagtggcgccacggtttagctggcgcgcatcgcctgtgtctcgcgtcacgtagcgtgaccttatatatatatatatatatatatatatatatgtatatatgtatatatgtatatatgtatatgtatatgtgtatatatgtatatgtatatatatatacatatatgtatatatgtatatatgtgtatatgtgtatatatgtatatatgtgtatatgtgtatatatgtatatgtgtatatatgtatatatgtataaatatatgtatatacatatatgtatatatgtataaatatatgtatatacatatatatacgtatatatgtatatgtatatatgtatacgtatatatgtatatgtatatgtatataggacactcatatggggcaccatggtgcccgggcaccatggtttcaaatgcacaaaattactcaaatttttcaaaatttttaaattgtgagtatatacctagttataagaattcgattcatacatatatctatcaacaaaacaactcaaatttaactttatttcacaattcatgattacatacctaactaattatatgtatggatgctatatacctagaatcaaaatctaacaaaaacaagttcagttcaaacttgctttgaactagttagtaaagtagttaatgttaatacctaaataattgaaaaagtttcatactcatttgaattggttatatactcaatttcaacaatggtgcccgggcaccatggagcaccaaacaaatttactatgtatatatgtatatgtatgtatatgtatatatgtatatatgtatatatatgtatatgtatatatatatatatatgtaaattaactggtgctacatggagtatgggctccaagattcaaattgagtatatacccaatttgaatgagtacgaattttttttaaatgtttaggtatgaacattaacttctttactaacaagttcaaacaagtttgaactgagtttgaactttttttttttgttagattttggttctaggtatataacatctaaacatataattcgctaggtatgtaataatgaattgtaaaataaagttgagtttgagttattttgtttttaggtattggtatgaatcaaattcatatacctaggtatatactcacaatttaaatttttaaaaaaaattgagagattttgtatgttttataccttggagcccgggcagcatggagtcccatatgggtatcctctatatatatatatatatatatatatatatatatatatatatatatatatatatatatatatatatatatatagagagagagagagagagagacacactatactatactacacatggggtgtagtgtattaaaacacaacccacctcctctcgccgcacctcccacccctacccccctcccctgctgcatcccacccccatccatagtatgtgtaatagtaattttcttactaccccaccaaacctaaactaccggtaatctatttactcacctattttgcaatatgtatattaggatgcaacggaccatcccatcctattttcctggatctagagtccatccactcccatgccggttttcccgcatcgaccaagagggagagggcacgggagaaggctggcggtggaagtgtcctccagcgacgggcggcggacgatgggcgaaatcggttaatgacgagtgaaatcggtcggaggtggcgatggtcgcgggtcgccgacgtcctttgcgccgagccatggagaggtgaggtggttctggctattttcctcgctcgatctggtgctcccttccccaccccgcccatgaatcggcgtcgacatcgacaggatctcttgaggaggagggggcggttgacggcgggatgcggggaggagcatccggctgcgttgaccacaccctgattcctccctcgaaggatctggcacggatcaggcctcccatcgctgcctccctcccacagcggtggcgtcatgatctgtgatgcacgatgataatgagggtaagcagctgagtccatgcaattttgaactttttactttgcatctttgttgttttaccgatttgctgctgcagttctgctaatttgctcctgtattctgattccttcacattctgcagtctgcactcgtgccggtcggcagcaggcgctggagaccctggccacgcaaagcaggcatggggatggcggtcaggaccgatggatggatggatgtcaattcgtatgtgttccaatgaaagtcaggatgttttatttgttttattttctctccatgttctatctactcaatcaatctctataggcaatagctacttgtttttctttgaggaagcatagctgccatgtttgatcaattaattgcagcttatttgcgggcgccagatatgtgtggtgattgcttgtgttcgttgatgcgctgtataacatacatgcatgttccatcgatccattgtagatcaatttgtagtgaatgctagatcattctgaatttatgattattcttttcattaagaacattcggtccatttttattcttgaaatcgtttttcatctgaaaagatggcaggttttgtgtagcttataacttgtatgttattaatcagagatatatggatattttagcctgaagtatcccaattacctattctacatttttcagccaactgcattcttaattttcttttttgtagaatgtcatcgatcacagatcgggactaggcaagcccaggaactaccgttaaggaaacataatgtgacatccatgcttgtctgaataaaaaatgatctgttggctaaaagtaggcatgaaggaacctaaactggtagttcaattttttataaagcattttatttcttcttcggcgaatcatatctcatttagagtcatttatgagtgtaaattaaagacttctcttagatgatgtaatcgtttttgtttatatccaggtggctgtgggatgcctctctagatgttcgtgggtgatggatatctgtcgatgggagacctaaggatctatagtgctttgtcggctcaacatcgatatgtggcactagcgccgtcttgtttgttggattcgtgcatgtaatagtaatttagttactaagagacattaagaatcatcggtgtaatagtaacttggttactaagagatttttttggcaatatcaatatgttatgttgagattggtgtaatagtaatttatttactaagagaaatcttgtgatgatatatatggaaaatcatatatgaaccaaagttcatatgaaccatgaatctcaaccgtcggtgagttccaagaagcgtgcccaagtgcacaatggttagcaggattagggctggacgaaaaactcgtagctcgttagctcactcggctcgtcactagctcggctcgactcggctcggctcgttgtgaattcctaacgagccgagccaatgttttagctcgttagtcataacgagccagctcgagctggctcgcgagcagctcacgagctaaacgagctgaggtcaaaagacagcccaacaaaaatatttggaggcccagcccaactagacatcaggtatatatgcatagaaaccctaaatccccatcccattatcgatctagatcctagcctacggtcccagcgccgcaccctcgctccccccgtctcacttcgagcctccaacgctcccagcgcctactcgccctcccccatctcaccaatctcgcgctgccgacagcagggtcgtggccggccgcgggctgccctccatatctcaccgtcggtcatcgcttggtgaatggccggttgaagacccgagcctatatcctcgccgccgtcggcatcagtactgatctgaggccgtcaacatcgagcaagcttgtattccagccgttctgttacttctttcattgccgccaacactgaagaccggatctgttgttttctctttttttttgttttattggcttgtttcatttgcaattttcatagttactatttgatattttggtacttctttgggtgaatcgctgattggctatagattggaacatcatattatggatatatgcatttgctttatttgtttctgccatcttgctcactggattgatatgtgctagctgtgtactgactgaaccttgcagttttattgctctggctcacgagcttaacgagctggctcgagctttccaacgagccgagccgagccagcatcctagctcgttaggatcggctcgttatcctaacgagctagaccgagccgagtcgagcctagccgagctggctcgctatccagccctaagcaggattgagagacggtaacagtactactatttgttaatttacacttactgccccgttagagcaaggtcaatggtatagccaactaggctccaattcatctatagccaatctaatagccaatttatacaatagttgcttactatactattagcatatggtcccaccgtcatatacacattgcgtcttgaagtccgtgctgcagctgactacagatttgtagcccgctgctcttctctcttatcttttatcttattaaaatatatttacagctggcttatagcatgctattgtacctgctcttacagtggacacgtcagggatcgtggagacatgtcagcttggcccactgacacaaaatagaaaaaactattcacgtacagtagctgctcccttgtcacgctttaacactctgacgagcatggctatgacttgtcttctctcgaacatggctgttgatatttgttgaccaactatggatgtgttttagttatttagtgtaaagtctttaagtatacgggcacatatttaaagtatgaaacatagactaataataaaataaattataaattccgcatgtaaactacgagacaaatttattaagcctaattaatctgtcattagcaaatatttactatagcatcatattgtcaaatcatggtgtaattaggcttaaaagatttgtctcgtaatttacatgttaactgtgcaattgttttttaaaaaaattattagtaataaaaaataatttatgtgtagcatcatattgtcaaaatgcttatccgataaaatttattagtaataaaaatattttatgtgtaaaatatttgtacgtatatccttaacaattaaaaatcaaatgctataaataagccaatcataaaatcaacttctaaattaagtttaaaactttaattttattttttaaaagttaaatgagaacgtggttaaaggatgaggacatggctgtgtaaccccctcctcccggcacgtataaacgaaattcgttttattgcatgactatttaagtattaactattttttttaaaaaatagattaatatgtttttttaaacaactttcatatagaaagttttttataaattacaccgtttagcagtttgaaaaatgtgcgcgcggaagacgagagaggtgggttaggaaaatgggcaccggtagagaaaccatatttggtcggttgcccaaaatccacaataatcccggttcgaaagaaggcaggctgtgttagaccccccactatgataataccaaccgggactaaagatccaattttaatcccggttgcttataacaaccgagacaaaagaaaaacgaaaaanaatcgcactgcgcctccttgagaggaccaacagccttatcctctcatccactcatctctcctcctctcccttatcttctccaatcttctcctcccttctcatcttctcatctccttcttctcttcttcccccttccttcccttcccctctcctccccctcccctgcggccgtggcagatccctccccgacacaagcgtggccgcgcgcggcgagcggcggatgcagccgcggcggcggctgggcggcgggccggcgaagggtggcggcggcgcaggcggagcgtgcggcagaagcggcggcggcagcggccgtgcagcctggcggagggtggcggccaggtgacagtggtgaagcgatgaatttgcttttgagaatttgtgatgtatttgatctgtgcgatgtaaatatgtgatgtatttgtgatgtttctttttagaatttgtgatgtatttgttttgattatctgtgatgtatttggatattgtggatttgtagatgatcgatctgggattcggagatgatcttttgttctgtgattttggggatgatttggggatatggtgaaatcaatattcaaagtaaaaaacaataaaagaaaaaagaaaatactaaccagatctggtttcatttttagtcccggttggtaacaccaaccggggtttaaaatggctccatctttagtcccggttggtaccaaccaggactaaagatcgatttttagtctggggtatttgaaccgggactaaagataacgatctttagtcccggattcgtagttccggttgaaaaaccgggactacagggggttgcaaaccgggagtaaaaaacgtttctccaccagtggggggaagaacacagcctattaagtcaggagctttgggacggtagcaacgcccatttatttgacactcttaatataattaacaacaagattccctataaaatattttatagatctcgtcaagatttattgaagagtttgaaacgtagttcaaagagattttctaaaaattgatccaagatttataacaaatatttggacctctgaacaatattaagaaatcagtagtcaaccaccaaaattacggatttcgttgaaatgcataattttgataaaatatttgacctcgtatgacctattttaaaggaacaattgcttatttgaccccgttttgagccctaactaccaatttgaccctacttttaaaagtttgcttatttgaccctccttttcaaaaacgaagctcccgtatgaccctgttctgttaagggcatctaacggtgttaactgaagcacaaaatgtctcttttgcccttactcatttgaccctattacatgtggaacccacccgcagttccctcttctcctctcctctcttctctctactcttgtattctcttctcctctcctccacggggcggcgactgatgggccgcggcggcggcgctctgagggggctgagggagaggggacggagggagggagcggcggcagcggtggctgacggagggggtgagttgcggcgggggcgcacggagggggcgagctgtcgtcctggctcgtggagggagggaggaacgacggcggtgcatgtgagcggaaggagggaggatgcggcggcgacggcgcaagcgcccggaaggagggaggaggcgggagagggggccggcgccggcgcaagcgtgcggaaggagggaggacgcggcagcggcggcgccagatctgagggggtggcggcgccggctccggctcttcgtcgtcgtcgtcagcagggcgccggcgctggttctggctcttcgtcgtcgtcctcgtcctcgtcagcagggcgccggcttcgctcttcgtcgtcgatgagccgccgccgccactcctcctcgtcgtcgttgtcactagagccggtgccggctcgtcgtcgtcgtcaccagggccggtgccggctcattgtcgtcgtcaccagggcggcgctgatctgagggggtggcggcaccagctcgccgtctcgccgcaagtcgcagccgtcgccgcaaggagagaaatgtggatagggttgggtggatgcatagggttttctaagggtattctgggtattataaatattagttgtatttctttttttattttaaatcaaaacttaacggactaatggaaacagggtcagacgggagcttcgtttttgaaaaggagggtcaaataagcaaactctaaaaagtagggtcaaattggtagttaggattcaaaacggggtcaaataagcaatagcccctattttaaaatttataaattcaaaaatcgcatcgttgcatggctcgtgtgaccacagaccatccccatgcgcacgatagaattgatatattttttataagaataaattatatatagttcattttaccttcgacctagtttgatactatatacgggatggattaatattgcatgctcttggaaaataaaattgttgcacatgctcctgttgtacggcaaagatgtaagtacccatgttaaatactttatccgtcctaaaatataattaataatttaagattgaatgggacgcatcctagtaccacaaatctgaatagctcactaatttggtaatataaatgttgctatatttttttataaacttatcaaaatatcaaaatgtttgacttacaaatgatttaataatatgaaatggaggatgcatgtgaccattgcagagcacatacatgtgacgacggcttgcctgggaaaaaaaatgttcttatagggtacgtataaaatattcagatagacatgcatgttatatgtaggcatgtagcttgaccagtaccgagacattaatttggtgtcatgtcgcaggtgtactcgctggtggaccaaggaaacaaccaacgtgcagtctctaaataggagaggaacgggataggtacatgttgcatcccattagaacataatggacgtgatccatcctgataaaatgcatacacgtggcacactgatgagcaaggagcatatgaaccgtggttcatattatctatctatctatctatctatctatctatatatatatatatatatatatatatatatatatatatatatatatatatatatatatagacacacacgtgggataaggagaataaatgataatttggtcaacaactaatgaattgtattaatttgaccggtgtattaaaaaactaaaataatagatctgccctggagaaaaggatcggagaggttaggaaaacgtacagatgggttgatgcatgccttttcttccgccgtttaaagatccaaacgcacctcctgtgctctactcacaatataattaagattgattatcccgccgattcatcataatataattgagtagtacttctcaacttccatccttttttctgtttgctggtcggtgaacatgcatgcgtgacatgcaaactcaacagtaggccgtgcagatgcaattcgaattgccgtctgagcgagcgactcccggctgcgctgaagtttccgatcgtgttaatggaaatggcaaggcgaaagtcgctcgcgttcgatctactcgcggccttccgttccaatatgctatctgcctctctctcgattagatatatttacatgcctcttccgaatacatttgactgaggaataagttcactttgggtccctctatttgtggaaaacgcttcgattaggacgtccgagacgagcgcaaatatcggacgtccttatgaccttatccaaacctctcgaccgcctctccccaccattcccttcgttcctttcattttttctcctcttactctctctcttctcaaaaagtcacgagagatgccgagggcgaggcgtcgtcgccgtcgccggcagccacacggcgacatcggcggtggggcaaggtggtgcatgcataggtaggaggtgctgaacctcgccggcggccacaagatggcgatgaggcaaggcggcgcgagttagggaggaagcactggacctcgtcgatggggggcgtggtagggaggaggcgatggacctcgtcggcgtccacgggacaggcaacgcaggattagggaggagtcgcggtggcttgcagccggtcgccggaattgctatactccggccgccgccgtctctagcccgggatccgcgccggccttcctccgccgcctcgtcactcgccttcgccaggcgtgctgcggcgcggccgctctgggtgcagctcctgctgtcggtggctcagtgcaccgccaccgccgtcgtctcctgttcgggatccgcgccggccgtcctccgccgcctcgtcgctcgccttcgccaggcgcgcggcggcgcggccgctccgggcgcagctcctgccgtcggcggttcggcaagtccctggcttcgtcgtgggcacactgctgcggcggcggcggcgggtaggagccaccgaggccgacgaggccgtgtagactgcgactgaggtgagaggggcttgcttccccatcccctcggagggtgatttgtgcattttgttgcacaccacatgtttttttttgttgcatatagtgtgtccgtgatgttgcaatccgtaattttctggatgtttcttaaatcaatactggatgatgttgcatttggtctcttcgggatgttgcatatattggttttttgttgttgtagacaatgttttttagtgttgcattcgattgaaacatgttcgataatgcggtgaaacatcttcgataaagcggtgaaacattcctcaaagataaaacatcaagaaacaattcgtgttgaaacattttttttgagcgatgaaacattgcaacattcattcaacatactgtgaacattttttgagcgatgaaacattgcaacattatttaatatacagtgaaacatcatccggagattacgtccgatccgtagctttccccctatttgtcggccagtctgattttcgtctctcgatcgcaaaaccggataagacaggtcccccaacttacgaaaccgtttaactaagatccctcagtagtatttgactcggttttggctgaggtggcgcgcttatgtggcaatttgattccaaaaataataaaacctatagagcccacatgtcagtttcacccacacaataataaaaaatggtggggcccacgtggaccccatctgtcatactcactactcttctctctatcccctctcattctctatcctctctctatccccctctctctctcccctgagaatggcgagcggcgagcggcggcgggcggcgcagaggggcggcggcgagcggcgagtggagcagaggggtggcaggtggctcaccgtgtcgaggtcacgccccagcacgtacgtcctcttggccgccgtgtcaaattgctcccgcagccgcatcaacgacctcgtcatggaccgtcgccgcctcgccggccttgcgactaccgccgccgccgtcgtcaccttcgcgaacccgcacagctccgccgatgcctccgcgctcgccggcaacgacggcgcctcgccgtcgcatatcgccttcttgagcctctcccaggacagcctctcgccggcgggtaggatggggcagcgacccaagaagcccggcgaggcaccgcgtgaccacctcggagccgatgcctagctgccgccgccggcgtcgtcgctgctcccgccgacgcagccggagccgcccatccgcgccgactgcctcccaaagccacatctggataagagaggcaattcaacagtgcttatcccaaaaagatcaaggaactccaagaaagcaaacagtgcttgtcccagaagatcaagaaactcgaagaaattgagttttggaatcagggcaattcatgtgcccatcacaccaaggtgagatcagtagagaagaaaaaaagagatagatcattgagcttttcgtcatctgtttatatgttattgtgtgtcagttcattttgccatcaataatgctgagaaattctggtttgtattggaacacagccatggaatcaatgagcattgaggagtacatcagcacgctgcactgaaggcgtcgttcccgcggaattgcagcgaatgatgcaccggaggacgtcgtcggagatcgagctggcgatggcgggctacttcgacgccagcgacgaggcgtcggagatctgtaagcagctgctgacgaacatcaagaacacgtagagcaactacctgtccatggacagcttcctcgccaccatctccgacagcgtcgccgctaccgatggcgccgcggcgatgacagcggcagcgccgctcgctgccatgcggagcaacccgttcagcgacgtggcgacgcggagtagcttccggcagatccacgacaggtactcgtccattctccatgccatcaagtcgagccacgggaaggcggcgaggaagctgaaggtggtgagggccatcaggaaggtctcccgggcgtgcggcgccgcggcggccgcctccgtcgccgtggccgcgcacctcctgttcttcggcctcctcgtcggggtgcccggcccgctccttcccgccccactccggccgcggccactcctccccgtcgctccgccgccgacatcgctcggcctgccgctccggtgggagagagaagagggagaaagatgatagagagagggggatagagagaagggtagtgaggatgagaggtggggtccacgtgggcctcacaactttttattattgtgtgtgtgaaactgacatgtgggtcccataggttttattatttttcggatcaaattgccacgtaagcgccacgtcaaattaagaccgagtcaaattagccacgtaggcgccaccttagctaaaatcgggtcaaatactaccgggggaccttatttaaacggtttcgtaagttgggggacctgtcgtatccggttttgcgatcaagggacaaaaatcagactaggcgacaaatagagggaccaaaagtgaacttattcctttgactgaagataagagcagagatgggctatggaaagagcccacaacgttaatggtagatgggcccatgatgttaaagcattgttgcatctacggttcgattgaattacttacataatcaatggttagatttttctcctaaaaagtgctcaattagtataggtataggtatagatagatagatagatattggcccaaataatgtcaatcgaagcatgttgaattcttctctgtatatccagataatttgtgtcctctgattcaaccagtgcagccacgccgacgcgacgagcgtcaggaaccctacgcagaccagcgcgatggtggttgttgctgccgccgtcgatcgccgccgctccaaccggctgcaggtggcggtgatggtgtacggcgagaagctcccgatcccagagattgtggccatcgacgaccagtcggacggaaagagctctctcctggagggcggaggcagtgtttaattttttcggtttggccgattctatcggaggttgatcatcgatataccgcaatttcagaaaataaatttcggtccgaaattttgaacaaatgttggttaaatttgaacaaaatattaccaaattcacaaaaaaaatataaatttccggccaaaataatatgtgtgtgttgttgtggggggggggggggggtccgaaataaccgaaatttcattctcaaaccctgcctggaggccctccttgccttccgcttcaatatccacaaggtcgggataggtacccaccgccggccgtcttctcatcctccagatggttcatgacgacccaactgtcctcgatccatagtgccactcttccaggtgcgtgtttcgcttccttccctaggcggcgccctccaccagtggtagctcctgtggtgcctttctagctccccagctgccaccacatccgcgcgcacttcggccccgtttggacttcaaggtctacttctcttttcacactgacaagtgaggctagacatctgccatataagcgaaacaggggaatacgtaatctgcatatgtggcagataaaataatggatgttacatattctggtattgaggataatggatgttaatcaaacccggttttgtatagtttaggagttaaaatttctagtattaagaataacggatgttaatcaaacccaacataaagttgaaggacggtaagtggacttattccgcataccgaagataagtgaactggcccaattaaaacattcaatgcccacactgtacgatgttgtggagatatcctcctagtttagtggctgtgggtataagatcaatatttgagttgaaagctaaaaacttgaaaaagtatgcattgttatcacgtgtttggatgggaaaatatgtggtgaaatctatacaagtagtagaaacttagaaactattggatagatgcctgagatttttgtccacatcaccggtagtaaaaatatgatgtagacaaatcttaagcatccatttttagatccaatcgtaatttctaagtttccacaaatatatgtggtttacagtatatattttccttctttggttattctaaaaaaatcccacatctagtaaaattatgatggattcaatacactttgaacatgtttactattctcatttatttagctagaaatgttatcatggatattaaggtcctctgggtttagatttattggattatactttttagccgactttttggtttacatggtttataaagggtaatagcaatgcgtcacaaatatttgccagagctcagatgccacgtgtgctaaggaacagtgatagacacaaggctcacaatgcagcaacctcacgtggcgtccacaaaaataaaattttcttttttttttctccacttttccccatctatctccctttcctcgagatccacgcttcctttcttatccccctctctcacgccttcccctatctctcctatcatgctcaggcaccggcagcgacctgacgccgctctctctcctctcacgctcgggggcggccaggcaaagcggtggtctctgcggcgacggagctagctaggcggagcagcggcccagacagagacagcgccgtggcagccgggcggagcagtggtgggtcttggtgctcgccggcgcaatagtggtgaggtcagcagcgcaatagcgggggacgatgggagctcggcgacgcggtagcaggggacggtgggagctcgagcgcttcccttcctcctcttctagccgccgcggatcgaggggcggcacggccggcagcgagcggagatcgtcgtggattggggggtagcatggctggcaagctccggtgggtgcagatcgaggggcgcagcgagcggaggctgttgcgaaggtgggggctgcgacgagccccgtggtggtgcctcctctctccccgttggcgcgggagctcggactcggcgcatatgcggcttctctagcgagcttctcccccttctctctctgtcctgctttctcgccatggttgtcaatgcgattctttctcagtgaaaaagctgttttcttctgatgaggttctcggagccaaacaaggccggcgcgaacctggtgaagacatgggccccaccccctcatctcctccacacatgcaatctgcctagctggagagttgaggctataaatgccacgtagatgcactatgaatagcctataagccagtggttttgaagcgttatgtttaattgttgagtcccgtctcccctttatgagaaaagaaaactaggagagtcttatggctttcaaaagaaaaaaaattgcgagttggtttaggcatagatcttttgacttttataagctatagagtacaaagatggtctatgtgttttatggaaatttactttttatgagctatgctactgggaatgaatctggggtgggagccgatcacgcagaaagcatgagctccaactgtttatggagtgggagacgctgcagttgttagaaactcgctaaacaggtccttagttttgtttttcgtgggagacggtggtggttgtagattgtgtgcaacatgaggaaggagcgaggttgatggacaacttaagtggtaagattagtatctgcaggagtgtgacacaaggagtaaatacaatccctggtctaaacatcattaagaaaaatatatgactaaaacatacattacatatatataggttcataagaatagcacactataggggctaccggccggtgtgtccagtttttagagccttcccttcagggagacaacaatgacagggtacatagcccttcctttctcaagatgcttggcaacaagggggacatacacctggaagagctcgtcaacgatggactccccgaagtggtccgtgatgagcggcttgatgacggccctgatgctgcagttcgcgatgctgtcggcgctgcgggcgcagtcggccaccgcatcgccgttggacttggagtcgtcgtgggggtcccaactcgactcgaagacgcccgtgtgctcgacgtcgaagaggccactctcctctatcagctcagtcacctcgtccaccgatggcgcgtagaacggcaggttgaaggtggtcagatcctcttccttcacgcgcccctgttggcacaagattacacctccttatatactccctccttttctaaatgtttgacgccctgacttttttaaacatgtttgaccgttcgtcttattcaaaaacgtttgtgaaatgtgtaaaactacatgtatacataaaaatatatttaacaataaatcaaatgataggaaaaaaattaataattacttaaaaaattgaataagacgaactgtcaaacattttttaaaaagtcaacggcatcaaatattttgggatggagggagtaatttcaagtgaaggaattctgaacgggtttgaacgaaagtagcatggctagaaaaaacgatttttcacagcgaggtttataaattttacaggaggatcttatttttagctgtgaatatctgactacgaagttatatagagagggatctaattttccaccgcctgcaaaaaattattaattttcgcaagcctgtaggtacatgcagaggttatggctgcctgaaaaatgtgttttggctgtctgcaaaatatttttttctagtagtgaatttgaactaaatatttatgaaataaactgcacatgatttgtgcatgcgctccaaagaagtccctaatacttgattctgtctttatttgacattgagacaattaagtttagatcttccggcgtcaaataaaaagtaggaggggaaactatgctaaataccttttggaccaaaatttggagagcttcggcaagtaattcccacatggtgtcgacgtcgccatgcgccagcatttctgagctctttcggcctaggaatgttagcaccatgcagccgccacttacgagttcctctgagcgaagtgcgaggaacagtgagaagtcctctttgaacttcttctggaacaatttgacgacatgtgatggcgtagccttcccgatgcagatgttgcctttattcagatggacgccacttgagagctctttagggacctttcaccatggatttttttcagggaggattataatgtaatgctgatcattgatttatataatatcaatataaaaagacaaatattacatatcactaccaggaaaaccatttgtggaggtagttgataactgatttatataggcggatctataataaatatattattaaccacctgtacaagtggatccacaactgcttgtgaaaatttctgatttttcattttcatgggaaaaacctaaaaaatatttataacttagtgagcatttatacagcaataattactcacaaatcgcacgatttttcatgcgaaatatagaattcaaaccgatatcctctcattcacgtgtaggctacttaccagttatacagcatttcaaaactatgggagactttatgtccctaaaacaactatcttaactatggttcaagtcctcaatcagatttaaaatgggttttctatgaattttcaaagtttggacatcatacagaaccgcctgtaaaaataccttattttcaaaaaaaaaattgatatgagagtttataataaatatatttggctaggtaaacgatctcaaacgatttcaaatttgtgaagactgcacgtttagctacatttaatttgtcatatacatgctatgtttgtgtagttgtgtgtaggggtccccttccggtgagaaaaaaatgttgtgcagtcttataggcgatcggatttcctcttgcatttttttttgtcaattttgggataatttgatcatatgcagtgtgtaccttggagcgccacatgagggcgtaggaacagtggaagaggtggacactctggcaagggaagagcctagtgtagaacgatcctggtagaccagcgatgtagtatggtggctccaacaatctctccttccggtcagcaagctgcttgagctgctgcagcgaccggaagacgtagttaaagtcattgccaggtaggtcattaaggaagaactgtagttccgtcttttccgggtagccactagtggagatcatgctgatcactcccgacacgactagcagcgtgttgggacccgacgagcagccgaggtcagcgatgacgatcttcgccggagctggagaggatagggacgcaaaaaccccctctattgccttgcagagcactggcttggtctccatgatggccttcatctgcagatcatcgaacagtaaaatgaataagagctagatcaacaaactagcaagcgtatatatgtatggaattgagcagagaactacaggtagcctggaattagtggcatagctgtcatttccatcgcctccaaccatgtgtagggctcgctctatctccatatggcactggctgtgtatggctgtttgaccctattagatttcctgctctcaaactcctccatatggcccgttttatagagagatggggcgagcatcttctattattatattgtactacttggcaaatttgcatcaacccgtgcatccccatgcgcatacgggtaatttaatttgtatcaagcatacttttttgatatgtagagtatttcacacaggattaagagaaaagtaaaattaaatagggaattagtggcatgagaaagcaggaagaaaaattaaatgaaagatggttgtgattggttaagaaaagattaaactaggtagaaaagtagttttattttgaaataaaatttgaatgttagaattagctacattgattatggaataaagggagtagattctaaccaggtaatgtaacgtatatatatgtttttaggtttcttcaagattttgtgagaccaactcagagtgcactgcatgtacgttggtttgattatttgctttgttaaccatattgtgcactttggatagaaatatgtacttcctttgtttcacagtgtaagtcattataaaatttcccacatttatattgatgttaatgaatctatatagatatatatgtctagatttattaacatcaatatgaatatgggaaatggtagaataacttacattgtgaaacggagggagtatatagaacttgaacggaactcaacatactaattggggactaaaatcaactcgatggatgtgatattttttcttattaatgtggaaacttttaacagtttctgtttaatgtatgaattatataatgaatatattttccccttgcacttaaataagcggaag

SEQ ID NO: 18617 - DNA, 7456 bp, Oryza sativa
cggtccacgatggcgagcacggagaaggagaggaggaggtagctgccgtgcggccgccgccgccaccgctgctcctcctcatctcttacccgccagcccactctgacacccggatcggcgggaggagggatccctccccggacgccgccgctcctcgtccatcttcttggtccgcgacgaggaggagcccgtgggctgggatgatccggaggcgccgtcgccggcaaaggaggaggaggaggagccggccttcatggcgttgagcttgcggaagtggagctcgatggtggcgcggagggagttgtaggtggcggatgccgccgatgccacgggcggacggggagggagtcgtcggcttggaggacggggtgagatttcgatttggctgtggagtggattgagtgtggtgggcggcgtggatggaggtggcggtggccatcattccctacggcggcggccttgccgccgcgccaccccacccctcctggtcgccgcgccgcgccgcctcggctggctgccgacgccgcctggccgctggcgccgcctggccgcctcgcgcggtcgcctgcctcagcattgtggctggccgcttttccgccgcgccggtcgcctgactcagcgccgcgcctggccgcttgtccgccgtgccgcctgtcctcttttgaaagggcaagagcgacatttttcctacccgggcccatatgtcagatttgccaaacggttaaacccacacagaatagcgacagaatggtgtggagggcgcaataaagctcgccgatggcatataggaaggctcgaacttttaagtggtacagagacatgcatcatctttcttaatggcatacaggtaaaaacctctttaattaatcatgtaggtcgtaattaaagagttgacgtgtgcaaagacatcttgtgtgtgcttgtgtccttttgtttttgtttttgtttttgtttttttgcgaataagagcttgaagaaaaaggtagatgaatcagaagcaacaagggaacagcagtccaaagagattatgtgtgtgcttgtgtcatatgtgattggaaaacacgaacataagactgaattggtatgtgccgaaattggtcaactcacccttaatgccatgtcacttaaagccgtcaccgccggcgtccatggttgaattaactcagtgtcaggtttgtccgagcgcttgaccaacagtgagacaaccattcggcctccagggacaatctcctgtgccctcaagctcaagaatcgcatgaaatccttcctaaactgccgagcataagaatccgcgacaatttgatgccttgatgatctcaactgttcatcactatcatgcatcgggattctactcttcttgagatcttcaggtgcctgcagttacaatgcacactacttacagaaatcaaaacataccccctccatacatggatgggtaatcaacacaattagttactctctccattttttaatatacgacgccatttgacttttgagattcatttgacaattcatcttattaaaaaaaattatgtaattatcatttattatattgtgacttgatttatcattaaatgtttttttaagtattacttaattttttttatatttacataaaaattttaaataagacgaatgatcgaacgtttgttaaaaagtcaacagtatcatatatttaaaaaacggaggcagtacttacctcggataaccaatgcaagctgttagccgagcaaaccaaatgcaaggagccacgagcgaatagcctctcgtagaacgacccaggtaccataccggtgatcacagcagtagggcgagcgagcgcttcatcaccactgtgcttcagtgtgtccaagctcttcgccacggcgttgaaatcgttgtcaggcagatcgttcaggagcacgcacatctccggcggcagctgctcgtgctgcgcgcagtagcggtggatggcgtcgacggcggcagagacgagcgtgagcgcgtttggtccggaggagcagcccaagtccgcgatcaccatgttctttgggtgaggacatgagcttgtgcataagcctgtgactgcctcctctatcagagtcttcatcctatcctgggctgttttctgcgtgcaaattattttcagatatgtctcaatcagatcttgcaagcaagcaaagtaaacattgaaatagttggcttttttggccacacaatgcagggtgggtgtagtatgatgattttcagattacggcggggtttagttttcaattttttcttcaaacttccaatttttccatcagattaaaactttttttacacacataattaaactttcaacttttttctctgaaattctaattttagtcaaacttctaattttggtgtggaactaaacacaatcgtcaatggatagagttaccagctgggaatatgatgaaggccgagtttacttcaaactttcaacttttccatcacatcaaaacttttctacactcataaacttccaactttttccttcaaacttctaatttttgtcaaacttctaattttaatgtgaaactaaacacagccgtcaatggatagagttaccagctgggaatatgatgaaggcagagtttagttccaaaacttttcttcaaacttgcaacttttccatcacatcaaaactttcctacacacataaacttccaactttttcctttaaacttctaattttagtcaaacttccaattttagcgtggaacaaaacacagccgtcaatggatagagttaccaactgggaatatgatgaaggccgagtttagttccaaaagttttcttcaaacttccaacttttctatcacatcaaaacttttctacacacacaaacttccaacttttccgtcacatcgcttcaatttcaaccaaactttcaattttagcgtgaactaaacacacccaaaatatgaatgcaccaagttaaactgtcaaacatcaaaattataaaatttatatgcgctcaagtcagacaactaggtagattggttccatgtgaaacccattttttttacacaaccttcaagctgactctatttagcgagtgattttataatacttgagaaggtacctgcaagtatcatattttttatataaaatttggtcctctcaatacttccagtagcaagaggtatcaaatttcaactaaaaattttaatatctcttggtatctcttaagtattgtaaaaattctcctatctcgaacatacctcgatgcatctagtatcatagttcgaaaaaatggtgcaatattccgttacattaaaattggagtatttaatttgaacaagtgagcatatcctagcttactataaacttatcccccactaactccttaagcttaatatgcaaagatgccacataatcatccactaacaagatgccatataatcatccactaattaacaagatgccacatcatcatccactaacaatcatcacatttaaacatcatgcaagcatgctatatctttatagtttttataatttaagagcttttcaaacacaaatatgttaaattatcatctaacataattcacataatgtttcaatgtatatcttcatactaaattcccgcagcaatgcgcggggtttcacctagttcttaaaaaaattgtcccaagtaaacatagttatatgatcattttgggtaaatagccaatacggtcccttaagtttcacttcggactcaatttagtcctcaatgtttcaaatcgttcaaacgagtcctccaaattaattatttgggttaatataatccttggaccaaaaaaatatcacgtgagcatgccaagttatcctcgcatgtagcggtatgaataaaatgaccattctaaccttatataatatatagaaaagaaagaaaaaacacaaatagaaaaaaataacaggctagccgaggcccaacgatcggtgcttgactacagcaatcgtaagtgacaattctaaaacgatcatacacctgtgaaacatttgtcttcttttcttttctttcttttttatatggtatataaggatagaatggtcatttcattcataccgctgcatggcaggatgacttggcatggcatgctcaagggacacttttttgagttcaaggactatattaacccaaatgattaatttggagaacttttttgaatgatttgaaactccgaggactaaactgagcccaagcaaaacttcagagaccatattagctattcagccgatcatttttatataaacatttaggccattaaaattagcttccaccatattaatggcaattcctttccttattttgtcaaaaacaggtgaataagattgcattatgaccaaaataaatccatttctctgttttttggcaaatatcaaactgtcatcaatttttgtacaatagaccttttataaaaacaaaaatatctgatcagtacaaattctgccttgactggttcttatttcaatgattcaattcatttataatctgctactgtcagttccttcagatgacgaattagtacaaggcatgtaatactcagaaatgaggcaacgccctcaactttcgacaatcataagaagccggtatagcactttgaagaaagagcaagcatctctggccaccgagtcagagatttgcgccaatgggcttggtccaccccactcccactcgcgcctaacgatgagaaccgattccctcggtctcgagtgcacattgctctctctcttgtgcgatgatcggacgcgctatctacgtaacggactcgcccacgatcccctcaatgcacaaacatataaagggaacgttacccgttcattggcgacgatcgatttacggcttagccaaaaccaaaactctcagactttcgatcttaaggtgtgttgaaggggaacgaatggcgaattcccatcgccgtcgccgcacggtgatcttcataaccggtgccttacaacaccgtaccgacgcatctaaggcgaccatatggtttcttcatctagtcagtacaccaataaattccacataagagaaattaggtgatcatgcatagcctaagtttgtgcatttaagagttaaacacaagcatacctgaagtgctgagttctgagcatagctcgtttcaccttgccctggattcatatgcacactctgtttggagttggtggccatgattcagtttctttctcttctcttttgtgaagctaagctatctgattacctacttataaccttgcagttttcatcagtggcatcatttgactggttttttgttttttgccccagtatttgacttggccactttggaaatttgtgcactgtcagacaaatgagacggtccaccactctacctatacctacttcagaaattccacctttacagttttaactacttaagaaatccatatgtgcaaatattaaactatattcgttttgaaatacagcgagaaacagtaaaatttgtttaacaaaaggaaaatagccttgtcttatctgttgtgaagataacaagtgttggattgacaaccacaaagtgttgatgtgatactctgatgcatctccattatctgaagtgataactccaaaactgttggcttctgtgaatatataaagtagatgaatcacataggtaaccaaaataatgactggaaaataatttatgacaagaggtaaaagattaactgatttcgcagcaccaaccatagactccttcaagcctgacctttaaacacacaactcaatgcatcggtcaaagcaatcaacgttcacaacacgcgcaccctcacccaacccatatgatgaaagtatttagatctattggtagaaatgtgaagcgtgttattgttaaaaaaaatatggatgggtataatcgttatttagccatgactaaacttgttttctctttctttggtttatttggatgcaacatgagcaatgcctgtagaatggatgaccacaaatcgacctagatagggtgaaaaacataaaataacaaaagttacttttaatcactatattaacaaattactaatcaatatattagtaaattactaatttattcttaataatagtgaacagttcagatctatcaccggtagatagcatcggatcatcgctcactccgtaagtatgtgaacttggatcaaataaggatgcaagtaagaaacggaattggatccttaccgcacagagctacagcgttcagattagattcaatatcctaagtttgatctaattagtaagtgtgcttcagattaactgtagcgcacccgaatactatctccgattaacttttgtctatattctgaatatattttatccaaatacatagttagtagttgcaaaattataaaatggatgtagtacctatatatcagtgaaataatgcattttagtatggcaaaagagacattttggtgttaaattcgtcgctctctgcaataaatgcagatgattatttttttgcgaggaaactccctactcaaagtaactagaagaaaaaaaaatggaaattcaacagcgtgcttagaaaatttacaccatatgtgcctagtcgtttcattgtcaacagcgtgcttagaaaattgaacagcgtgctttggttcaggttttgtcaaaacttcacctttttagttttgttcagaacaataacaataagttgctgatttgtaaaataagaattaatatcaaacctacatcacgattataagtgctcacttttgattgatccaaaatcatattaagtttctttttaccatagagaaacttttccaaagaacttttcatataagaaacttttttttggtcaaatttgtataattttgacaatcaatcaaaacacatttattcctgtgacacttagaacaagaaagtaactaatgagatttcacaagattctctatacgctcaacacaacctatttaattgcttccccctcagcctataggcttcctcctgggccttggtgtttgtcattgagaccaatagtgtttgtcattcggcccattttctgatgtctcgatgagtttatgagcccaaatcttctaggatagaattctcctccatttttgatggtctttcctctcaactttggtggtttattacatacatttattcactaacactcgtgggaattgttagaattaagtccaacactatgttgattaatttcaaaatgcactttgagtaattttaagaaaccaatatatctttgtgttgattaatcctttttcacacaaaacattgaataaagaactcgcacaaaatgcaactttatattttttcaaaattaaagaaccttgatgtcgcctataggagggatgaatatgcgttcctaaaatttatcacaacttcatagcatattacaatgataagaactttcagttcaaatcagagcttccgatatggaattggaaattttggtctccacaaaaagttcagcggataacaaaataaaacact

SEQ ID NO: 18618 - DNA, 1953 bp, Oryza sativa
gcaactcataatagagacgtcgagggcgtccagctggtatacttcgtagattcccttgaaattgatccagagaatatcatctccttgcaagaagtccgggtccctgatcctcgctcctatcatctctctaccggtggcgctcatctccacgtacagttgatggaacttgtacatttgtgtgggtagggactgcaccagctcgggcttgacaagcggtttaccgagttcgtacatgtatttcaattccgcattttctattggttcaactcctagcaattgatccgtagttagaccggtgtcaataataaattcttctatcgtcatgtcttccccggtcaccaacggctcgatctcctggtttggttgctctccaagctaagggactggtttggactttctagaagatgctttcttcagcgttcgctctggggtctataggaatcttcttttctggacttcgaggcttgaattggctcttgacttctgatgcaacgtaagcgtcaagctcctcttgcgtgcaatcgtaccccgggtccttgttcttggcggcgtcaactttcgccttcttcgttgcccttgtgtgggcaggcggtggagctgggggggcccttgactttgaaggtgccggaagaggagcttgcggaggagtaggtgtaggagcacgaggaggagtcgagcaggatcctgaggaggagtcgatgctggagcctgaggtggagacggagctagcggagcatgaggaggagacggtgcaggatcctgaggaggagatggcggagccggaggagatggtgcacgagacgccgcttgtcgcccagggaggatgatgtaccgcctgcgccatagaataatggcatggcttgtgtctcgtagatgcgtctcaccgtctcctccagggtaatccagctcgaggtcctcgtacgcgccttcgaccaactcaacttcgaccttcgagtatcctgctggaatcggcctgcagtggtaagtacctgaagggtccgttgggatggccatgcccgacgccaccttcatgttgtgagagattatttattagtaatcaacatatataagcaacaactagcggaatggctaaatcttacctttattgataagttcttgaaaggaatatgcagctcacatggtgtccgctgagtgatgtcatcaacgggacaggtcgattcgtcctgtgtttgcatggcgtccatgctctgtgatcctacttgccccgttgaggcgcagctgctacggtttcctgacgggctcaccattgcaggaggaatggtcggctggggatcatgggaccgatgtgcggccatgcgttcatcaaccttccttgccacctcctcttgcatgttgagttcgtagctcgatatccggaactctaggtctgcaatcttcgcctcggtatctctcttgctcctcatccgactcctgtacgtgtggatgtcctccttgaaaccaatcttccaaggaatcacccctttccctcgtgttcgtcctggatgctctggagtctgcagggcgagtgtcagctcgtccctatctctgtctggtcggaacgtgccctgagaggaggcttccactgcatctgttagtcgtcgcgcagcctctcgtatctgatcgccgaagaccagtgagctatcagctgggttgagcgttccaccgtgagcatagtaccagaacttcgatcgttccggccaattggctgttgccggttcgatacccctctcaatcaagctagcctccatctcctcccactttggcatcgcgacgctatagcctcctgacctcaagtggtgatggtacttcttcttggcggtattttctttgtttctttccatcatcgcctgcccttgttcacctgtcttatatgcaacgaactcatcccagtgatcccttagctttgggaatgtgtcgaagttcggtgtctgccccttcaggatatacttctgg

SEQ ID NO: 18619 - DNA, 1887 bp, Oryza sativa
ccgcacaacccaatcgctgtgacgtacataattcttggcggcttcggccggggcactaggacgtccatcttcttccacttccgttataatgtgccgaccctcaagtttcttcgctgcacctcgttgcccgcgtgccctcttctgttcaacggagggttgactaccactagcctcctcctcctggttcccctccacatccctttccacgtgcccctgctggttcccctccgcatccctctccacgttcccttcctcgttcaagtactggtttggatcctcgttcccctcttcttcattccagtactggctgcttccctccgcgattgtatcgtacaatatctgttcctcatcgcggtcagccatctgttgatacaagaaacatctgctaagtcacgagacatttatgttttaacaatctaagtcatgtatgctaagtgtaaatgtcgtacattagaaccctacacaaccttacgtgctaagtctaattacaaatcgtgatataagctaagtctaggtgacgtatattatacaaccctagctagtaaataattatatactaagtctaattacaaataaaataatcttatattaaaactcaaataatattacatgctaagactaaaatagtcatgtatatgctaagtgtttcgtgcgtatatgctaagtccaattaagactacaatagtcaattgctacttgtcgcaccaattccgtagtcaataattacatactaagtctaattacaaataaagtaatcttatattaaaactcaaataatattacatgctaagactaaaatagtcatgtatgctaagtgtttcgtgcgtatatgctaagtctaattaagactacaatagtcaattgctaggagtcgcaccaattccgtagtcaataatgtcatactaagtctaatttgcaataaaataatcttatattaaaactcaaataatattagaacactacacaatcttatatgataagtctaattacaggtctaataatcttaattaattgcattacaaatataacaatcgtttatattattacgtcacttgcctgctccaattccttctagggctagctcttccactccggcttgacagacgactccgacaacacgtcttttctgcaagatacaaaaagatgtattaggataaatgcgaagtaacatatatatatatatatatatatatatatatatatatatatatatatatatatatatatatatattgcatttcacgttaacgttcgtcctcgttctcgctctcgttcgttcgatcgttctcgttctcgtacacgttctcgcggcaacgtacgttgacgtgttcgttctcgctctcgttcgttcgatcgttctcgttctcgttcgttaacggcggtgtgccggcatcgggccgccggttggcgcggcggcgaaggtagcggcggcgtgtcgacggcggcggcggcgtggcgacggcggcggcggcgtggcgttggcatgcggcggcggcgttgcgcggcggcgaaggcggcggcgtggcgtgccggcggcggcattgcgcgcgcgccggcgaaggcggcggcgtggcgtgccggcggcggcttggcgcggcgtcggcgtggcgcgtcgtcgtcgtggcgcggcgtctcgtggcgggcggcgcgacggagagagatcgagatgaagggagatctggcggcgcggctctcaccccagagatgcggcggcagcggaggaggcggaggcggcggcgaggacgacgagttcgagacgacggcgagatatggcggcgtcggcgcggggatttgccctaggcagtggcggcgaaggagagaggccgagtgagatcgatcggccgaaaacgtctaagtgttggtgaagaagacgagggcgcacgggaa

SEQ ID NO: 18620 - DNA, 2814 bp, Oryza sativa
aaatatctttagtcccggttgttcacaacaaccgagagtaaagaaaagatctttactcccggttgttgagaacaaccgggactaaagatatttcgaaacaaccgggagtaaatatcttttcccgctatttcgaaattctttttaaacccggttagggttaagaaccgggactaaagattatagcactgcatatgattttcgcttacatatgtgtttataaaatagaagttaatacattaacattatttaaagtacaaagattaatgacaattacttcgaaaaattatttttgtctgtaataaattaagtggataaatcgtaataagcaaatatatgacttataattaataaaaattccaataatcatatatacttagcatatatatgaatgatattattatattgataaaaactctaattaagatatgtatgtacatactgcatgatttaaaattaataaaaattgtaatcatcatatatacttagcgtaggaattatattaaattaaatgctaaaaactctaattaacatatgtaaatgccacatgcatgatttaaaccttttaaaaattcgaatagtcatatataagtagcatatgaaagatagtaaattaaattgtgaaaaactctaatatatgaatgatagttttaaaaatatattaaatttaatacttttaaaaattctccagtcaattataattagcatatgaatgatagtaaattaaatgttaaaaactctaattaacatatgaaattgccacttgcgtgatttaaaacttttaaaaatcctctagtcaattataattagcatatgaatgctagtaaattaaatgttaaaaactctaattaacatacatatgaaattgccacctgtgtgatttaaaacttttaaaaattgtaagtatcacatataactagcatatacatgatttaaacttgttgaaacctctaataatcgtgcgtaattaacatatgccatacatcaattgatttatatggataatcaatacatccaaaatagtttacatcgtgtacacaataattacggcattacatcggcggtgacggttgaccgcacgtactttctcctcactattgttccctccttgtgatcgttgagtgagtaaggggtgtcttcatataataggaggatgatagggtcaatcgtcaccgtaaaagggggttgcccatccaactgatcgtaatcctcgtcagtcttgtcctcaactccgacgatttttcttttgctctgggagaaccacttgacgtttaggctcatcaggccttgtgcccttctttcctttgctagacatgtccttcacgaaaaagacttgcgttacatcattggcaaggacaaaaggttcgtccgagtatctaaccttgttaaggtcaacagttgtcatcccactgtcatcaatcattacgcctccaccagtcaacttaacccattggcaccggaacagaggaaccttgagaggaccatagtcaagttcccatatatcctcgatggcaccgtaatacgtggcagttgttccatcgtgtcccatggcatcgacacgaacagcgctgttttggttcgtgctcttcatgtcttgggctctcgtgtagaatgtgtactcattgatgtcatatccctggaatgtcgcgatcgacccagacggtcccctcgccaggaaggcaagttgttggttgatcgactcgttacccatgagatgttgtcgtagccacgcggggaaagtatcaatgtgatgccgtgtaatccatgcatcggacgtaccgatgttcctggcgcgaactagagccaagtgctcctcgatgtaaggagctaccaatgaagagtgttgcagaacagtgaaatgggctttacggaataaattgttgtctaccgtcattattgctttccttccgagagttccctttccccgtagtctcccttcatggcgtgattcaggtaccccgattgggcgaaggtcttcgataaattctacgcaaaattcgatgacctcctctgttccataacccttggcgatgcttgcctctggacgagcacggttacaaacatacttcttcagaacgcccatgtaccactcgaaaggaaacatgttgtgtaggtacatgggcccgagaatacggatctctttcacaaggtgacaaagcagatgcgtcattatattgaaaaatgaaggtggaaatatcaactcaaaactgacgagacattgcaccacttcattctgaagggcttctaatctatccggatcgatgaccttctgcgaaattgcgttcatgaatgcacatagctttgttattgttgcccggacattgtctggatggataccccttattacaactggtagcagttgtgtcatcaacacgtgacagtcatgagactttaggtttgtgaacttcttctccttcgtgcttattattcgcttgatattcgtggagtatccagacggtacctttatgctctccaagcattcaaacatactttccttctctgccttgctaagagtgtatctggctggactcaagtaatggcttcctttctcctttggttccgggtgaaggtcgccgcgttgttccatatgcttcagatcattacgtgcttccagtgtatctttcgactttccgtatacacctaggaagccaagaaggtttacgcaaaggttcttagtgaggtgcatcacgtcgattgcgtggcgtacgtccaagaattcccaatatggtaactcccaaaatatagagttctttttccacatcgccgtgtgaccatcttcgctctctataggctggcttccaggcctctttccgaaca

SEQ ID NO: 18621 - DNA, 8496 bp, Oryza sativa
  unsure (1)..(8496): unsure at all n locations
cctgttagggacaaggcatcttgggtaaagatgaatggaccaaaggtgaacccaccgattaatgagaagaaagttggaaggcctaggagatgtagaagaaagcagccacatgaacttgaaggaggaacaaaaatatccaagcatggtgtgcaaatgcattgtagctactgtcaaggagttaatcacaacaagaagggctgcaagaaaaggaaggaagatataaaagcaggaaagcagcaagccagtgctgctccttcacaacaacatggtaatgaagattttatgcctctgcaggtcatgcctgaagttctgaacagtcagactagcattttaaccagccaacctagctatgatcagttacaaaataccatattgtcttccttgacgagagaggttagacaatgctntgccaattttccattttatagctntataaaacagttttcacaatttcaatgtactttctgcagaacattataaacaactcttctagagttgaccttggtccactgccagaatcaaattttattgccacaaaccanaaagctgcagtgcagccgccaatgacgacagcccaaacccaaaagaagggggcaaggggggccccccaaaaaaaaccccccaaaaatttttttccccggggggggggaaaaaaaagaaaagctgagccaaggaagagaaatacgcaacccaataagaaatcagagttgaagaaaagggaggagacaaagaaaaagtgaacaatatattcaacttgataaaaaggattagcttataatttatccagaagttatgtttattttttgccaaccaattagacatgtttcattttggagtgtgctctgttacattgctctaatttccaatttaggaacatctcttgtttttcctgtttatacaacagctatttatggtaaaacatttcagaatattaggagcacatttctgccaggatttgtctatggacaagaaaacataccacatatgtctgtacagaaattgctactggtcaaagcaatgttagcaaaattcaggttatcacttggacatgcagttccaaaagagagaatacaaccagtatttgctacatcgtgttcaccattcatttaagtagctgaaaaattcttgtatcccttatataacaaaagcacttccagagtatttacaaaagcacctacactgccattattcactcacatactgctttgacagcaacaaagagtcaaagagtcctctcacagtggtacaccagatgcagttatcatgatgctgattccactatggacgaagaatcccatagaattacagcacaaaaaaatggaaggttcagattctcatcagaagggaacctactacggccatgggcggcgacggtggtttcgagatctaacaaccccctgcactggctttgagtcctgatggctgccgtggccgggcttcgtgtcccatcgaccactgacccacgccggtttcgagtccccgaggaccgccgccaccagctttgagtcccgacgactgctgccgcacgccggctttgagtcccaccgaccgccgcagccggaagctacatatttaaggtcctatccctcatggtgattaattgatccgtactggaaaatgtcctcaaatgagaaaaacagcaggggatttgtgcaaaattattatgatgtgtaaagggccctcacgtagactttgtccaaggtggaaagctgacgtggcaaaaaaatcatatgtggcagccttttaaccacaaacgcacccacctagtcaagttgttgtatcgatatgtccaatttttaagttcttgtacttaatcgcacccacccgccaagttcttgtaccgtcaacgcaatttactctattttaaacatcactctcagtgtgttcatagtaatatacttactcaatctgtccgtaaaaaaagtgagtgaaaatttttaagccatcaaaatactagtatcgttatccttttatggggcatattttgacacatacagtcaatattagattatggagtattacattcaatcatatgcatatcaatcgtacaaaaaatcgcccgtgcataacaaactacaggaccaacaaagagaaaaaaatgaaacgaaaccccgtccacgggaggatagaaacagcagagatgcggatgacccgagaagcatgccgcacgtggtggtgctgcatgcgctaggcttcctccagatccggcgcagcaaccagcgtctacatcggcctcctgccctatactcatcgacgcaggcctggaagctagtcgccgggccttaagaccgttgccgccgcgcaaggtggaaagtaaccttcccctcctttctggcttgaacgttgtttcagggccaccactgccgctggccgactactcgtgtgctccctgaaccgaccatgaggcacgccatggacgacgtagccggccgccgccaccctcacgggctccgaagaagaacgaccaccggcgccggccttcagatcgggcaccttcaagaggacggcaatcgccctctcctacctggatgcatgacgacgccacccctcaccgatggatctcctcgccaccactcggagctcggcctccacaccatcgccccgacgagcagaccggtcactcgtcgccgctgaatccccaatttctcagatccgaaaaaaatggaagaggacgggagtatgaatgggggtttggatacagtgagatggttatggatggtataaatagaactattggtgtgagtaaaaaaattactattgtttgggcaggagcgttgacagggtggggtgggggtggctcttagtggtgcgcgagttaaaaatttactcggactattggagtggggtaggggtgcaggggtgggatcgagattggtcgtcgatgagttaaattttaactatatataaaactaataagaagttggatagcatcaagtaaaaaatttactcggactatgggagtgaggggagggcgcgcaaaggtgggatcaagattggtcgtcggtgagttaaattttaactgcgtactatggacctggtgggagcgtgggtgggtggggttggaggctgtatgaggtgttttttaatacgtagcaccttagggtgttgtatagtagttatatatatatatatatatatatatatatatatatatatatatatatataattacattagatttctatatcatgattgtgggcgtttgcatgcaaatcgatgcccatgctaaattgctaattgctcgctgtatcctcacattaaggcatgttatccctccctaaaattttataccctgtcacatcgaacgtttaacacctacataaagtattaaatataggctaaaaaataactaattgcattaaattgcgactaatttgtgagataaattttttgagactaattactctatgatttgacaatgtggtgctacagtaaacatttgcaaataacggattaattagggttaataaatttgtctcacggtttactaacggattttgtaattagttaaaccgaaatcatctatctaggtgttatcatcaaattaggagcgacatatataaaagaacagtcaagacacagcggagcttcctaattgttaaatttacatcaataaataaatgaaatactaaatttcagacccccaatgaggagggacaatctcatattttcaattataattttcagaattattaaataaaaaaatttggattccaaggcgagttcatttttttatattaactgtgaggccacattatctatgatttttctattttgagaactattaaattagaaaataaaaaactagaacaaggttatagaaaagcataaagaacgcatttgatactctagcactttgcattgatcatcaattctacagtttaaaattatttaataaaaatataaaatcaagatattttaatgtgtagaattattaataaacaaaatagataacaaaaagtaaatttggacgtgatttctatagcaattgcataattattgacattttgagtttccggggaagatgcctaggccaccatgcatgagcagagtatctttcagtggaagcattggatgctaaaagcgaacgtcggtgtggagtaagattttgtacatattattattattatcaaaattcacaattattttcaataggaaaattaaattactttgtttttattaatctatctgtcaattaaaaaaatataattctatgtttaaaaaaataaaatttatacatattatatatatatggaaataaaaagtaagagttctatgtaaaaataaagattcttttgaattctatctccacgcaaatccgctaatatggaatccactaatttcctgtatgagatatttttgaaaataaataaccaatattctagaatatgattaagatttttaaaattttaatatagtccgtgcaaaacacgggttgacggctagtgcaaccaatggatttggaatgtacaaatcaattttccgtaatgttcgtaacacattaaagtttaaacaaggataaactgaacgcagtgcaatatcatgcaacaattcatcaattcgattccctgatagaatacactttcgtgcaatcgtgctcgtacaaagccaatgctgaagaaaccacaccttaaaattttgcatctcgatctcaccaactgccacaaagaggtaccaggagaaggacgagcacttcagcagcgagagctcgagaaggcttctcttcacgacggccggcacggcggagtcatcgaggaggctgcaattgacggcgaggctgcggagcgcgccattgcctactagaatccggcattcgtcgacgggaacatctgcaacaacagcgaccagaacaccagcatttaattagggggaaattgatttggacgggagaggagcagagcggaggggatgaacactcaccgacggcatcctcgtctacgagactacgaatacatgagcaacggctccctcgctgacctcctcttcaaggccggtagcggaggtggcagctacccggccctcaatctcatccaccggcggttgaagccgttgtcgcggcggcggcagcgaggcacggttgcctactgcgctgagggcgaaggtggacggcgttgctgagagggattgccgcggagatgatggagttacacgacaggagaggggccactgttggtgtcgacggcggttgggagggggagagatcgggaggtggggcaagggagtgacggcaagcgccattgttttcctcccggtgatatggatgaagcgccgagaaagctatttggcaatcagtcacgcgtgcccctccccgcacgactggacacatgtcgcgcagagagaaggagggaggagctagttttctgttttttttcttgttttttttcctttttttcgtttatgtttggttgattttttcttttttttatccgttttgttcgtttcggttcggtttggttttttttccaggttctcttccgttatgttctttttccggttgctataaagatgtatgaatacaaagtttgtactcatatgtaaaccaagtttatattcgtacgtatgtaaagtttgtatacgcgtatacgtaatgcattttcttgttttttatttttttatacatatgcatataaagtttgtatacatcatatacaaagtttgtatatgtcctatataaactttgttacatcgtatatagactttgtatacgtcatatataaactttgtatatatgtatatatttttaatgcgttaaaaatatattcataaaaaaatatatacatatgtatatagtgtatatacatacatgtgtgtatatatagtatgtacatacatatatacatatgatgtataggagatacagatagactagagatgaccgcacgcgcgcgtggggcgcgcggctgatcgcgtatcagcgccccccatgaagtgtggttgccatagcctggtcggctgacaagtgggcctgaacatctaccacgtaagtaaaaatagtgtaaatagggtttaaactgccatagaacatgtcgacgagtgatactcgtggactggatgaatagagtattgaggtacgttggaacaggggtctacgtagtacgacatcaaaacagacaaaaaaaaaaaggattatactagttcaggccccttatcaggtaatagccctagtccagtttatataggattaatgatgatgagaatagattacaaagagagtaatcaaaataagcaataccgatgagttcgtagtcgaagaattcgacgagatctcccggcgagttggctccgtggactccggcttcgtaatctttggtgggtgtgttggcgatgagatgtgataccctttgcctctcccgaagggtcccttttataccgtggaataccatgaccctcaagtaagacttggggatatgtaaaccaacacggcatactagaaattttgacctttccgaataggacttctacaattccttaactcatggagatattttccataatctgagacgaatttctaaaggtgtatacgggaactgaccgtatacgtgaagatatatcttatcgatatattccataagtagtaggatagagggtatgccttatccgtaaccgacagaacataattcggttttatacagtttaggggcgaagattaatagtgtgaagggacggcaataggacttattccttgttgtgcatgtcggagcccattatcttctcagacggcgcaacgtgcgtcagcgtggactagcccaggcccctgctctcctgctcgttctcaagcgcatatgcatttaaatggatgggtgtgtataaatttatataagcatttgtgtttgtgcttttttacgcaaaagaaaagtttaaaatcaagtaaaaagtttcccatttgtagaaaaaccgtactcacttaagcgagaaatttcgtagtgccggttttttagcgcttagtcaaatcgaggtgtattttttttaatgcgtgctctaattttgtcgccgaagatttttttttttggtgatttttttctcaggtaaaacaccttattctctagtacacagttgctaattaatcatttttgtatggctcatgcatgcagccattgattgctaaatgggtggctgagacagaagcaacagcaaaaatccctatgaagcatgaaactttttcatgcttatgctcagcagttttggaaggattgctgaaaattcttatctctatgaaaatttctctaactaaaaaaaatatgtatgctcatgtacgaacagaatatattttcagtattaattgtgcacttgtaactggaggcactgatgatcttaaggagactaagagcttgaggctatcaaggcgtcaaatcgtcacacagatgcttatgctcagcagtttaagaaggatttcaagcagtttttgagcctgaaggcccagagggtcaaatggttatctcagtgtacatcaggtgctcagacaaacctaattctgagttcctttctgttgagatcataggcatataatgatttaatatattctataaataantcatggcataccagtagcattaacacatcattagatctacacatgtaaactaagcagtaanacatgaacagatgaaatatgcgtaacatgtcgaacacgtaccgagctggcggaaagaccggttgctcggcaggaactactcgcggttgcgggcgtcgacgaaggcgcgcagcacgcgagcggagaggaaggcgagccgtcgtggacgaacagggagcagtcgcgcgaagcgcttcccaaaaaccttattgcccccttctcccggtgcaggacgtcgaaggcagaggttccggagacctgctctcccgatcgccggtgcacgccggcgagcgggatggagtagtctacgagtgacggcgcagtatagagtaggaggcaaaccatagattgatttcgcatgtgttgcgtgaaggcggcggctcggtttatatagagataggtcgcttgatcagggcgcccgcacgatctcccctccgcgtaaccgaaccggataagtcgcgcgtaacttatccggactccacgccgttttcacgcatcggatttttcggaatgtttccaaaaacaaaacaaatccgaattttcctgcagcaaaacaaaactgcaaaaggaggctgcatctgcacaagggtgaggagccaattttgcggaccaatcgacgcgtacgtcgtgcacgtgcgccgcttgccctgctaggccaggcgagcgagcgcgtgcatgtgttccccttcttctctccaccatacatgcttcaagtggctaggagggcatcctcccttttaaggaggtccccctctcctagaataagcaaggtagtactaaactccacatgcatgccatcccatgtggtgggattttgtgattttccaaagattaaaccaaagaattaatcttccagtgggctaaggcccatccattaattccaacaatccccaaccaaatctcaaaatcccactgagattttcctt

SEQ ID NO: 18622 - DNA, 1408 bp, Oryza sativa
aggaagcgaagttgatcgtgctaaaatcgatgtgatagatcagcttcctcctctcgtgaacatcaaaggaatccacagcttcttgggtcatgccggcttttatagaaggttcattaaggacttttctataattgccagacctctgacaaatttgctagccaaggatgcgccttttgagttcgatgacgcgtgcctaaaatcttttgaaattctcaaaaaggcacttgtttttgctccaatcattcaacctcctgattggaccctacccttcgagattatgtgtgatgcaagtgactttgctgttgctgcggtcttgggctaaaccaaggataaaaggacacatgcaatctgttatgctagcaaaattctaaccagagcccagttgaattacgcaactacagaaaaagagctgctcacggttgtttttgctatcgacaagtttagatcttacttagtaggagccaaggtgataatttatactgatcatgctgctttgaaatacctgctcactaagaaagatgctaaacctcgtctcttaagaaggattttgctgctccaagaatttgacttagaaattaaagataaaaagggagtagaaaattctgtagcagatcatttgtccaagctgcagatcactaacatgtaggaacagccaatcaatgatttcttaagaaatgatatgctgatgacggttcgcgactccaacccgtggtatgccaatatagtgaactacatggtatctaagtacataccaccaggggaaaatcaacgaaaactaaagtatgaaagtcgccgtcacatatgggatgagccatacctatatcgggtgttctccgatggcctactacgaagatgtgtgccaactgaagaaggacttaagatcatagaacgatgccatgcctcaccctatggtggccattacggtgcattccgcacccaggccaagatttggcaaaatggtttcttctagccaacaatgtacgaagattcaaaagaattcatcagaaggtgcacaagctgccagaggcaaggaggaatcactactcgcgatgcaatgccccttacatacaatttacaagtcgagatattcgatgtttggggtatagacttcatgggacctttccctaagtctcgcaactgcgagtacattctggtggcagtcgactatgtctccaagtgggttgaggctatgccgtgcagcgccgcggaagcgaggcatgccaagaagatgttcacagaattcatcttcccaagatttggtacccctagaatggtcataagtgacggaggttctcacttcattgacaaaaccttccgagacctcctacgagaaatgggagccaaacacaatgtggccactccttaccacccacagaccagtggacaagcagaaacatcaaacaaacaa

SEQ ID NO: 18623 - DNA, 4884 bp, Oryza sativa
ctagttttcacaggttagcaggtgagcatgtcttgtatctgtatatctccaccatggtatagtactagagctggaaattgagacccaattggttcaagcataagtaagagataaatttccgactaatgaaattcttcatgtgattgatcttgtatattcattattctcagctgaactttgcttgtgaacaaccatccatgttttgggaaccttatacatctaagtaattgctttatgtgagatgattaagatgaaaggaatccttgcaacatggttatgactcttgggaatttattttcaaaaataaaattattttaagaaggctcaatcctccaattgactttaccttatacctaccaaggccatatgcaagtacattaatgatcaaccttatcatgcatatgactgcttgacattatattgagctttgtcaaaattgtgtgacttgtgttaaatatctttcatactctcatgatcaaggggtcactatcatttccactttccagttccacatataaaaaaaattggctaagcttctacactggaagttggctttccacaaaaatatccattcaaataaactcctacattggactatgctttcttctcctggaaaagttcttggcaaaaaaagaatgacaaaagggggaaaggcatggctatgaaaaaaaagagaaaagaaaaaaaagaaggaaataaaatttgctctcaaaacattgagcaaagaaaatatagccatgccccctccacaatcatgccaagaaaaccaatttggagagaaagtataggaaaaaggagaatcatttctttattccatcattccacaacatatttcacttttccattttcaaccacaaataaagatccttgatctaggagtatgattgatgatcttcttgagtccatatttttggctttgcaatatatatgatgcaagtatgtcaccagtttatccctaccaagctccacatatcagccttagaataggggtaaattctggcacactttgccttggtgaggatccaaaagaaaatatacatctttgagagacaagagagaaaagtcaatataaggaaaagagctagtttgcgaaaattcataaaaatcccatgagtatggcagagaagcagaaggactggaatcaagattgttccatttatcaattactcaagatggtaagatagccattgatatagttcacaagtgcaggtatgggtgtgaatgatttatatgcttaattcatatcatgaagaaattcattctacactaacctttactcagggacgagcaaagggctaagtgtgggggttttgttggtggctattaaatgccgattctataccgccaacatttgcataaagtacagataataaagcatccaacatagagataggtgcttaatctcacatattccataagtgttggtgtatatttttatgcagaagataaaccctgaagttggaaggaaaatcagactaaagtgaggagaattatgtatccatacaaggaggggttatgaacatcatcgaaacatcagtaaatcaaccaaaaactccaagaaatagatagaggaaggtccagggagtccaccgaccgaaggtcaggccaggagggcccagcccaggttcggctgaaccccctggttcggccgaaccctggtgatcgccgttgatcccaggttttggcatggacatcccagatcactccctgatggcggttgcggggcagttcggacatttccccttctcacaaccatcataactgccctacgataggacctcacttcattcactctcacacacacttccaagcttgagctgaattataagaggctttattgtactatattgtatactagaataggaagagagtagagtagaaggagtcggaagaattccggagttgtcggtaatcttctcctatttcttttattctgtttattactctgaattcattataatattcttcttgagtaatttagatttatcttgtgagaattatctcttggttagttcctaaatagcatacgggattattgttcactataatcaactaaaatatagtgattgctttggtgagttataaacactaaagtagatagtaattgcttagacgttttgtttaggtaattgttatccagtaattgatgcgtatcccacagtacgttgaggtgggtgtagaggtggtgacagccctcgagatcactaaagtcttccttgtccgggtacgtagtagagcgacatctgggaacagcgggttgccagtgcctgaagtactgcattaggattaaaaataagctttccctagaaacagtttctcactagtaaatcctctctatcctggcctatcaattgcttggtgtccttggatgaaccggaggaagtctgatcacacacgttcccttggattcgatacccttggaatactccgtaagggaagtgctacatcggtatatccgtgcgcttgcggattttatctgtaaccgtatcaattaccaacaagcatttctggcaccgttgccagggaacggttgctgatcatttccaaacccagttcatcctcatatcctttttcattttttttattctaccttcacccctgctatcctagagaagtattcctatcaaactcttctcgaccatcgtgcaacctctgtttgagctgtctgctcctcggggcgaattctatgagccaccttcttcatcggagcccatttatacaactggctatgaaattcgtcccgagctaattagtattggttagggaaaatcctttctctggttttgatctaaaaaatccctaccatcatctgcgagactttgaacaagtctgctcatgccataagattcgtggcatgagacaagaaactgtgcggtggaaattgtttccgttctctcttcaagagagagcaaagaaatagtacacctctaccgttggatgtgtaaacggtagctaggaaaagctgcgagatagattctgtcttgccttcttcccagttactcgtattactgcccttcgagtagaaattctcaatttcaagcagatcgaaaacgagtcaattggtgcagcttggtccagattcactaatttagtacagtccggaccaaccctgtccttacctgagtatgtgcttctccaacatttccatacgggtttggataaggagtctgcattctatctggacataaccgctagaggatcattcatgcataaaacgccgtcagaaggaaaaacgatcttggatcgcattctagaaaatacttccttcatgacgcagtccaatgaaccccagctggaggcatccgtgtccaagatagaggaacctctaacgatcgagccatttgctgaaccgtccacttctgctagctcgattgatgagaaggttcctgagcagccatccgtcaagaatgaagaaattcagactccggattgtgccacaattatgttcagggacggttttgacgtagactacggcaataccctgaactattttagcaagaggaaaccacccgttcctttgtcacctcccgatcctatggaactcgggttcctacgagaaactgtccgggagttgacatccataatgagcgacgaatggcaaagggaggcagagctttcatccgaagtaatccggataaataccgctccccgaatcattccttgtcacctagaagggaacgatgtcggtattctctacagtccaactatcggggccaacctcatctctgtgtcctttgcattcgcttatttaagcgataaggcagtgaccccgacaaacaaattcttcaagcatccgaatagaaatattatcgaaggatttgggattgtgcaagatgtgcctgtcttctttgaagacagggaggcgatcttggatttccatgtctttgaaatccaagactttgatatcctaatcgggctgcccattgagcaacttctcatcaacacatcccgattaggtagcctcaaaataacactgggagagaatgaattctcaattccattctcgcgggcaaggatcaccttgaccgaccctctcccagaaactgagtcagcggaagaggttaccgcagttcctcctcatgagtctaccaaggcccttctagaagatgaggtccccgacttcatcaaggaagaagcagatcccagtgagactctcgacctgccaatcatggaaccaccacctcgacctccgctagagcttaaacctctacctccaggcctacgatatgccttcctacacaatgacagagaggctcctgtcataatcagtgacaagctctcggaagacgagactcaacgtcttctcaccgtgttagaaaagcatcgttctattcttggctactcgcttcaggaccttagggggattaatcccgcgctttgcacccatcgtattcctattgacctcgagagtactccctctagggaacctcaacgacggctcaataatgcaatgcgagaggttgtaaagaaagaggtcttgaaactcctgcatgccgggattatctatcccgtaccatacagtgagtgggttagcaaagttcaggttatgccaaagaagggaggaatgacggtcgttgcaaattctcaaaatgaactaattccgcaacgaaccgtaaccggatggaggatgtgtatcgattacaggaaactcaacaaggctacaaaaaaggatcatttcctgctacccttcaatgatgaaatgttggaatggctggcaaatcattccttcttctgtttcctcgatgggtattccggatatcatcaaattcccatccatccggaggactagagtgagactatattcacatgtccgtatggcacctatgcgtatcgtaggatgtcctttggactatgcaacgctcctgcacctttcccaaaggtgta

SEQ ID NO: 18624 - DNA, 2437 bp, Oryza sativa
ggtgacagccctcgagatcactgaagtcctccctgtccgggtacgtagtagagcgacatctgggaacagcgggttgccagtgcctgaagtattgcgttaggattaaaattaagctttccctagacaccatttctcactagtaaatcctctctatcctagcctatcaattgcttggtgtccttggatgaaccggaggaagtctgatcacacacgttcccttggattcgatacccttggaatactccataggggaagtgctacatcggtatatccgtgcgcttgcggattttatctgtaaccttattaattaccaacaatcccccctcctgaccgatgatatgatgggattaaaaaagggttacaaaatcatacgtgttattactcatacgtatgcacgggtctaaagctaaaaaaacaactcaataagcacaacccacccaataaatcacgcagtaatataacgcggctaccgtacataagtaaatatttaactctaattgccatcatagcatcatctataatatatctttattcaaatctacacctcgaaggtctcatgtcacatggtttaactacaatgtagttaatttataacttgttacattgtagcaacgtccaatatcgccacattgtttgttacagaacatttcattcggtaccaaaaaaaaaataaacgggctgagcattaatcggacaagccgttatcacacaattaaccccacgatccgtttttttttaaaaaaaaaacccaaaaaactgggcgtgcaacacatgtagatccatcattatcgccagtgcttacgtccaaggcgtaactccacacagaaagcaaaaaaaaaaaagaatcagcaaccaagctagcttcaagttagtgggggctctcggagcacatccttccagtcactccttcatcttccttggctgctcatggcatcgccggagatcactagctccacgtcgttttgtccgccactcactcctcgctcatcaatgggttgccctccggcgagctctccacaccaacaatgtaccccaacgcgccaagcaggagatgctccctctcaatggatgccgccatgcttggatgataacgacattgcaacccccacgccgaatagggtctacaaccatgtaagttccactccttcaatcccactgtgttctatggtgaatattatcgacgtctagtttgcgatagtgatgcaccaaaagcacattatttcgagccacgattattttttttcgttgctatcgccgtgtgacgatactaactactcccactaaaaatataccattttttatattttatatatggtttgccaatatttcatgaatcacattcaccgattgattcttttaacgacaagcaattctcattgcattcaatagttaaaaactaactcaactcccattcctagaacaactaggttcaacaaacatctatgcacgataacttcgatctataagtaattttatatctctaaacctgacactcttgctacgtaattttggatgttttatatcactaccttcatgaatacgaaagttatttttaaactatcacatgatcccgaacgcacgtctctgttttattaaccgaattaatcccatacctaaggaatacactagcaactggatgacaagccattttttaactggcaatccacgtgctatactcagcagccataataattttagaaatggtatctaactttcataatgtttccagtatttcatcgataatttattaacaaaacttatctttgctatataacagggtcctagcgtgccaccgcatatggtgcccaccgaaggcatggctttccctacatacgacaacgcatacaacttctaccagaggtatgcatgtcacgctggatttgacatcaagaagagccgtacgcacaaagcgtttcgcgaggtgtgttgtacgagggagggcaagcacgtgtcgaaggtcaccgatggtgatagacaacggaggagaccgtccaagaaaatggggtgcaaggcttttatgaagctgaggcacaactacgacggtggtgcgctctcatcggtggtgtatgatgtggtcgagctacagcacaaccaccctctaacgccatccccttcggcggtaaagcacatgcgtgcacataagaaccgcgacgacacagttatgcaatttgtggacactatgcaagaaagtcacgtgccgcaaagttgtatcatgggcgttctatctgatctccatggaggccaagacaatatccctttcacttcacgcgacgttgagaacaggtgatttttttaaattattccgtttcttggctttgtgatgttgctttcatgaaagtttcttttcgtgctttcttgcacgaagacacaaatgtggattgtaattaggacgttcccatctgaccgatgcaggaaagttgccaatgtccgaaaggaa

SEQ ID NO: 18625 - DNA, 5361 bp, Oryza sativa
ctagcactagtggatccccctggtattactagagcacttagtataaatactaaacaatgaacccacaaagatgcaaatatatcttacttagacaaagtaattaaataacataagaaagaaacacgaatgcttactttatagaagaagttctccgaacctggagcagagtgtaccgacagctccggtactcctccagaattcctcctacgaagctacactcgttgaggtagaagtcggatgagcgccaaacttccgggcactcctccagagcttcccctcactctctaccttattctaatgtataaaagatacaatagagcctcttgtaattcagctcaaagttgtgtgttggaaatgagagtgagctcctccttttataggcaggtatgacgattacagcctatgcgaaatgaccaaactaccccagaaccgccattaggatgtgatcagggccgtccacgcaaaatttgatgatcaatggccaccaaaacggttcggccgaactcccgggatggctccgttcggcccgtttttcatcgtggacactaattttgaggccctcagcccattggcatgatagttgggcccatttggatttgtttaattgacttatggggcctccaatccgtgtaaatgtgtcctgaatgcgcggaggtgcagtttgtcgcttgacggatgtgttttcttctcaaaatacctgcatacgcatatttcaccaacactagtgcaaatgattagtaataatacctaccactatgttggatatcatgttttattttattataagaaatgcttattggtatttcttaacgacattactagaaatataattcccagtaatggcgcagaaatacttctggtatattatggttacagagttcatccgcaagcgcacggatataccattgtagcatttcacccgagagtattccaagggtatcgtatttattttatcccgtgggaaaatcatgtagagagaactcaactaataaattatatattacttgtgataatcatagtctaagcaggggttaagataatccatgggtagagtgacacacaagcatttctactcatcctcataataaataatctaaactaggtggaaagaaaagagaaagagaatctattccaatacttctaatatacatagtatacatacattctagttaactgatatactagctaataccctctattcgatgccctcctggtacttcgagaagccacccctgactgccgagttccttacgacagcccgtcatgaccatccaaccagggctaaatactgaggaataccctccccagaaaattaacttaggatatatataggcgcggaggaatacccgtactgagttgtcaccatcagcggcccacctctcatccgcaatatataaccccaaataatgatatcccgtaatctagacaccacgtctaaactaccagatactactctaatatcatcatcatgacatagagtaattgcataagcaaacattatacccgcaccaaagcatctcccagataagctagcagtatattcagtataacaagaacataatgtaaagtaggtactcgtatactcagaaagtatttcaataccataaatgtatatagaagagtattctaataaaattacaaatctgacaaaagaggaaaggaaagctgctagagccatacccgaactcttccgaagacttccggactcctgattcctattctaattctattccaccagctagatactactaaactaaacttgagaggaatgagagagctcttgcttgaggtgtgtgttgaagtgaagagagtgagctccttatatagaggtaggtatgacggttgtggaaggggaattgtccgaagtgccctccaaccgtcattgggatgcaatcctggacgtccaagccaaaacctggacccaacggcgccgggattggttcagccgaaccaccaggttcggccgaacctggggctggcccaatccagcccaatttcggctggtggcctcctctattgctccactcctcagacttgtgaattttggcccaattcatcgtgtcaattctgagttctttgcccattcatacataagtctggtcctcgacatcgtctgattgatttatcgttggtgttgatgttgattctccttcactttattgtcattctctgcaaaaaggttagtagacctaataatagtggaatattattgttctaacatatttatgcattgcaagcatcactagttctctcctgttttagtaatattgacggtcgaaactgatcgataacgaccgtcaacaatatgcaggtattgacggtcagatattatgatttaaggaccgtcaacaacacccccacacttaacctctgctcgtctcgagtgaaggctatggactctacaacaaagttatgacttccttactaataatcatgcaaacaaattattcaaagtcatacctgtacttgtggatctttgcagtgtctaccatgcaatcttggacaattgagaaatggaacaatcttaactcaagtcaccctaacttttcatgaagaacaacttggggtttttttttcaagtaacacaaaattataactttgctttgctccttaattgattctcttgatctctcaaagtgtatgattcctcacaaaggcatatgattgtgccttttcttttcctaccatctaataaggcttatgtggagctcagggtatggaaaagagtagagcattacttgcatcacatatattgcaaagtcaaataaaggatctatggaaatacaagtcatactttctggtcaagaatgcgcatgtgtatgtctatggtaaatttgtgggtggaagaaaatactataactccttttatcatcctccatttattttctcttttcatatttgggagagtgcatggctattttttttcttttttttctttttcttccattttttttcatcatcatgctccacacttgtatgaacacttttttcctttctttttgcatagccatgcctctctctcacttttttttaaagaactttggaggaagaggcataaacgacatggagtatttattttgtggactatggatgaaatgaatggtaaatgagaaatgctaacttccaatgtagaagtcaagcataagtgcgtgtatgtggagtgtatatgatcttgaccatgagagtacgaaaaacatttcactagggtcacaaaacttgacaacgctcaatgtaatgacaagcaacgtatgtagcaagctaatcatgactgatcaacctatggctctagtgggaataaaaatatcaatgaggagtttagcatcgttatatatttttttctttttataaaattcccaagtgtgcaacatgaagagcaggatttctatcatcagactatatctcattcatcaattgtctggataacatagggtccctattggatatatcaccacaagcaacaagtaatgagctaagaataataggcatgcatgttattttcagggagatcatgaactctaattgtaccatccctagcttgagtttaattatctttgatattttagaactgataatcaaattaaactcaagatagaatggatgtccaaaggaaaatttgtgcaaacctgcactctgtataaaacagaggacgattcatggtagaggtggttcagccgaacaggaggtttggcagacccctcattaggtctgactgcatcaattttccatgtgtggttcatcatggctcatcacttctggggtgatcttgcttttgttatgccgttaatgtgcaagatcacccccccacacttgtctttgtatctgctaggctttattggacacaaaaaaaaacaaaaacaagagtgaaggaaaaaggactcacttggttggaagaccaaggagccacatttattttgttttgttttatttttttccttttcttttcctttttttatctttttttatggcaacaatggatatgctggataccctggcaggatggagacatgagatgaggatgcacatggtgtatgagattcttaccagatatgtcttaccaaggtttgaaccgaatgcaagaatacaacaagttttgcatttgttctacttggttccctatgcatatcttttctcatagataaggagcgtgatataagtgttcgaagttattgtacactcctccttgattgtctttttatttcctgcaaaaggttagcggacaacaaatactcgaagcaatacaaagattttattgtagcctcaagattaattgttcacatccacgctaaaaaggaattggattcaaaacttaagaagcgtggatcccacaaagaaaatgaggttattcaggaagcgatttatactagagcagaagatatgaaggaggcggtaaagcattttgcagtgtcactacatagagagttttgggttgccaagttcaactggtcgcaatatgaagttaggtgtgttaaggaaaaagatgggtgtccctggagagtgcacgtttataagggaaaattggaaggattactggacagtgtcagtggttaccaagcatacatgttttctaactggtgttcagaaataccacatgaacattacattgtgcatttgttgcatctgagatgtatgtatgcgcatgtcatcttaggtgtgttacaagcggcttacgaacgacaatgtcgtgaacaacagtgcaactggcgggtgctaactacggcactcgctccatgggaagcccgtacaagatgcagatgcagtgatcgttgtcaggttcttcgttccataaagcctacgactttgggttgaaggttctttgtttgtccaaatattcttgacgacaatttcatggtaagaatattttgattatcatgaatccttattttctcacaatattttctaactttgttcgctttacatctattcgtttctcacaggaaccaccaaggagatgtcaatacagagaatgggtagacaccagaagagaatgggtagacaccagaagggttctactccacctagccgtgtggtgcagcttgaactaccagaggaatacagggttactaaagggtggtttgagagaggagagggatcctcacgtaggggttaactattatcggacaacttgccatattgaaatttgtaatctcatgcttccttgtcacattactacatcgtcgttgtgatcaactcttgcactacctccctcctagttcgaatctaatattatctatgtaaccgcaatggaacctgatgtatcatgttcaaattctactgctatttcttcatgttacataattctccttgtttatgtgtatataatgtttctatgaccgagactgtgataggcctatatcaatttcg

SEQ ID NO: 18626 - DNA, 1714 bp, Oryza sativa
  unsure (1)..(1714): unsure at all n locations
ccaaaagtatcattcctaatgaatatgcttcacactgttcttttaatgcatcttatgttcttaggaagaatgctagtgatcgtgttgttgctaagtatgtaggcccaaggagcaagaatatttctaatcaaaagagtgctttgggtgcctaaggcacttgttactaacatgagaggacccaagcaagtatgggtacctaaaactagaaattgatctcttgtaggaatatgtctccggtggaagaagttgagtaattgatagcagatgcaccaatcacatgaccggagaagaatcaatattttcaactcttgatccaaatggcacttcacaagataacatagtcttcagggacgatggaaagggaaaggttatgggattgggtaagattgcaatctctaatgatctttctattgccaacgttctcttggtaaaatctttaaactacaatattttgtctgtttctcaattatgtttcatgggttagaattgtctttttaccgatgttgatgtgaccgtctatagaagaaatgattcatcggtagtctttaagggtgttctcaagggaaagctttaccttgtggatttttcctgaagtaaagccaaacatgagacatgcttagtggcgaaatccaacacggggtggctttggcatcgaaggctagcccatattggtatgaagaatcttcacaagcttctaaagcacgatcacatccttggactaacaaatgttcaatttgagaaagatagggtgtgtagcgcgtgtcaagtcgggaaacaaattggagcgcatcacccggtcaagaatgtgatgaccactacgagaccattggagcttcttcacatggacctctttgggccaattgcttatctaagcattagaggtaacaaatatggtcttgttattgttgatgacttttcacgcttcacgtgggtgttcttcttgcatgacaagagtgagacacaagccatcttcaagaagtttgcaagaagagcacaaaacgagttcaacctcaagatcaagaacattcgaagcgacaacagcaaggagttcaagaacacgtgcatatagagtttccttgatgaagaaggcatcaagcatgagttctcggccccatactcacctcaacaaaatggagtagccgagaggaagaataggactctcatcgagatggcgaggacaatgttggatgaatacaagacatcggaccgcttttgggccgaagccgtcaacaccgcatgccacgccatcaaccgactatatcttcaccatcttcttaagaagactccctatgagcttcttaccagtaacaaaccaaatgtctcttactttcgtgttttcggtagtaagtgttacattcttaataagaaggctagatcctctaagtttgcccctaaagtggatgaggggttcttgcttgggtatgggtcaaatgaatgcgcataccccgttttcaacaaaacctccggcattgttgagatcgcgcgtgatgtgacatttgacgaaactaatggctctcaangtagagcaagttgactcacatgtgttaggtgaanngaggaggacccgagtgaagcaatcaagaggttggctcttggggacgtacgtcctagggagccacaacaaggggcctcttcctccacacaagtggagccaactacatcaacccaagccgacgatccctctacttcaaacgtggatcaaggtgaagatggc

SEQ ID NO: 18627 - DNA, 2899 bp, Oryza sativa
tgtgtgccaaatatatgtcgatgacattatatttggttgtactaacaagtcttttagtgaagagtttagtaggatgatgaccaaacgttttgagatgtccatgataggtgaattgaagttcttccttggccttcaaatcaagcaactcaaggaaggaaccttcatttgccaaacaaagtatttgaaggacatgctcaagaaatttgggatggagaatgccaagctaatccacactcccatgccatcaaatggccacctcgacctcaacgagcaaggtaaagacgtcgaccaaaaggtataccgttccatcattggctcactcctttacctttgtgcatctaggcccgatattatgcttagtgtgtgcatgtgtgccagatttcaagccgctccgaaagagtgttaccttgtggccgtgaagagaattcttagatatttggtgcacacacctaatcttggtctttggtatactaagggagcgaggtttgatctcattggctatgccgatgcggattatgccgggtgcaaagtggataggaaaagcacatcgggtacttgccaattcttgggtaggtctcttgtttcttggtcttccaagaagcaaaaatctgtcgccctatccaccgccgaagcggaatacatttcggcggggagttgttgtgttcaacttctttggatgaagcaaaccttgagagactatggcctaaatgtgtccaaaatcacactcctatgtgacaatgagagcgccattaagatagccaataaccccgtccaacattcccgaaccaaacacatagatattcgccatcatttcttgagaaaccattcaacaagagacgacatagacatccaacatgtgagaaccgacaaacaattggcggatatctttaccaagcttttagatgaagctaggttttgtgagttgagaattgaactaaatatcttggattctcggaatgtggcttgatctattgcatgcatgtttgtttgctagaataggtttgcataccactttgtgacaaaatggacattcaactcatggatggacactagtcatatttgtggagatcttgaatctatgtgtatggggatctcatttttcaatgaattttgttcctaacacaatttgaaatagattcacacattccctctctcgagggtgaattatcttatctcatggtaattccctctcttttgatccctcggatagatcatttgatttgtggctattgttttgtatgcttgtgtgtgctagccgcaacttcaaatggagcctttagtgctcgaccatccctccattcctttaatcctttcaaaactccttgtgaaaagtgtttttgacaaaaaaaattcccggtgctagtcccctgcaaaattcctttagaaagtttgcaaaactgtttcttcaaaattcccagcgaaatccctttgaaaaactgttttccaggaattttcggactttccgaaaaattttcggacattccgaaaatctcctgtcctgtcgctcttcattcaaagctatcccaggatttttcggacattccaaaaaatcttcggatatatccgaaaatctacagaagcgtgcgcaacctactggatcctttcggacttatccgaaaattttcggaaatatctgaaaatatcggggtctttatatttcaccccgtggactcctttctccctcctttcaactctttttcaccacgggcttgactccctcctccgctccccaccggtgaccacctcctctccgacgacctcccgcggctcccctcctctccatcctcgtgggagcgcatttggggcactacttgggacctacattgttgatcttcaccgcgttcttcaagtgttcttcgcgttcttgaggtatccaccctaaaatcaaatccttcgattcctcaagtcttatcttgcgatttcctttggtggagttcttcccctagtgcactaggacctgcagattcattttcccaagtttttgttggcggatttgtgcggcatccggatgatagggttcggaaaattgttttcggatatatccgaaaatctctggccgacccctatcacctcggttttgcacgattcttgccttcacttacttggttcttgcttctttggcttccattcactgatcccttgtctatatcttgtttgaaggatgcctccccgcaagcgaacttcccgcaaatccaagcgccaaagggaccgctctcccaccccatcctctcatgatgattcggacagtgattggtccgggagagaggatgcggctcctcagtatgcgtgggtggctcgaggcggcactctccctcctcggcggtccactcaagctcttggtggtggtggtgatggtgagggctcctctcgtcaaccgcaaacgccgccgcaccaacccaatgtccctattgctcctcttcacattcatacccccgagagggatccggcggtgattcgccaagtgtatgattggaggcggaagactgaagttgttgctcctcgctgagatgaggatccgcgcccccttcgccgcaccgccacggattcgcggttttggactctctttcaacaagacttttatgagtctgtgatcaagtccaaagctcatcccaccaatcccatgcaatggatcaactgggagtagctgcaggcgcatgatgatccggtgctcaactttgtgattgccaattgtgagtgcatgggaattcgctctttcatgactttacagcaggattggtgcaacgaagtcatcgctcaattctatgccaccgttttctttgatccatatcatgccatgcaatggatgacccaaggatcctggtctttctgtctcctatccgcgattggctgagatttgggggtttgatgtgcatgacttgctaaacctttctgatctgca

SEQ ID NO: 18628 - DNA, 2733 bp, Oryza sativa
tttcctcttttttcttttttttagttttgttttcccacacatacaatgtttccttgagtaacaaatttactaattgggtttatggtagacaatgcttttccctttacaatgaagtaccccaaaaatatcatatcagtaaaaaaattactactggttctatatagggtactgctcgttcttcttcttgcacatattacacaggcatcttctcttagtaaaaaaattactactggttctataaatggtactgctcattcttcttacacagattgtagaggcatcttctcttagtaaatagattacttctgtataatcaggtagagttgcaaatgtagtaatagatttactcttcgactaaactcaaatggcacaaaatttacattttaaccatactgccacataacgtagtaatacttttactcaagtgtatttttcacgtgaagtaatacttttacttttagtcaggtatatttttcactggatcactcaggagaaaccaaattaggagtaaacgatcaacattttcaccaaattaggagtaaatgatcaacatgtcactgtatgggtaaaaaaaattacacatccacaggcaaaaaaaaaaaagagaaggaaacatgaagctaaatccacaatgtgtcggcgtgactgcttggtacgtgttggatctggtgttgagggagcagtcggcagaggccacttcgtcggtgcatcaatcttccccagcggcgagcagaggggcaagccgtgttgatggatagaaaaattacgcatttgtcatctccagcatgaatttaagcacctcttcaattctgatttctaaactggataaagagattccacttgaaatcattcttgcaagcagcagggttaggcttcataatcctgatcagcaagtgcagctaatctatggactggttgcactgcttcccagcaatatctggcactatattttcagtggatggttccatgcacacaatatgttaatatacctgtgaacttaggctgtgtttgaggagaaggaaatagagaagattgggaagatatgcaaaacgaggtgagccattagcacatgattaattgagtattaactattttaaacttaaaaaatggattaatatgattttttaaagcaactttcctatagaaaatttttgcgaaaaacgcaacgtatagtagtttgaaaagcgtgcgcgcggaaaacgagggacaatcccccctatctcccctgaaagaacgcagccttaatgcagttgttagtaagttttttgtatgcgcttgtaaattacaccaaagctgttatccttcgacctcaccaaaccccacaactttcacaatatttcagagcttcgatgccaacagagtatcaaactgtccagccaaccaaaatgaaaattttaaaatggcttcacttggacaaaatgacattcagagctctgaaaaacatctctctcaatgaagattctccatccatctttcagccattcaaagaagtattcttaaaaaaattcagaggactgtttagcctatcagctaggtgttgtgctgaactacgaaatttcagaagctaataagatatcaactactactacaaaatttcagaaacttatcaggtagaaaatttcagaaactgctagcatatcaactaaatgttctcagaagactaatgaaaacaatacaagaggcagtcgagctgctctgctctattcaggaggaaaaaaatccccaaaaataaatcctagttaccaacatatttggatgcatgtgaaaaacataccgcaggcacccagagagatcaaagcatgtgaagggtcatatttgtacctggagggtggggtgttgatgatcttgttggcaaaaatagccaatgcagagaaacaccagagtatgtgcatgttgcaggtggtgttctactgctctgatcaggaaacctgcaaatcaatgaaaacggaatgcaaaacagatgtatgtatcccaacaaagatctgatgcactgttgtgtacattatgaatctctgatcaaatgcctacgcctggccaccgccggaagctgccgcctgctcctccaataggtctcaacttgggggagtggagcagcaccagtcgtcgctccagccaccgcaggatgccaccgccctctcctgctgacggtcactcggttggaggggagcaccaccaaccgtctgaatgcattatgagaacagtactcagcaggcatcaccacagtgaaatctttgcaaaatcaatgggcgtgtcagagaaaagaaggaaagaaaacgaagacgaacaggagaaagaagatgatcagatcgatggggttgatgccaggcgcacagaggagacgttgcattgcagcatcactggcatccctttcttctccctctttgtctctcttcgtggggaaaagaagcaagaagcacctggatctggtccgccgcatcactggtgtggatatggagccggcaacgaccagtcttcccacccctttgatggcatcgtcgcccacctcgatggctcggattgcaccagccaccgcatggaggaggtgaaccggacgccgggatgtggcctcctctccgccgctgtcgattccgtcatatccgccctatccaggacctccaccaccatcggcagagcaggggactaagcataagtgaagagggaacaaaccatcgccgcgtccctgatcctcctccatcctccacctccgctgcagtgctccgaccctagggagga

SEQ ID NO: 18629 - DNA, 2293 bp, Oryza sativa
gctatagccggaaccacgctggcagaccagcaggggtcgatgcccgaagcaatagataggaaattacatttgcttagcttagataattaaaacacatagaaagtcctctctagcccacctaccactagttgttgtcctttgctagtcttagccttaggtagattacacacgttccctgagttcgatatccttttggggtcacccgaaggtgaagtgctacagcagtattctgtgcgcttgcggatttatctgtggtcgcaagaaataccaacagtggttgtcctgttggtgcgcagttggttgggggtgaggtgtgaggtagggatgaaaacggagcggatatggacggataatgtttataccatattcgttttcatatttttttaccggatacgaaaacgaatacggatagctcgaatacgaaaacaaatacggattatctcgaatacgaataagaatcgaatatgatcggacacgaatacggaaataaatttttctcggaacacgaaaaccaactcaacttctaatagaaacaaatatcaacatatataattagctcattttatataaaatgaggtataatttataaatattttttaaaatttaaataatattaatagtatggactagtgttagagataaactactattaaaatctataaaggtatattgaaggttatagagttaaaaagaaatggggtatgtctcatgggtcctgcggatatccgaatagcactgttcaccggatatccgaattattatccgtatccgacggaaaccctggtaccatattcgtatttgtatccgggagaaaatatccgtattcgtatctgtatccgaactatccgagaattatccgatccgaaagttatccgtatccgtttttgtccggagcggacggaaactatccgctccgttttcatccctagtgtgagggggagtgttttagttattaggatgcggtatagtatgtctatatatagacacacatatatatatatatacacagtggcgctcacatgcgcttcgcgccacggtttaaatggcgccacacacaaatgaggaatgtcagcccaccaaaaccaaaccaacctattagagagttaaaaattaactgacggaaattgtggcgcaaacgatacctgcagttcgcatgtcaaagggagagcgaatgtgatagtaaaaatttaactgttttaaatattggtgatgagttaagatgttgcagataacaagttaaatttttaccgtggtccacccgtacgacagagtcatgtttatgttaaaatcggtggtggttgattgtgcatatgaggtcaaatagtttaaaattaacttgcatagaccgatcggtgatgaagacgttccgtgtgtgagaagttatagtttaactgattgagataattgttttgcctttcgatgtcgcatgtaaggagttaaaaatttgtctttgtttcgggagtactatagggccatggggagaatttaagtaaacgttggcaaagttaaaaaataactggaatgagcctatagatgctgaaagacgtatcagaggatttttttacacgacatgatttacatattgttatttaataactttacacgacatgatttaaatatagttatttaataactttacgtcgctatgctgtggtggcattatggttgtttatccatgcgcacattactccagatatatcgcgcatgcatgcaaacaagaatcgctacaaaatcgctgagattgtttgccctgatatgtgggaatcaaccatcctgtcagtttccccaatataaactgcccggctcatcatttgtattacgcagccaactcaaccatgggtgataaacaagagaccgaatccacaaagacacattttgtcgatcccactcacaaccccaccaccgatgccacgctgcaacaggatgagcatgagagtgatctccccgaagagtttggggtgacaagccctcctccactgtcgccacccccttacccgctgtcgccatcgatggaagatgatggcatgatctacgcggaggacttggggtacatgtctaccctatgcccttcccccccttctgacgttgacgatctaaatccgccggaagaccccaacaacaagattattctgcacccagctttcatcgacgacggcggtgaccttgatattatacaagaggacatttacaactttcgatatgaccagaccccgccaagagatgctcagtcaccagtaacccggttcaagcgccataaacgtgattagttttgatatgtctatttaatttttgc

SEQ ID NO: 18630 - DNA, 2119 bp, Oryza sativa
tgctgcaaaaattaggattcaaatatggcattaaaattaacaaagtagcacccgacagacaaaggccagcattaaaaaaaaatactctttaccttctgaaaatgtgatatgtcattgtcagtcagctttgcacattgtgcacgcagatggtcgattttttgtttggtaattgcctctttcctctgttcattttcaaaatattttgaacccttgctcatttcgtagattaccttctgcaccttctctttgtcaactccctccattcctaaggcagaataacaagagaataaagaccaaagccatgctttgcacactggggttccatgttgtttccacagatatcacatattcacctaaacatgtaatataacttcctaagtaaagctccatctaattcgtgttctctctaccttaatcttttggatttatttgtaccagtgatttgcgcgatgcagaccccctaatgcccaaaaccctaccccctactggcaacaatcttacgcgacgggaagaggggaaatgcacactcaccagctttggcgttggtgtaggcggtgtggtacgactcccacggcctatctcctccgccatcgggtggcgtccccgccatcgcgtgcgacggcgaggttcttccccccaccgcaggcgggcgtcacgcgaggctaacagaggatgggaaggactgatcgagccgtcggtacgtcgggcaccggcgagctctccgccgtcgttggcaatcaggacgaggaagaatggaggggggattaaactccggcgaggtgaggtcggctccgccgccagccagcggtcgcgcgcgaggaaaggggttgccttttcctctcttttccttagaaaaaatgtcccgcccgtgggtgaaagctattttaattttattattagcttaggtaaagtaaaatttattatagaaataggatatatatatatatatatatctttttagaaaattataagctgtaattaggagtttgatcgtgtcaagttagcatgtaagtttttttttaaaagatttcttatacgacttcatttgtatttccaaaaacgaacgagcttgaaaactaactaaaatacggatttgtattttcaaaagcgaaccaacttaaaaatcgactcatagacggatgatttactaaagtacaggtaaaaacatctttaatttttataataaaatagagatttcaattaataactttttcttttttttctattcttctgtgagcggaagggaaaatttatattcacacaccacttctgcaattcgaacgctttttatatgagtttctaatgtttcaatgtgcatctttattattttaaaagaacacttattattttagtgcagctttattattttattattttagtttgctaccatgtataatcatagatatatacagagtttgtcagggttatggataaggtataccgtctatcctcggatatacgatgggtaccgatacggtatacccgcgcgtgtacgaatagtttccgaatacattaaggaaatctatcccgcgatagaagcagaatctacgtttggaaggagtcctacttggatgaggctgggtttttaccatatcgtgaggactccgatatctccgagtcctacttggagatcaactgacctgcggtatataagggaccccctgggcgggacctaaggcatcgaatctcaccgccaacacacccatcacagcctacggagccggagcctacaggagtcaagtcgccgggagatctagtcggaccaactcgactatggtctcgtcggtatcatcgagttctgttattccctttgtaatctgtggtgtccatcatataatcccataccaactggattagggctgacggagcgtggggctcctcaccgggagaccgcgcaggcccccctttgccggttcggccgggggcgctacgtgaggttcttcgcccttgatctgaagaacgtcagcgagagaggaaatgcacaagacacgagcgacgtagacaggttcgggccgctgagaagcgtaacaccctactcctgtgttctggtggatctgtgcgtgaaggaatccagagagccggagagcgagagagagttcaggctctcccgcccattccc

SEQ ID NO: 18631 - DNA, 2423 bp, Oryza sativa
aatggatctgaccgggactgacataccaactccaggagttagcacgccggctccggctagggacgagagccaggaagctctcatcattccgacgggacggggcgaggcgtgtgacaggccgcctgttgccacctaacccgcgatctgaccggtctgtgaccggtcacacaccgcgaccggtcacggaccggataagcgtgcgcggcgccgcattaaatgcggcgtggtgcactcgtccaacctgctataaatgcggcgaggtgagccccgctgcgctcacctaacccacacacgtggcgccaaaaccacagggggtcggggcgccccagccctcggggccgaaacgggagcggtccgacccctcggggagacagagggaggggtggccacgtcatcctcgggcccgacccccccgagggggtcaggccaagtgggtgaccgcggctacccaagcctctagtcacgatacctccggccccatgtcaccgacagtagcccccggcgttacgccagggcgatcgcccccctcgagggaagcgctcgggcgtgacgccactccttaggcccggtgacaggtggggccggtccctacaggcggacagaaacccagcggtcgcaaatcgcgcgcatcggcaagggaaaaccgaccgacaataatgagcggcctctttaagaccgctacattactcgagcagcgcgcgaatcgggatgagccggttcgtttcgcctggagacatgatgatggcgcttttcacggttggcaaccgtagttaatgcgcgcacaatctgccccatctcaaccgccacggccgcacatttgccgcgtgcgccgcaaacgggcgagtggggttagtggaggcgtgggcgcgagaaacgagggggcgaggtagtgggcacgggaagcgaggagccgggcatagcgttggcaagggtgtaaagacgccgagaaagggattcgtttctttcctctcgccactcttccccttgccttcgccacttgtgctctaactcttcgtttcctgtgccctacccttgccgcactcgctcgctctcaagctcctcctccgccggcgtcatggcacggggctccgcaccgctcgacggtagcgtgctgccgccttcccgcatcgtgagcgagaggcaggccaggctgccgcgccgattcatgccggaatctgccaccggccgggaggtggtcgcgctgggcgagggacgcccggcgccacactacccggggcggtccgtcttcttcctctctttcgcaatggcggggctggtcccgccattctctatttttttcatggatattctggagttttatgatctccagatggcgcacctcacccccaacgcgataatgacgttggccatcttcgcgcacctgtgcgagatgtttatcggggtgcgcccatttctccggctgttccggtggttcttcaccgtacagccggtgtcgccgccgacggtagtcggtggctgctacttccagccgcgggggcaggtgctgaaccgctacattccctacgtcctccgcaaaaagtgggacgactggaagagcgattggttctacaccccctcgccgacgaagcgcacctccgacttccgagccagcccccggcgcaggcctccagctggcgggcggcggtagatctgggagacggctacgacgccgttcttgaccgcctggcgggctctgcgaatcccaggggctcacgggggccatgtgttcggcgactacgttcgtcgccggatcgcgccgctccagcggcgcgcccgaggcgcctgggagtacaccgggcccgaggactacatgaggacccaccaggggcgcaaatgggactgggaccctgaggacttcaggatggtggtccaacgggtgctgaatctcagctccgtggaggcatccctcatccctcaaggggtcctccccctctgctgcgatccagagcgcgccaagattctggccatcatgcaggcggtcggggcgtcgggggagcgggccccccgaggccacgatggcgtgggcgggagccgcaggggggaacaatctaccccgggagggggtcgtgcttctgggccccgcgacgggggcccggggggcagccgccctgccgacgcccgggggaagaggaagcaggagggtacccctcccccatctcctccccgagggggcggggcggtgcgtgccagcagcaggcgcccggagggtgccgtgccgacgccgcagcccgagggggagcgaaagaagaaacggccccgcaagatgggggggatcgtgccatgccgggggaacctcatctcgccgccgaggtggtcgtttagccgacctccccgcaggttcgtccccgcgcccaccgcggccgtattcattctcccatctcccaaggcgagttttcactcacccgtttctttttgtcttctgg

SEQ ID NO: 18632 - DNA, 1917 bp, Oryza sativa
atctgcaatcaagtaaaaggaaatttctgcgtcagttcagtttgttgtgtgtgcgagacgaggatggtctgtgccgcggtccttctgtgtcttggcttgaacaagggctcgtgcccaggtcctagcctcaaacggcgcgggtcggggctagtgcctggggagatcctcgtgtcgagactggccaggccgggagcgcggtgaccgagggttatggatgacccgattgtgggcctttgccgattcccccccggagttcaccacgccccggggcacggctcggttttgggccccgtttggcgattttagccggcccgggccaccgagggcagggtcgagcacgagcgtgctaattcaagccaagattcttcagaaggaaacgatggcacagacacagtcctcaggaaatcgaaaatgcttttattgaaatacggaagagaaaaaaggtaagtatatgcatgtggtagcccccggccaaccctgcacgcccgggggggggggtgcggggttggcccgagcccgagacatgacacccgacccccactaggggtagaagcgacgaaggtgttcgatgttccacgggttaggcagctctgtgccgtcgcccgtggccagccgaacggagcccagccgggggacgccgatcactcgatacggaccctcccacattggtgagagcttgctcagtccagcacgcgtttggacgcggcgtaggatgaggtcgtcgacgcagagtgatcgggcccggacgtggcgctgatggtagcgccgcaggctctgctggtagcgcgcggctcagagggccgcgcgccgccttcgctcttccaaatagtcgaggttgtctcggcgaagctgatctatcagcctcgcaatacatggtgacccgaggggacctcagggtgagctcagatgggaggaccgcttccgcgccgtagacgaggaagaaatgcgtttccccggttgctctgcttggcgtggttcggttcgcccagagcaccgctggcagctcctcgatccacgagtcgccgtgcttcttgaggacgttgaaggtcttggttttgaggcccttgaggatttccgcgttggcgcgcttcacttggccattgcttctggggtgggcgggggaggcgaagagctcactagtgaactgggtgccgttatccgtaatgatacggttaggcaccccaaaccgagcagtgatgcccctgatgaatttaagcgcggagtgcttatcgatcttgatgaccggataagcctcgggccacttagtgaacttgtcgacagcgacatacagatactcgaacccgcccggggcccgcctgaacggacccaggatatcgagccccctgacagcaaacggccacgaaagaggtatggtctgcagggcctgggccggctgatgggtttgcctggcgtggaactggcacgccctgcaccgtcggaccaggtcgaccgcatcgttgagagccatcggccaatagaaaccctggcgaaaggccttgccaaccaaggtgcgtgaggcggagtgggctccgcactcgccttcatggacatcggcgagaagctcaacgccttgttcccgaggaatgcacttcaggaggactccgttagccacgcgccgatagagggtcccttccaccagcacgtagcgcttggagatgcgccggacgcgttcactcccttcgcggtcctcgggtagagtcttatctgcgaggtacgcctggatctcagtgatccaagcaatcaatctaggggagctgggagcgctcccctcgggtcccgaggcctggactccgacgggcctcgggggccgttcaggcgcgtccgtctcccctagggggtcgggtcgcgccgatggctgggcaagcctttcttcaaaggcgcccggtggggtctgggctcgcgaggaagcgagcctta

SEQ ID NO: 18633 - DNA, 5858 bp, Oryza sativa
tgcaaaattataatggcatggttccaattcaccctagtaggtaatagccctaatccagttggtatgggattatatgatggacaccacagattacaaaggaaataacagaactcgatgataccgacgagaccgtagttgagttggtccgactagatctcccggcgacttgactcctgtaggctccggctccgtaggctgtgatgggtgtgttggtggtgagattcgatgccttaggtcctgcctagggggtcccttatataccgcgggtcagttgatctccaagtaggactcggaaatatcggacccctcacgatatggtaaaaacccagcctcatccgagtaggactcgttccaaacgtagattctgcttctatcgcgggatagatttccttaatgtattcggaaactattcgtacacgcgcgggtataccgtatcggtacccattgtatatctgaggatagagggtataccttatccataaccctgacagtagcccccgacttctgcttaaatgaactcatgtagtcgatcatgactcccaatgtcggaattgttgtcgttctcatctggttgatctcggtgtaaaaaaccatagagacaaagagccatcgacaacatcgcatgaagtccaacggtcatgagtgaatttaaattgaagtctgaaaactaccgagcgcaacgaacccaaaaatttccgacggcaatctctctcctttccttggaatacgcactgtcggcagagcgcttattgaaaggaattttgggaatccatttgaagtccgtttgccataaaactcttctgccttctagcgcccttcgtcttctctgttccccgcaaagaaaaccctagcttgcttcttccctcttgtttctcggcgatcctccggcgacgatggaccttgagaagtctacctcaaccacagggagacaggaggtatagaacctgaacccatcatgtgccacatggttgtggtcgaagattacatttcttgcgattttcttcctccgccttcggaatttcttcttctcgtcttgaatttctatggcctttctttgcttcacttgaaccctaactccatcgcattccttagcatcttttctcatctttgcgatgcctacattggggtagagcccttccttgatctattccgcttttactatgagctgcgatggatggaacccaacagggtatctggatgcgttggattccgacttcaggatcgcctgaagtcgcgttacatccccttccaatgcccctcttctcgcagcaagtggcgggcgagatggttctatcttcagatcgaaaactcggatcccgtccttgttgtccctgaagaacagccagaccaaatcccagagtggactgccaaacccgccctgactccctccctccaatcttttatcgagatcgtcgatgatctccgaaatcgggggttgtcggggtatgaagtcgctgtcgacttcgtaggtaggcggattcaaccgctgtaggcccgcgcccatccggcctttgattactctgggccagaggacacgacccgggtctctcctcgggatattttttttcttgcatgtcacatcctgatttttgtttcaggatttataaatcatttaataaattattattagaatttatattaaatgttctttaatttacaagtgaagttaaatgtgggaaataaaatttcccaaatataaagcatggatggatttaatttttattaaattctccatgattaagtcaactctctgaaatattctcggatttttcagagctcaattcctaaatgatacaaagaacagttcagtaattatttgatcattaatgatctaattataattgttaagagcttttcttgtttaaaaatccttaaattataaattgttggttaaaaggaattattagaaatgatcttaaaagcctaaaagagaagatctaattttaatttgctaaatctcaatataaaattgggctagataaaattttgttaaatacttctcttgaatctttagttcctagatttttctgggatttatttgagccaaggaagtatttttaataaatggaattgcatttcatgaataatttaaatagaaaaaggttttaaaatcctccttttggctttgggccgaaagtcagcccaagtctctctttccttctccctctctcctccccggcccagtcggcccagtccgccgctctcctctctctctctgtcgctgacaggtgggtcccgcctgtcggagtcgtcgtcttcctccggccgccgccgcccgaaccctagcgccgcgccgccgtcgtctccttccaaattcggccgcgcctttccttctccggtgaaatctttagaggggaaatgatctccgggatctcctctaccttttctcttttggaatcgtcggctaatttcctttggaaataggcggattcgagtttgattcggattcgtgtttccccaatctttccttccgacgccggccgccgtgggccttcgccgccgcctccttgcccctataaaaggacccccggtgtctcctctacccgccgccaccctcgccttcgtctctcggccgtctgttttggataggatcgatctcggccgttcgttctcgtgaaccgccgccgtgcacccggtccaccgcaaaccctaggcgatgacgcaataattcccttttccttctcaaaaataattcattattgcgtcataattcaattaaaatccatataagtgttttaatcctatttaatctttaaaaattcataactaattctttgtaactcagtttaatgtggttcaagttgcaaaagttgtataaaataaagatctacatattaaaattatccataaattgaattaaatttatttaattctttttaaatgggctttaattagatttaatcttgtaaaattcataataaattcatatgaagtcagaatgaggccgttcaagtctcataattcatctaaaattatgatctacatgtttgtttactttttatgtattgtttatttggtttttattagtctttttcttcgttttgcgtgttagcttgtcgtttccgtcgttgcgaaggttcgcgagtgcgccggaagtattcaagaagattaattgaagaccgattattgcaaggcaagtcccacagatcctaaacacaatcctttgagcatgttgatcctatatttaaattctctatttatttcaactgtgcatttattttcgaatgtcactgggtggtgtgaatctattcctttgttatggcctgtttgcattgattactttattccttgataccttgggttattataacttgactagttgagctatatatattggttcagctagatattagatatgattgcttagccatgcttagaaacattagcacactattgggattacttatgactcattattatttaatgatggcttaatgatagttcacgatggtcaatcgtgattggttaattaattacttgccaactaaaacttgataatggtgggttgtgagcacatggttttgagagtcgtgctcatgacaattaaggaccggttcgcgagctactattgtgaaacattaatcgtgccaaccacaagccagcgtgggcaacggctttaccttttgtatagcatggttcattgcggagcaccagactgagaagtggtggagataagcccacgggggtcgctggggagtccatgccttgtttataagggggtgactatgatccgggaacggtgcactgtggtgggttgtgttatgcaaggggtaatgtcacagctcctttccgaggtaccgtggtggtaccgaggcacatggtgacatgttgtggggctgtgtcttgtgggtacagtggtacacctctggccagagtaaaactattcgaatagccgtgcccgcggttatgggcaggttgagcaatgtttttcgtgattagtcccacacctctcacaataattatggatgttatatctggtaataatttgcttagctcctggtttggagttagatctgtacagccgggtatggttgttcaggatggttgggcctgtgcagcatgggtgtgttgttcagtgttgattaaaatttctgattaattactccactgttttacttctcttaaatgttttgctaaaagctgcttttgcaaatgagcctatattatgccatcctttggtatccttgtgcacttgcatatttgctgtgtggcttgctgagtatgtcatatgctcaccttgcaataatcaatcaacctcagttaaagaaaaaggatccagaaggagaagacatttggcttataccccagttgagctgcctgtgggagtggagccggagcttcgctagattttattttccgctgcagttttcttcttggtgaggacttagtgcctcttaagtaagtatttattgttttagttaatttgatgaatctgtatattaaattgtcagtttgtgtacctcggctgattcctggacgaggattttatgcacaaataagttcggaaattactagtgaattttcgggcgtgacattgcatttctaatcttgttccgagtgcatctgtttctcctgacttatcgagttctcattttcgattcacaggtctagacagtgacaccgtggggtgccgcgtcagtcaggtgatgatcagcgccccctcagcagggagcgacatcccgatccccctttgcgaaaagggcccagccgaacgcgccgctgcgatcaatgtgagtgtactcgatgattcctttacatctttctccttgagatcacgtcgtgacttcacattgtgcaggctctccctttacggacgtcatcgggccactagtggaccaccaggcggcggtgtcattgaagaagggcgtcgccaaggaggcgtccgacgctgctgctgctaccacgagtggcagcaatgttccgaagaaggggaggaaattctcctccgtacttgggacccgtcggaagatgccaaactctgctgtaagcttctctatcgttccctagtgcgtagtcggaacaatttgatctcataccatttcatcttactcaggactcggacgcgtctcctccgcctcaccgaaggcaaaggttggtgactatcggcgagaagtaagtaaacgttcttgagatcttgttattttccaaattccgatcacctcgcctcatggggaagagaaaaaactttgcagggcggcatgggcaaaggcggcgcaaggcgggactgatgccgcttccagcgcgtcccctacggcgacctcgacaggagtcgtggtcgctactatggaccaggaggtggcaccgagcggccctgccgtcagcctcgtgcctacccggggtccgtccaccgatgccctcacctgggggggagctccaagcagagatggagcgcatcctctaggccggtactcgcggcgtaggtcgcgagatcgaggaggctagggcggcggcggcgtcggcaaaccagcgtgccgaccagctagtgcgcgacctggcggaggcccgtgaggacctcctaaagatgagggagctggtggccggcaacgagatgcagcggcgcggactcgagcaccggatattggagctcgagggccatatgattgacatccgcggttcgctgcgaacatcgttcaccagcctgcaccaactcgccggggagtgtggtgtcacgactaccatcccggcgcaccccgatgagttctcgctgacgtcatcgcttgtggaactggctacggtgatggaggagatcccctccaagcatgcggctaggatcggcgaggagacgtccaacggcatctacaccggggcatgccatgtccttgcgtgcatgaggctggcacatcccgatctggacctta

SEQ ID NO: 18634 - DNA, 1894 bp, Oryza sativa
cgcgggcagcccgacataccggtgatgttcaggcgcttacgctcaagccgttcgtgcagtgggaggaaactagtcaaagcccatccgcggaagtgaacatggcgatgacgtcgctaggtttgtatcttgcacttcttcactccttgtgttcggattgacttgattagctgtgttctcggaggagaagaatagcttgacttagtcttttcccatagtcttttccctgtcgggcagatttcgagaacatgttggctgaccgagatcgtcgaatccaatattggaggacgaaactcgaggtggccgaactcaaaaaaaccatggtggaggtgaagaaggaccaggccgtggaagctcttcgaggtcgcaaggtgtggttcaactcgtacctcaagagctgctgcgcggtgatggtgagggtttgcaaggagctatgatcccgaggagatcccaagaagtcggcggccagttatatctcgtggttgaatggagccagtgcacaacttgaagggattggccagcacatcgacgatgccttgaaggaggagtgtcgtcgggcgagccgctacgccggaggtcatgtgctggcctgcatccgagatcaccgtccgcagctgcaactcgagttccttcgtgaggggttctcgcgttcccggaggacacccgcggagatcgacggtcttgcacagtcaatggcgctgcttgccgagaaggttttccgctccatggattggtgttggccgtcctggtagtttttgtatcctgtagaaaaatatctcaaggaagcatgtaatatactttgaagtatttatgacttgtaagaaatacttgtaaaatagaaaagggatctatctaactaagttttcttactctgggtatgttgcgtatgagtgttttctcactttgcgacttcgatcagtcacttgagctatacactctccctagccccagccttgtcatcggagaatcgttctcggaggataaggctcttagatccttgacctgccttggttgaaaaaagcattgaccctagctcccagccgtgaagttggaaaactcaatttccgattacacggcttggttaatacgcacggcctgaactcttacatgaccagatcttacatggtcatttgtctctacatgatctgacaaggccttatccgctctgggcgtccccagccgaagttcccttagattcctcagaggctttgccaggacggcgtaaagggacatgaggataggttttaactctaggtgtcgtcgtggtaacggatcgtcgggaaggaacactctgacaatattctttacctgaaatcaactttattgaaatcgtgagatgccttacaaatttggagactattgatttatacataaaatttacgtaattgatcaatgttccaggaatttgctaactcgcgaccatcgtcgtctgcaatcttgaatgcacatggccacaagacttgcgtgatcgtgtatggtccttcccacttgggtgagagcttattacgccctgcttgactttgaacccatcggaggacgtaatcgccgatcgaaagtgtgagtgctctgatgcgcttctcgtggtatcggcgaagggcctgctggtagctggctgctctgacggtaactctttctcgatgttcctcgagtagattcacatcgtcacttcgctgctcctcctgttccttgtcggagtacttctgtactcgtgtgctttgatgttgtagctccgtggggagcatagcctctgagccatacacgaggaagaagggtgtctccttattggatgttgtcggtgtggtacgcacggcccatagaacagaggggagttcttcgacccacttcttatcgtgtgacatgagtctgtcgtagacgcgggtcttgatcccttgtagta

SEQ ID NO: 18635 - DNA, 1954 bp, Oryza sativa
taaaagagaaagggaggagaacagttctacttttccaatatttttagagggcttctatggataaccatttggcataacctagggtcaaggggctctgataccaacttgtcaggcccggaatttctatccaaaattccaaacgcttacatgtgtgtgaaccctcgtccaggaatcagccgaggcacacaataacaaattgatattagagtacaattattactctaattaataagcgaataaaatgtcattacagaggtagatagttcctctcaatcaataaagatctaagcagcggaaaataaaataaacggcgcggacggctccactccacaagcagcttgaccaaggctacacctaatcctccacaccatcagcatcattgtagaactcttcctctgatgaatgattgcaaggtgagtatatgacatactcagcaagccacgcagcaaatatgcaagtgcacaggataacaaaggatggcatagtagggtttcatttgcaaaagcagcatttagcaaacatttcagaatttaataaaacagttaagtaataattaaacaatattaatccaacgctatacaacataccctgttgtataggcccaaccattctgaacaaccatcctggctgcacagttctatctccaaaccaggaatataccattccaaaccaggagctaatcaaattattaccaattatagcatcatttactatgatgagaagtgtgagactaatcacgaaagacattgttagacctgcccataaccgcgggcacggctattcgaatagttttactctgatcagaggtgtaccactgtacccacaagacacaaccccacatcatgtcaccatgtgcctcaataccaccacggtacctcggaaaggagttgtgacaataccccttgcataacacaatccactgcagcgcaccttcctggatcataatcacccccttaaaaacaaggcatggactccccagcgacccccgtgggcttatctccgccacttctcagtctggtgccccgcaatgaaccatgctatacaaaagataaagccgttgcccacgctggcttgtggttggcacggttaatgtttcacaaccgaaactcgtgaaccggtccttaattgtcatgagcacgactctcaaaaccatgtgctcacaacccaccattatcaagttttagttggcaagtaattaattaaccaatcacgattgaccatcgtgaactatcattaagccatcattaaagaatagtgagtcataagttatcccaataatgtgctaatgtttctaagcatggctaagcaatcacatctaatatctagctgaaccaatatgtaaagctcaactagtcaagttataataacccaaggtatcaaggaataaagtaaccaaaaacaaaagggctataacatataataggttaattccacccaatgacattcgaaaataaatgcaatagttgaatagaaacaatagctttaaacgggatcaacatgctcaaagggttgtttgggatctgtgtgacttgccttgctggccttggaactcttcaaactcttctcctgtgaaaacggactctccggaaacgacggaatctaaacagaaaagagcaaaatcaccaaaacagcacataaacaagcatgaacagttttattaaacggaatctcgtcctcgagattcggaagaactggcgaacagatgcggatgagctgacttcaattcatcttctcgttcccaagttgactcttcttccgagtgattactccattggactttgcaaaaacggataacccgattcctggttcttctctcatctatttccaagatacggattggtctctcaacataggtcagatcctcttggtcttttatctgttcaagattagcttcttcggtaggtacccttaaacactttttcaattgcgaaacatggaacacattatggactcc

SEQ ID NO: 18636 - DNA, 13371 bp, Oryza sativa
catgtggattttttaacatgtagatctcaattttagaaaaaattagagacttgaaccaactaaaacggagctaagatgaattagttatgaatttttgaagattaaatcggattaaaacacttaaattgattttaattgaattatgacgcaataatgaattatttttgaaaaggaaaaggaggattattgcgtcagcgggctagggtttcggtggaccgggcgcacgggcgacggttcacgcgaacggacggccgagatcgatccatccaaaacggacggccgagatcgatcgttctacgaccggctcacggaagagggcgacgatgacgtcagcgatgacgtcaccaccggcggcggcggctcggcggctcgggcttgcatgctcgccggcgaacggcggcgcttcggcacgaacggagagcaccaaagggtagagcgcgacgcggcgaactcaccgatgaccaaaggagcggcggaagaccaagggacggcgacggcgacgacgaagaaacggcggcggtcttcgggtcgacggcggcgatggtgctccggcgatcttcggcggcggcgaaggagcggacgagaacggcggcgacttggcgatcacgacggtggccttcccgagcgatgacgacgaccgagacggcggcggcgcacagctggagcgacggcggcgacggcggcgctaggttgcacagcgctagagctcttccggcgacaagaggcgaaggcgagagtggcggcaggtagagaagagctcgggggtccttttaaaggggctaggaggcgacggcgaaggcccatggcggctggcgacgagaaggaaggtttagggttcggaggagagagacgaatccgattcgaactcgaatcaaacacattccaaaccgatttagccgatgtttccaaaggagaaaaggtagaggagatcccaaagattgtttcccctcaatcaatttcaccggaaacgaaaaggaatggccggattttggaaaggaacggcggcggcgcgaaactagggtgggccccacctgtcagcgggcggacgcgcgcgcgcgcgacggcggactgggccgacttgggccgaggagagagagagcggttttgggccgactttcggcccaaagccaaaagaagactttttaaaacctttttcaatttaaattattcatgaaatgcaattccatttattaaaaatacttccttagctcaaataaatcccagaaaaatctaggaattatagaattaagcaaagtatttaatgaaattttatctggccccattttatattggaatttattaattaaaattagatcttctcttcaagacttttaaaattatttctaaaaattccaattaaacaacaatttatatattttgaattttcagggtgtgacagtagtcttgtgtgtttgctgtgaaattgacaggcttcacaccgctgaaccatgtcgcaggcgtctttgagcgcggttggccagaaaaacccttgtcgaaaggcttttccgaccaatgtctgaccgccggcgtgtgacccgcagatcccttcatgtatatccaggaggagatgtttgccatcgtcgaacgatatgcatttgagaagtactccgtttggcgcctttttgtatagatcgttgctgatcatacagtaaatcttggcttgtcgggttatcctctcagcttctgcgtcgtcctcgggcagctcatcactactcaggaacttgatgagcggggtccaccattcttatgtggtctcgatgtcggcaatgacgtgttccgcctctgtagcccccgagatgatgtctggggaacagccgtgctatctgcgtcatttgcttctttcaccgatggttttgtcaagacgtccagaaaagtgccaagttccagtggctctcgtctggatgcgtgccgtgctaggtcgtctagttcgatgttgtgcttacggtatacgtgtcggacctcaatcccatcaaaccttttctccagcttcctgacttccgcgaggtacttggataactcggggctagagcacttgtagtctttgtgcacctggttcgcgactagttctgaatcccctttcacgattagttgcttgactcctagtgcagctgctgctcttatcccggcaagtagtccttcatactcggctgtgttgttggtcgccctgaagttgaggtggattgcatgcttgaactgatctcacaaaggtgatgtcaagatgaaccctgcccctgctccttggctgttgagtgcgccgtcgaatgccattgtccatgtttcgctgtccgtttgactgtccgacctgttctcaagcatagtccagtcagctaaaaaatcagcgaggacctgggacttaatagctgttcgtggcacaaagtggacatcaaactggcttagctcgactacccatttcgcaatgcggccaacaacgtctttgtttctcacgactctccaagagggaaggaggaaacaactgtgactctgtgggcttgaaagtagtggcgtagctttcttgatgtcatgattaccgcataaagcagcttttggatctgtgggtatcttgttttcgcgtcgtggagagctgcgctgacgtagtaaaccagtctttgcaccttcgctctctcgacaatgatgatagtactctcagaatatggcgtggcagcgatatagaggaataactcttcattaggttggggggcaacaagtacagggggatctgacaggtagcgcttgagtgcaatgaacgcatcttcggcttcctgtgtccacacaaatttgtcttgtttcttcagcagggtgaagaaaggttgtcctcgctcccccatcctagcgacgaatctgctcagtgccgccatgcatccagttagcttctggacttccttgagtcttgtgggtgacttcatgttctcgattgccttgatcttctcgggattttcttcgatccctcttccagagacgaggaatccgaggagcttgcccgatggtactccgaacgttcacttctccgggttgagcatgaggcgataccgtcggaggttgtcgaacgtttcccggaggtcatcgatcaatgagtcgcttgtttttgtcttgaaaacaatgtcatcgacgtaggcctcaacattgtgtccaagtaggtcattgagtgccccttgaaccgtgcgctggaaagtgtttcctgcggttatcagtccgaatggcatcttgacgtagcagaatacgccgaacggcgtgattaatgttgtcttctcctcgtcctcttttgccatgctgatctggtggtagccagagtaagcgtcaagaaaacttaacaactcacaaccagctgttgagtccaccaattggtctatccgaggaagaggaaagtgatccttgggacacgccttgttgaggtcggtgaaatcgacacacatcctccatttcccgttggccttgcgcaccatgactgggttggctagccactctggatgaagaacttctctgatgaaactagctttgagaagcttgtcgagctcttctcgtatggcttgtttctagtctggtgcaaatctccgcagtttttgttttactggcttggcatcgggtcgcaccatgagtttgtgctcaatcacctcgctggggactcccggcatgtcggacggctgccaagcgaacacgtctgcattgtcgcagaggaaggtgatgagcgcgagttcctatttcttatccagtgacggcccgatcttgacattcttgtcggggttggcactggagagcggaacgatcttgattgcgccgtctggcttcggcgttttgttggtttttcttactttcttgggcggctcagttgtggcgggcgggttgggagtgtgctcgaccatgtcgaggctccgcttgtcgcactgcactaccagcttcgtgtttccctgaatagtaattgttcccttcggcccaggcatcttgagcacttgatgcgcgtagtgagatgcagccatgaacttcgcgagtgcattcctcccgatgatggcgttatatgttgtgtcaaactcagcaacatcaaaggtgatctgctctgttcggaagttatttgcttggccgaaagtcacaggtagcgtgatcttgcccaacggcttggacgatgactgaggagtaattccatggaaggtttgatcagtgggcgtcaactcgcttcgtgggatccccatcgcgtccaaggtgctggcgaagagtaggtcgatggagctgccgccgtcgatgagaacccatgcgaccttgatgttccgaatagtgggctcgaccacgatcggatatcgtcctggagtgacaggagtcttggggtggtctgcctctaagaattcgatcttctgctacgccgtggaacctccgaagatgttcgaaacatgaaggtcggagtctaggttggctgagtctgagtcctgagtagccgcttctgcggcgttctcgactacacgtactcgcttgcctttctccaacgctagttgctttgtgagtgcatttttgaagacgaaacaagtctccagagagtgcttgtctgacttgtgtatgggacaccatattttcttcgtgtcatcgccttgtgggtccgggtgtttgggtgggtcagcatattctgctgtgaggacctccgtttgagccttccgtttcccactcctgcgactctttttcttgcttgactcaggcgtgtccttggctggtttattctctctccctgtcttcagtttgtcattcttgcgcctcaaggcgtcatccacgtgagcgcatcgatcgacaatctcgaataacttgcgagcagttgtgatccgtcttgtcgccagttcctgggttgtgtagcgatctcggacaccagacttaaaagcgcggattatagaagcatcggtgatcttggggatcgtatttctgcactcattaaagcgccgaataaagtccctcaatgattcacccgaattctgcgtcaacgcgtgttagtcgtcctcgatcgcgtggcgcttgtatgttccttggaagttagtgacgaactgctgccacagatctgcccatgaagaaatcgagtaggacgggaggtgaactagccatgaacgtgcagatcccttcaatgccgccgacaaataatttaccaatgcgttgtcgtctactccggcaacgtagagtactgtggaatagacctgtagaaactcctcagggtcggtgcttccgtcgtatttctctatcgctcccggtcgaaatttctcaggccatcgaacatctcgtagagaacgagtgaaagctctgcacccgccgccaggggcggtgggttgtcgacgatcatgtgctcgtcgtggatgtctgtccgatgatgaagatgacgaagatgacgaggatgatgacgagccacttggttccggggcagggttctgaggacgacgctcgggttcttgcgagcctcgtcgtcgtccatcgttgttttctcggcgtcgatctccatcgtcgtcgtcgtcgcggcgtcgacctcgacttgtatcgcccggcagccgctgctcgtgattagcatgttctcgacggttgtggcgatcatcacggtctcggtcctcgctcggacgtcctccttgctcttcgttctcgcgatgtcgcgaagagacgcgatgtcgggaacggttttcattatcttgagtgcgtcgtgcttctcggcagccattcagatggtcacggaaatcactgttgccgtgaggtggagggtagcttgacgaggcggagtccgctattcaggtaattctccgttagcatcgccgatcggcggttgttttggcggtaccctggtagcggcctcctcgaacgcgttattgagattaatcactgattcccatagtcgttccgccctgttaacgaccaaatttggtaatctgagtatcaaagataaagatcagatcgaagcggaatctaaatccaagattgtttcggaaacagagcaagaatcggctgaagtccgaatcggctgtgatcaggatcggcagagtccaagttggacagggttagccgattgagctggatccgacaatatgacgaagaatacgttgtcaggttgagttaataagcttcatgatgattgccacgcatggatagagtcctgagaaggcaattgtatctattaattaggatattttatgtaatttccttagagatatgtttgggcaaaagtctgccgcaaagacttatggtatcttagagtttgttagagataagtgtcgtgtccgatatggacatattttgtaatctcggatataaatagaccccgaaccccatgtaatcaacaacacacgttcaatacaacctcggcgcatcgccacccttttacttttgttttgtttcgacgagttcttgctttcgggttgagctgcatcagtttcgatcttcaacaagaggtaaaacttgttatggcggcttgcgttctcaggattagtgcttccatctttatgatactctaatcttgtttatgtaattcgtcgagttatcatatatcttatataatctctgacaatatcgctatctaatctccaatcggctaacgtttgttaccagaaggcagccgattaggttaaataccgacgttgacttagattatataagatatctaccactctatgaaacatccaacggcttgattgtctagatattgtccttcttttcatacttatagctgtatcagttgagtttgatcttataagtcgtgattagaatcctaatctctagcctgcttttggttgccgattagggtagcatcggggtttcagccgatcttaccttatttttatgcttgattgacatgttaaatatgccctttatgttaagatcttgtcgcatttaagtatattaggctgtttgtttggtatattctacttgccttaatatcttaatatagagtggtaccggagtattagccgatacatgctagatttatctgatcggctatgctatgaacatatatggtctcgttgttaatatatatttcgatctaagtgatttatactgtctcggcatggcgaccgatctatcccaatcacttgacttaagtatatatcgacataaggattatatattgttaatatctacagctgatcgagtagatttagttctttcttacatattaataactgccgatcgatgcacatatgacatcggctcaaagataaatgatatgtcatcggcaactagccgatcggctatcatttatagatttaaccgcggtttctttgtctttatttcttattgattgcaggatcaaatcaactggcatgctcatacatctaaagacaagcttttagacctgcactggagttaagcagatctcctaggcctcgtgtttttacatcaacacgcccactgatcgagatcagcgttcaggacaggatcaaaaggggtttccctcagtatcgcgttgagggttctgatgtgttgggctggtgtaatcaattgatcttccgtttctgcgccgcctctagatgtgctggtcccatcgatagcgtacacgtcgcgtggtgtacttgttgatgatgaggcttggtcttcgagcagatgtaggacatatggctcgaggggatcgatatcgattgccccgatgagtcgatctgaaatagtcgccgctccttgttccttgtccgcatctctagaagagattcgtgactgctggaccttaggaggtgacgtcctcatggcgctgagaaggaccttgcagcttgagaggtcgtgagtctttgccttgtgaatgggacaatagacatcacgagttggagaagtacattgaattccacgctctttgcaggcacggatttcagcttgtacgtcgaagaaaaccgaacaagcttgcaaggtgtgccttctggtcttgtggataggacaccaggtccttgtcgcctcggaagttatccttgttggctcatgcttcttatcaggaggacaagatttggccgcgttaggatccttctcaggcccagatgttgtcgatgttccgttctctgcttctgcgggaggatctttcgacatagagtcgaccggggtcgtaaccacgccgttctcgctcccggtaattgatgggccagtcgagatcggcatcgtggtgtagaccgggaagacaatttcgtcgacttgagtccacaccagcatcgttgaagttgaagctccttggttgatgccggggttgacgctatcgtcgagaaggcttgaagtcatagtagtagaaccttgagcaccaagtttccctacctggcgcgccactgtcgacgggggatacccgtagaccggatatagagggtattggggtccgttggtacgaggatctacgtaatacgacatcaagcaagtagaagacaaggattatactagttcaggccccttagtaggtaatagcccttgtcggtgacatggggctgggggtatcgtgactagaggcttgggtagccgcggtcacccacgtggcctgaccccctcgggggggtcgggcccgaggatgacatggccacccctccctctatctccccgatgggtcggaccgctcctgtttcggccccgagggatgggcgccccgaccccctgtggttttggcgccacgtgtgtgggttaggtgagcgcagcggggctcacctaaccgcatttatagtaggttggacgagtgcaccacgccgcatttaatgcggcgccgcgcacgcttatccggtccgtgaccggtcgcggtgtgtgaccggtcacagaccggtcagatcgcgggttaggtggcaacaggcggcctgtcacacgcctcgccccgtcccgtcggaatgatgagagcttcctggctctcgtccctagccggagccggcgtgctaactcctggagttggtatgtcagtcccggtcagatccattccaggcttcagcgcaagtatggcaaggaagtcgctggccattaaatgaaggttgaaatgggcgtccaccgggaaggcaggcgagcggggcaggaggcatgtgctctgcttgtcagacgttacttccggctgtagactagccctcattgtaaaaagcatgtttcccttcttaggcagggaggggcccatgtggtgacccgggaccagagaaaaaggaggcccaggcctaggagaaaaaaggagggaaggagggggaatgggcgggagagcctgaactctctctcgctctccggctctctggattccttcacgcacagatccaccagaacacaggagtagggtgttacgcttctcagcggcccgaacctatctacgtcgcccgtgtcttgtgcatttcctctctcgctgacgttcttcagatcgagggcgaagaacctcacttagtgcccccggccgaaccggcaaaggggggcctgcgcggtctcccggtgaggagccccacgctccatcatctggcgcgccaggtagggggcgcgcgtgtctttctaagccctcgtcctctttcgtatgcgccaagcttctccggctcagcccaatggccgaacgggcagtggcgcacagcctctctccgaacgctagcggtgacgacgaggagcagaacccgtgccgtcgggctcgcaccccaccgtccccctctcgccgaaatcttgggcggggggaagcgctcggggaggtcgaaggatccgcgacttcgcctcccgcgggcgacgggggaggacggcgagacggggcgcgtcgccgcctcgtctacgacgatggcggcacgccccagggcgcgctccaggctgcgggcgcgctcctgcgtcacccgcccatcgtccccgatccagagactccagcccgacgttggctggatgacgtggccgacttggtcatgacggcgcagcagcgcctaagcgcctgcgggcggtcctccgccaccgaggcctctggcgcagccgccgccggctccatgtcgtcgaggcagagggcgcggcgagcggcggccgttacccgccgttcgtccgccattccctcgccaacgcctccgacccaagaagatgtgtgtggggggccggatgcccgcctcgatatcgagcgccggcgcgacgctcgtcgcgccgcccacgcaacggagggcgcttcctcgtccggagcgccacttcggtccgggcacgggggccggccccccgtgtccccggttggtggtgccggctgtcgagcctttgtggcgagccttcggaacgtccgttggcccccaaggttccggcccaccatcaccgaaaaatacgacggaagcgtcaaccccgccgagtttctccagatctacacgaccgggatcgaggccgccgggggtgacgacagggtcatggcgaatttcttccccatggccctgaagggtcaggcgcggggttggctaatgaacttgccacccgcgtcggtctactcttgggaggatttgtgccagcagttcaccacgaacttccagggcatatatccgcacccaggcgaagaagcggacttgcatgcggtacagcgaagggacgatgagtctcttcgctcgtacattcagcggttctgtcaagtccgcaacaccataccctgcattcccgcacacgcggtgatctacgctttcagggggggcgtgcggcacaaccgcatgctcgagaagatcgcctccaaggagccccagaccaccgcgcagctttttgagctcgcggaccgtgtggctcgcaaggaggaggcctggacctggaactcctccggttctggtgtggcagctccggccgcccctgggtccgccgctcggtcagggcggcgggacaggaggaggaagaaggggtcggcccgttccgacgacgagggtcatgtcctcgccgtcgagggcgcttcgcgggccccccgaaaggggaggcctgcgagcgacaaaaagaaggaggccggcgctcccagcagggagcgcccgaccggcaagtggtgtaccgtgcacaacacctccctccacgacctcgcggactgccgcgcggtcaaaagtttggctgagcggacgaggaagtgggaggaggagaagaggcaggagtgccgtgagggcaagaccccggcggctcccgccggcaaccggcgaggtgaggccaagcagaaggccaccgccgaggacattgacgatggcgacgatgacctggggttccaggagcctgaggccaccgtcgccaccgtcgatgggggagcgtgcgctcacgcttctcgccggagcctcaaggccatgaagcgagagctcctggccgcggcccctacccatgaggcgacgcggcgggcgcggtagtcggaggttgccctcaccttcgaccacaccgaccacccgccgtgcgttgcccggggaggacagatcgcgatggtggtttcccccaccgtttgcaatgtgaagttggggcgtgtcctcatagatgggggtgcagccctcaacatcctttcccccgcagcctttgacgccatcaaggccccggggatggtgctccggccgtcccagccgatcatcggtgtgacgccggggcacacctggccgctgggtcatatcgacctcccggtcaccttcggtggttccgccaacttccgcacggagcgggtggacttcgatgtggcggacctcagtctgccctacaacgcggtcctggggaggcccacgttggtgaagttcatggcggcggtccactacgcctatctccagatgaagatgccgggccctggtggccccatcaccgtccatggcgacctcaaagtcgcgcttgcttgtatggagcagcgcgcggaccacctcgccgcggcgtccaagcccgcgggtggcgacgagaggctcgccacctccgtcccggccgccccaaggcagcggatggtcacgtgcgacgaggtcccggtcaaggaggttgccctgggcgacggcccgtccaagaccacacgaatcggtggtcttctggacgacaaataggaagacgcgctcgtctccttcctgcgggcaaacgccgacgtcttcgcttggagaccggcggacatgcccggagtccccagggaggtgattgagcaccgtctcgccgtgcggtcgggcgcaaggccggtctggcagaaagtgcggcggcaggccccggaacgtcaagccttcatccgcgaggaggtagcgcgacttctggaggtcggtttcatccgtgaggtcatccatccggagtggctggcgaacccggtcgtcgttcccaaggcgaacggcaagcttcggatgtgcatcgactacaccgaccttaacaaggcatgtcctaaggacccttaccccctgccacgcatagatcagattgtcgactccaccgcggggtgcgaccttttgtgttttctagatgcatactctggttatcatcagattcgcatggctagggaggatgaggaaaaaactgcattcattacccccataggaacttattgttatacgacaatgcctttcgggttaaagaatgcaggtcctacttttcaacgtactactcgaatttctttgggtagccagataggacgcaatgttgaggcctatgttgatgacttggttgtgaagacgcgcaaccaagagaccttactctcggatctagcggaaactttcgaaagtctccgctccgcccgcataaagctgaaccccgataagtgcgtgttcggcgtgcctgcaggcaagcttctcgggttcttggtctctgcccgaggcatcgaggccaaccccgagaagatacgagctatagagcggatgcgcccccccagcaagcttagggatgtgcagtgcgtcaccggctgcatggccgccctaagtcggttcatatcgaggctgggagagaaggcactacccctatttaagctcctcaaacgctccgggccgtttacctggatggaggaggctgagcgggccttcactcagttgaaggcgtacctcagttctcccccagtcctggtcgccccggagccagatgagccgttgctactctacctggcggcaaccccgcaggtggtcagcgcggcgttggtcgtggagcgcgacgaggaaaaccctcactccgcgcatccccaccctgcgtcgactcgacccgggagagagcagggaggagaggcccccgagccgaacggcggcccaaggcccccgacggccggagctggccctccgcctgcttgtccgatggtgccaggcgcccccgacccccaggatggccccggggccactgcgggaaggccgcgcctgtcgccctctgacctcgaggtcgtcggcacagaagccgagtgcgccccgcgtggcctctcggacgaagagcgccctggagatgcggcccctggcgaagaggatcggccccgccgaaaggtgcagcggcccgtctacttcgttagcgaggccctccgggacgccaagacccgataccctcaggcccagaagatgctttacgctattctga

SEQ ID NO: 18637 - DNA, 1830 bp, Oryza sativa
gcactgtcgtcaccgccctcctcgtcgcagtcgagcgcgaacgcgagccgaggggccgtaccctcgaagctgtggacgatgtggtcgacggcgtcccggacctgcgcgcgcgcgccgtcctcggttccgggagggaactcttccagtgctgcccacggggagaagtcagggtccctggcctggtagcttgccagtacgagctccaccgccccccgggcgaggtccctcgaggatgacttgatcgtctcctcgagctcctcggggagccgctcgagggccccggccatctctgagaggcgctgggcgaggcccccctggttggcggcgtacttcgcgtaccgcccgccccagaggcccgcctgccgcccggagcggtctagacgggagacggcgtcccgaagcatgccgggccctacctcgctcgccaagcggagggcctcgacctccccggcggacgagtccagcgcgccctgcagctcagcgatggtgtgttcggcggctgcgaggcgggcggctaggtcgccgtggccgcgccgccccgccgctgtgcgctctcggcgtccaggctccttcgcccgcgcctcgagctcagcggcccgctgatccagtgcggccctctcggcgcgggcgccttccagattgcggcgcgcctgctcctcccgcgctgcctcgcggaggaacaggctgtccgctagccactgcgccgcggcctcggcctcctcgagagctcgcccccgctcggtgagcgcgtcctcgcggaggcggagtgtggactcctcttcggcgcaggtggcatcgtgcgccgccagtgttgcctcccgggtggcgacggcggcctcgcggtccgccaggtctctctccttcgcgaccaaggcgcgggcgcgctcctccagcaccgtggcgcgagcctcaagggcctcttcgcgctgtcgggacaccgcctcgttctccgccgcccgccgttcccgggcagcggcagcgttaaggactccctgggcagcgtcgagcttctcctctagctccgccgcccggctcccgtattggaggcggaggtcatcccgcgcctcgtcgagcacggcggtggcgatgagggcagtctcccgctcctcctccacctccctggcgatctccgccaggtcctacgacgggcctcgagctgtgaggcgtgccggcggtgtgccttgcggcccgcctccaccatggcctccaccgagcgccgcccctcctcgacgcgcgcccacgccgcgtcgagctccgcccgctcctcctgcagggcctccatctgggcacttaacccgtccagcaccgtgctgttcgcggcggccaaggcctgcaggaggggctccgcgctcagtggggcagcggaagacagaggggagagccgcctcggtatgggtgccgcgcggctcggcccgccgattgacgtgccggactcgggggcgtcccccgaagctggctcgtcccaagcgtcacccgaggggtcgggcccgagcggcgcgcccgcagcctcgtcgtggttggcctcggaaatcgtcatcgcctcgggcggagtcgggtcgggggtgtggcaggctgcctggcgtgcgcgcgccgcctctgcctcccggacggactccccggcccggcggagtctggcctcctcccgagcggcctcctcagcctggcgaacccggacggcctcctgggcagcctcctcagcttcccggaggcggtccgcggcttcccgccggtcagcttcccgcctccgggcctccgcggtcgccgtctcctcggcctcagaccggccggacttggaatggcgggggggcgcgacgggatctcactgaggca

SEQ ID NO: 18638 - DNA, 4265 bp, Oryza sativa
aagtcaagaacccatttttgtagctttgcctctgcttgttatatggagtttattagagtaaaagcctttttctttccgttggtcgtgtagacgctgcagcttcggaagatccgctcttcgtggaggttgacgccgacgtttgggaaagcgagcaaggcaagtcacatctcctttgaaaatattgttgtcctatgttttgttttaaattaatgcattatcgctttatttaaattcccgcgttatcactgttttacttagccatgcctatttacccttgttataaccttattattattgctattgttattaataccttgttcaccctaggaaaatgaaaccccaactagtgggtactctattcatggttccactagtatgaatttaggtagatgcttcgctgattaattaggcaacattaggtggttttataatttttagactttgggaattctcatatcacctggacactatggaatgattagattatgtggaaatggacacacacctccccctcctttcaaaacccccaaaatggttttaggctgggctcgaggtacatggttttgatagcagcacctcggccactataaggaccggtcttcggggctctgttacaaagcactaccgtacttccacatgtctagtgggtaaggcctagtttgtagctcagtctggtcataaacaaaagtacacggatagggatggacgaagtcggggctcgatggacatctctaggacaaatgaaggctacataagctgcggcctagtagtcgagatgtcataacacagggttggtgtcctgctgctaggggctcaatcttggttacctgtctcgggaatcccggccgtagccagggttgggtcggtactcttgtttacggctaggatgggttgggaactatgtcatgtcctccgtccgtatgccgtggtggtatgtggcacgtggttacacgtgaggaagatgtgtcttgtgggtaaagatgtacacctctgatcagagtataatctattcgaatagtcgcgccctcggttatgggcaagcctagcaatgtacccaagttagtgttttaattcctaaaacctgcttaacaactaaaatgtggaatggttagcctgggttggcttgggacgagctgggacccagggtcgggttgccagttctgtctgaatcatcgtaggccttgggttaaggcaggttcgtgtgggttcacggccttgattaacaacattgtgtagcttcaggatcgcctttacaaaatggccctgagcaactaaaagtcttggaaatgctatttactgcaaaccctaacccctttattataactcccttgtactcctttgcatttattctgcattcgtgggtgtttcttgttgagtacggtggttgtactcaatcttgctcaatttttccccaacccagaagtggagttcctggaggatgaaggctttggtgtctagctcgtgcctgccgtcaagtgcctgtggtcgtcgccctagtcttccgctgttttccgtttgtcttcgtgtgtgctgggccttcgccgcccatgtaataatttatctatttacacttctgcttgttaaactctgaattgtatcaacttttggtgtaccttgcctcctgggacaaggaataatacacgcacgtatggaatgcatgttgggttaattccagtcgtgataagttggtatcagagcctccttgaccctaggacgaaccctagaacccaagccttagcagtattttgaaataaaaatcatctcttatttgtgaaaatcctttagtctctctctgtcttgctgcttcatttctcatcaaaagctgatctctaaaatttttcttttgtctttatttatagatggccgccaacctcaaccgtcgtggtctggatctgactggctttgctttggagctgcggggcatgtgcgttgtcctgggatatccgcatggagtggactaccagggcaagaggcttccggagcaggatggtgacgatgcggagccccgcgccgcttgggaggtcactgcgatgatcctcaccggctcccctaagaggacttcgctggccgtcaccgcgggtagggactccttccccgccacctgccagaacgctgcactcctcgccatcggcactcttcaccagcgctacccggacgagttgcagcactcgccctaccgctactaccctcgtcgtggaggagcccgcgactacgccaccttccaggatgctagctcggaggatgacgctaccatcatgcatctggcgcgcatggtagaggcgtacgacgcggcccgtatcgacttctaccgcatggcgcgccgtggcctggtcgagaacaacatgaagatcctggagctgcgtcaagagaatctgcagttgaaggacttggacgctatggaggcgcagctgtgtcagctcaagattgctcagggggagatctgccgccccaagcgccgccgcgtttgccgcagctagaagattaccgcccgcaagagtacctccaggcctgagctggttcgtcagtccttggcatggacctgcttcgtggagactccttgcgctgagcctgcgcctgtggttcctcaggagttgggagcctctggcgttggcagcacggaggatgtgctattgctcaccttccgccccgacccatcgcagaagtagacgagcagctagtaggcccgcgcgtgtgttcttttcgtttgttctcttgctgagttgtgtggggcatggttataccggtgtgtggtataactgtgtcggagcctgtctttattttatttgcgtaagcaacttgaaccttaatgaaccaatttaatagcagaaataaatttaagaattatggtagtcgtgggtggttagttttaatcgtcagctctttctgtttgctggttctgtgtggaatcttcatatggtgacaaccaggagaagcactgctaccggttagggcagtcaccccgaaggcagccacaacaacaaccatggcagtccacctccacctccacctccccctccgccgccaccaccgccacatggcaccagccccatcctcacccaaatcctcgcccagcaggccaacatgatggctgctctcctccaccatatctagaatccgccgcaacacaatgctccaccaccgccaccaccacccccacagcactccaagcttgccgagttcctccgcattcgcccacctaccttctctagctccaataaccacgtggatgccttggattggttgcatgccgttgggaaaaagttggacaccgtccagtgcaatgataaggagaaagttatcttcgtaacccatcagctgcaggggcccgcatcgctatggtgggaccatttccaggctacgcagccagaaggacagccaatcacctgggcccgcttcaccgccgctttccagaggacccatgtgccagctggggtcgtagcccttaagaagagggaatttcgggagttgaagcaaggcaaccgctctgttatggagtatttgcatgagttcaacaacttggcccggtatgccccggaggatgttcgtaaagatgaagaaaaacaggagaagtttctggcagggatggaccctgaactttctgtgcgtctggtctctggggactatcccgatttccagcgcctggtggacaagagcattcgcctggaagccaagcacaaggaactggagtcgcacaagcgtcgcttggcgaatttccgtaatcaacagggggctaaccaaaggatccgctacaccaatccctatctagggggatcctcctcacagcagcagcagcagcagcctcgccccgtgccacgccctcagtatgtggttcgtgtcccacagccgcagcagcaacggcagaatcaacaagggaaccgtgcaccccgacctcctgcaccggctatgcagcctggtcaaggtcgcaaggatgctcaaggccagcagcgtctgtgcttcaactgtttcgagcctgggcatttcgccgataaatgcccaaagccgaggcgtcagcaaggcccagcgccaaagccgaggcgtcagccgaggcgtcagcaaggcccagcgccacccggccccaacaacggtggtaaggatgccacccggggtcgtgtgaatcacgttactgcggaggatgtcctgacaactccagatgtcatcctcgatacgttcttcattcattccatccccgctaccattttgttggactctggagcttcccactcatttatatctgtgcaattcgtggggagaaatcaactaagggt

SEQ ID NO: 18639 - DNA, 1695 bp, Oryza sativa
gtttgccaagcacctgttggaactggtagtggctgcaagaggcctggatatttagctctgtctggcttggcttgcaaacaggtttggcaggtctgcagcttggcctgaatcattttcttcatagcagtccaagcaaacatgcttttggctctcctataagtgacaggaaatcctgaatgtccaccaatgggggtagcatgcaatgcatcgattaatttctcttgcaattcagtattgtcccacccaaattctccccttgtatctgagaatgccttgtactgaagagaaatgttgcctagctgttggtgtgatggctagttctgctatcagctttgttgcatagggatcttgatcatagctgtgaacaatctcttgcatccaagaaggtacacattatgagacagtacacagttctgcagaattggcatggtccttcctggacaaagcatctgctgcagagttagttactccctttctgtaacatatatgatactgcagccccatcagtttagtataagctttctgttgccactgagtatgtaacctctgttcagtcaaatgtttgagactgtgatggtcagttaaaatgataaactctccatgctgtaaatattgtctccattgttctactgccaacataatagccatgtattctttctcatatgtcgacagcccttgagtcctgggtcccaatgccttactgagaaaagctatagggtgtttatcttgtgagaggacaaccccaatgcctaactcacttgtatcagtttccagaatgaactgtttagagaaatcaggcagagctagcactgaaaagcctgattggtttctgcaatccatttatatgggatgcccttccttaaaagttgagtgagaggtttactgatcagtccaaaggtttccttagtttcttgacagtggtaggaattgcccaattagccacatcttgtattttttggaatctgcggatactccttttggtccaattatgtgccccaaataggaaacctcttgctgtgcaaaagagcatttgctcagcttaacattccaattgttgtcagccagtaattgcagaattctcctcaaatgttccaggtgtgttatcagatctggactttaaattaatatatcatcaaagaagaccacagcaatttttcttagaactggagctaatgttgcattcatggcactcaggaatgttgctggggcccgtgttgtcacacccggagtttcccctttccatagttttaatccattaataaattatcaatagaaaatgctatgtttaaccaggagaaaaccctaattaacaacgggtctaataatcggatttgtcagggagaatttgtttttgaattctctttgctttaaaccattaacaagcctatcagcggaattttcagagcagagtaaataaccctgttaatttaaaatgcttacggatctgtaacagttacactacactctcctcttgctcttgttccccttcccttttgcgtcctgcggaaactcgattcgcttggtctcagctcttccgatccacgtgttcgcttgtaatctgctgactcctttgtcgttccggcttcgttttgttcccgcaggccgagtccttgtcgcattccttttctggctgccgtttcctttcctttctttaaatggcaccgcctttccctagtttttcttttcttttccgaa

SEQ ID NO: 18640 - DNA, 2614 bp, Oryza sativa
tttcggtatgttgtggtggcatgtcggcgcatggtaacgtgttgtgaggctgtgtcttgtgggtaaagttgtacacctctgatcagaataaaaatattcgaatagccgtgcccgcggttattgggcggtcaaccagctcgccgtgattaatctcattcttaatagtatgattttatgaactggtgtagttcaggtggtttggttgggcctgttgcaacgttgtttagcgttgggcagtgatgcttaatattgcttagtaatatttattgttttactacattcaaattatgatttataaatgttgttttatgcaaatatcctattgccaatcctttgttattaccttgcatcataccttcccattggtatgacttgttgagtacggtgccccagagacatagaattattcggatgatgattatttcgaggattaggcttgatccggatgttgaggatgcctgtggatttggaagaagctatgtttttctcgagaagatcttcgttcagagtttcaattattaattttattccgctacgtttgtaagacttatttattatttttgtaaggcgtggatctgtgtatcgatgtgtcgtttgtgtactctggctagtccttgacagagattttaatacacattccgcttgaaattcgagttagcgaatttctgggcgtgacacctgttagtccaaaggacatcaccttgtactcataatgcccagaatgtgtttggaaagctgttttgtgttcttcccctttagccatcctaatttcgtgataaccagctcttaagtccaatttggagaaccaatgtgaaccagataactcatccaacaactattcaattatgggaactggatatttatttttaacagtgattgaattcagctgcctgtagtcaatgcactgtctccaggtcccatcttttttcttatctagcaatgcaggagaagagaaagggctttggctatgttgaattaccccaatgttcaacatttcagtcacctatttttcaatttcattcttgtcaggcctaccttgatggcccaattgagttccttctcaccttgtaccgcacgtggaaagttgtttaccagctgctcgaccttagaactcagaatcccgagtgccgaattcagatcctccacctactaatcgacttggggaagacgcccctccaccgctgacttgagctcgacaagatcagctcgcgtgcgaccctccgacgcttccctctttttctcattctctgcgatcgtctttaggagcgagtcaaatttcccctccaaatccattccgcccatttactaagaactggatctcgctctcacacccctcaaatcctgctccgaactcagctaaccgattgaggcaagtttccttttcacggaattcctcttcaacgaagtggattccaatccccgatttggaatttcacagtcgagccaagagtttggtaggaattgaggcgtgatcttgtattaactggaaaccaactatacgcctaacaatctctctctctctctctcgctcgccagcaacatgccaactggagctaagctactaggcttcacttggtgttgatgtgaaaacacggcggcctgggagatctacttaactccagtgcaggtccaaggctagcctcgagtgtgtcaaggacgcgccaattgatttgatcctgcaatcagtgagaaagacaaaagcagaattagtcggccaatagcgtatcgttggtggtctcagccaatggagttagaccaaatcggctatgggctgagtatatcaaagaatattaaatcctaaatatgcctaatcagttgtaatactgtctatcaagtttgataaattggtttaagacaatatcataaaagtagccgatgtgacagtatttcgagcatgaaagataatgtactagctaatactctagtacaaacctatataaataaattgatctatataaacatgtcaaacaatgatcaagcatgatagtgtaaggatctggttgatagtgactaaagcttgatatgcttatataaaatgacctgtatgtataagtggcgaatatacatgaaacgaataaagaagcatgcatattaggtaagatcggctgaaaccccaatactatccttcttatgtctaattgcaggctagtttgcattgttctaagcacgactagggatgatgcatttgaaagtatgaaaagaagcatgcagtctagacaatcaagcaattaaacacttttaaggatggtagatgccttagctaaatctagcaagacaatttagccgaaaccagcataaaccctaaagcgagcaataaccgatagagcaaaattgagaagctaagaatatattaactaagacatatgatagcaatgactcgcgatatcgagcctaacacgtctaaagcgacatgttagccccgatagcgcatgccattgagacgggttacctcttgcgaagaactcgtcgaaaacgaagaagagtaaaaagggtggcgatgcgcgaagttgtattggattgtctcccgtattacaatgctatggggttcatatttataccccgagtacaaactattccattatggacacgactcgaacctttctaaaaacaagat

SEQ ID NO: 18641 - DNA, 2284 bp, Oryza sativa
ggttttgtccaggagttgcgtacaatgtcctttgccataggatttgggactgcccctttttatgcccagattactcatgatcgtcacgaagagaagtgccgagtcaaagtcactttgaacagtaatagtgaagatatcccctcagtgatgttcgaagctggaggaagaaactacatccatgcatgtcaggaggtggcaaggatcgccataggagagctccgcgatcgctacagtgatcagttggccgacacggagtatcgctatcatcctccagtcgtcaatgtaagtgatgatgaaggagaagaatcgaagcgcactcattccaagattgagtggggagcaactcaagctgataagacgagccgaacgagccttcaatcaactccgatgctcggaagacctagaaagccttgtcgaaccgttgtcttagatcgttgtgttagtttgcttgttttaagtttggttgtgtgtcttgcatgtgatttacatcagtggtgggatgtaagtgcatgcgtttgtttgcttttgagtgttaggaagttggtgagtttagtggtgtgagagtcttcagtttgtaataatgaaactcacttaagatcaataaaagttaaagtaattctctgtcctaagtagtttcccccggtttctcttcttgtgccctgcccataccagatggtgaatactcgcagcaatgggaatggccccaacaaccccaataacaacaacaatggagagaatcccacacttgcccaagttcttgctcaacagacacagctaatgaacatgatgatgcagcaactccagaaccagcaaaaccaaggaaataaccatgcacctccccagaacaagttagcagaatttcttcgtgtaaggccgcctactttctctagcaccgctaatcctgttgaagctggtgattggttgcatgccatagagaagaagttggatttgcttcaatgcactgatcaggagaaggtctcatttgcatcccatcagttgcatggccctgcctctgaatggtgggatcatttccgcctgaataggactactgcggaacctatcacttggcttgaattcaccgctgctttccggaagacgcatataccatcgggagtggtgtctctcaagaagaaggaattcaggtcgctcacccagggatctcgctctgttacggagtatttgcacgagttcaatcgtttggctcgttatgctccggaagatgtgcgcaatgatgaagagcgccaggagaagttcttggaaggacttaatgatgagctttcttacccactcatgactggagattatcatgatttccagaagttagtggataaggctattcgtcaggaggacaagtacaatcgcatggagcagaagaaacgccggattgctcaattcaagacacaacaggggaataatcagaagccgcgtcttactttaggaccccagtccatgccacagggaggttcttcgtctgttgttcgtccgaagcgttagttcttcaacaacaatgctggcaacaacatccgcaatcaagctccacgtcctgttgcagctccagcacagcaacaacctgccaagagggagcaaagcagcaagcccgtggtgtgtttcaactatggagacccaggacattatgctgacaagtgtccgaagcccagacgcgtgaaggttgtccctacccagagcaactctaccgcaccagcatcaaaggctcgtgtcaatcatgtcgctgctgcagaagcacaagatgctccagatgtgattttgggtacgttccttgttaactcagttcctgcaacagtgctttacgattctggtgctacacattcattcttatctatgagttttgcaggaaatcatgggatggaagtagaagatcttagacgtcctttgatggttagtaccccaagtagtcaagcactctctttgcaacgtagcccctctgtcagaatagaaattaaaggagtaccatttctggccaatcttatcttgttagaatccaaagaccttgatgtcatcctagggatggactggttagccagacataaaggtgtgatagactgtgctaacagaaaagtaactctcaccagcaatgatggtcgagttgtgactgttcatgcattgtcttctgagtttttaaggtcaagactgaaccaaataattctggaaaagattcctatagtccgggagtatcccgatgtgttccccgatgatttgcctggtatgccgcctaaaagggatatagagttcagaatagatttggtaccaggaacaactccgatcc

SEQ ID NO: 18642 - DNA, 25421 bp, Oryza sativa
  unsure (1)..(25421): unsure at all n locations
tctctagggttttgccggtatcgactaaattatttatgttggttagattaataatggtatctaccaccctgaaaatcagtcaagagcttgattgtcaatatatattgtttcttttcatacttaatgttgcatcagttatgtctgatctattaagtcgtgatttgaatctctagctctagcttgttttttgattgccaataatggtagaatcggggtttcaggcgatcttacctgatatagatgttttattatgtttagttaatctaatcaagcttttcatgctatatctgccctttatgtatataagataaatatatttgatttatattgagtatatttatctagattacatatataaagttttattagagtattagctaatacattatcttttgacctaggcattgtccatttagctatgatataaacacatctaatccctgagtttgtcaatctgatttatatacaatccatactgtcgcagttaggtccaatctataccatttgtctataatttagagaagattgacttagagattatatgattgtttgcctctacaactattagagattatatgactgttggtatttcttaacggcattactagaaatattcattcctagcaatggcgcaaaaatagtcatggtatatttatggttacaaaagtaatccgcaagcgcatggatataccattgtagcatttcacccggaagtattccaaggtatcgtatttaatcctaagggaagatgtgaaagagagaaccatgctaataattatatacatatataatactttctttcatcaaagtctaagcaggggttaattcagtataagggtagaatgacaaagcaaagcttttagatttatcctaataaataattctaaactaagtggaagaagagatagaaagtaatcaattcctatacttctaatatacactcaacctttagtttacatttgctagtatacaatcatgtatccaataccccctaacagtgccctcctagtgtttcgagagaccacccctggttgccaagttcttacgacaacctgtcgtgcctatccaaccggggctaaatacggaggagtaccctaccaaggaatttgtcttaggaatatatactagcgtagaggaatacctgtactaagctgtcaccatcagcggcccacctctattgtcctgcagcatatatgcccagatagtgatatttagtaaactaagcaccatgcttacattaataaatactactctacacctctgcagatgatatagagcaaccgataactcggatactaaacccacaccattgcacctctctggtaggctaccctgtcacacccagaaattcgctacccgaatttcaagcagaatgtgtattaaaatatttgtccaggaccatctagaatacacaaacaacaattgataaacagatccacatcttacaaaaataataaataattcttacaaactcagcggaaaagcaaataaactagacttttatcttcatgaccaaaagcatagcttcctccataaaccacgtgcatcctcaacgtccggaacaagctcaatcctcatagaactcaccatctgaaccaatctctacctctggggtggggaaaaataaagcaagactgagtaccaaccaccgtactcaacaagtcataccaacgggaaggcatgatgcatgatattcacaaaggaatggttcattagatatttgtaataaaagcagcatttataaatcatattttgaataagtaaaccagtatatatagttaagcagtattaaatcatcattgtccaacgctaaaaccacgttgcaacaggcccaatcaaaccacctgaactacactagttcaataagtcgtattgttaaaagtgagactaatcacggtgagctggttgaccgcccaataaccgcaggcacggctattcgaatagttttaactctgatcagaagtgtacaactttacccacaagacacgattccatacatgttaccatgccccgaagttccaccacgatactacaaaaggggaaatcgcgacaaaacccttcatataactctccctaaccaaacatacccacctcaggtttcaccccctccttgtgccaagtcgggcagtcccctcttgtgcctaggtaaatccagaaacaacagagatcaatatctagattctaactgcaccatcgcctctacccttgccacggtatgtcagctaggttaaattatactctagatttagcctggagcccacgttggcctgtggtaagtacgattatatcttccaggcattcccgagaaccggtccttaattgtcatgggcacaacttccaaaaccatgcacccacaacccaccatcaaaagccacagttcgaatctttgatcatattgaaacctatagagaaccacttagttattttctgcattgagtatttataaaattattttgcgtatgaattattttttaataaacttgttagtttagttattacccattattacattgttattattggccaaatccatggattgctatatcacgccctttgataacctaggtgtagatttaaatacttcacaataatattattctagtggataagaccaccaaatatctatagtcatatatttggtttacccgtcatcacatggtgatgtgtcgggtgatataaaatgtgttatttgatatgagtcactcgcctggagtgatatggaagattaattcccgggtgaagatggatattgtggtttgtgaggccgtgcatgttgttataatttttttgtggaaagtgtatatttacacttgaagtatgcacgggcctgtgctagttttggtggcttcccccgatataaggactaccctcttatgccatgtaaaatgatgtaatttgcgcccatccataggactgagtaatcaggcttagcctagtacattgtcccactatatgaaagactgtagggtggctctatgagcaggtttggggtggacatgtggaaggggcttcgcccaggttgacatgatccacaacggtggaacccgtgaaagcagcaaccatctagccttgcttaggcccagcaagtgcccgactgctaggacggatcaatatcccgctgggcagtaactagtagtaagtgggactctcggacggctatgttgtcctcagccttgcaaactgttgacatcatctgggtaaagctgggcagtctctacagagatgagtagaccgaaaggcattctaagatggcagaaggtaccgaagggcgtgatgaaggctgtcttggggatatctgccgggttcatgtgaatttggtgatatccagagtatgcatccaagaagctcatgagttcgcatccggcagtcgaatcgactagctgatcgatccgaggcaacgggaaatcgtccttcgggcaaatcttgttgaggtccgtgaagtcgacacacattcgccacttgtcgttcgacttcttcaccagcaatgggtttgctatccactctgggtagtcgatctcttgtatcacccctgcttttagcagcttgttcacctctgctttcaccgcctcttggcgatctgccgacattttcctcaacttttgcttcttcggctttgcgtcagtcttaactgcgagatggtgcatgatgagatctggcgaaacaccccccccacttcatttggtccccaagcgaagatatcaatgttcttcttgagcacgaccaggatggtattcacttcttgctcgcttagatcttcaccgagcgatatgattttcgtggggtctaaatcatctatctgcagttggacaaccttgccgtgggggcgggtttcggtattggctttgctttttcttgcccttcgacttctaaggtatggacttccctgtcgaaaggggaccactgtggcagccgaaggctgggaacccttgacgactatcacaccagctgggccaggcatcttgagcttgaggtagttgtgatgagatactgcttcgaacttggtcaaagtgcccctagcgaatttggcgttgtagttgtacgggatgttgacgatgtcgaagagtatctcctcttctcttctattctctttcgtgccgaaggcgactttgatgagggcctgttctagaacttgcactgcttcgcctctgaaccctctaagcgaagttggtacttgggataatgccgatggggttgtacttgaaatgtagtggggttggttgagttgctgaaggaaagcttggagttgcgcctgcagagccgaagccccttccgccattgtttgtggcgcttggccaggtggttgatgttgtacttgggcagcgactggttgggcttgcagttgcacgtgaggggccggatgcgctgctgcagtcgatggctgcccggcgaagtacattggtgcttgtgcggcttgtggcggaaagggctgggtcgtcacttgcggatggacttggggtgggacataacctgccgaatactgaaggatcggggccgacgtgaccttggtccgtctcgctgcctcgtatgcttgttgttgttcttgcatttggcgaagcatgtcttggagtcatgtcatgttctgtcgcatggcttccatgtcggcttcggcttgtgtttcggggtcagggctgacttgggcctgcacagcggcgagcacggttggggccgctgccggctgcgatggaacggcttggggcaccaccagttggcttgtcgaaaggatctctgccctggtctggagtgcccttgccgccgcagccgccttcgccacgttggccgcattcggcacttgctcagaggtggcaggggccgaaggcagtagtgatggcgcagatgcggaagcagatggtcctcctccatcttcggccacgggcgctgaaggctctgctccctcctcggcggccatgtccgctccggtgtcgctttcctttcgccttgtaaccttctccttcacgaccttcttcggtggcattcgctctcggtggtatcgctcggaggtccccacggacggcgccagctgttgtcgaaacgacaaccgcatacgtcgaaagacgtggttactcaacagtggttggaaagaaacgaagtgtattaattttagaattttttacttcgggatccccttattacatggccctaggggactatttatagccccattacaggttcttactactagggtttaggttatacaggggaatttacatggttaccctaacgaaagggacatttacaggggtacataatgttatggaggctcatgggcccctgatgggccgtcgggcgaccgccggccctatagcccctaggcttgatgggccggaaaggcttcttcggccctcgcgggggcgaacttgccatggcgaagtcgtcttccttcggcaaatactcttcgccttgcacccttcgcctgggacgcctctggctcgacaaggtactcgcacgacccctcgcctcgcgctgttcttgctccatagtcttcgccacgggtttcggcagatttggtcgaagggcctcatgccatccgccaacacttaacaacccgagagaaaagtactgacgatatcagttaaatgagagttacgagatgcatataattgagttgccctttcgttacgagatgcctgttctggcagtgagggtctaagcaagacatcttctacacctcgtcgtcgtagtgtgagatccaatgttgagaacatggatggcatcgctgcgggggatgatgactcactgctcaaggcaatgaagaggaaagcattgcacaatttggatgacagcttttctggacgagaggtttcggcaacgaattctaagcagcactcggcctctcataaaacatcctctagtgaaagtactgttataaactcatccccttctttaccttctttacattatgattttgttacttccaatcttagttctttaggtgtttctttgggtaactctcatgatgaaatttatttctcgcttaacgctttgaaacatattgaggttgatagaactaaagcaacaaacaagactagtgagtgtaaccattctaagcacgttttttcggaagtggatccttttacaactagtgatgatgagggcgacgatgatgttgccctactcgctcacttagtaaaggatctcacgaagattgatatggacgatgtggaccaaagtgacaaaatttgtgacttgttggtatccactagaaaatccaaatcttcttcaaaaagaaaagagcgaaaggcttgttcccaaaatccaaaagcctctaaatctgtttcctcatgaaaggcattttttggaatagcagaggtcttgcagacttggctaaataccgttatgttgcataaacagttagagagaaaaaactagactttgttgcgttaatggagacaagaaagggtgaaatgtcaaagatgaatttagatcgcctctctgggggtgctgatttcatctggcattgtctcccacttaaaggaagatcagggggtatacttctcggaattaatgtagctgttttggatatatctttaattgttgaaggggaatttttcgttaaatttcatctcaacaatagggaggataattttaaatggatcttgatggctgtgtacggtccggcccaagatgattttaaatctagtttcttggcggagttcgttcgtacatgccaacaaaatcatctacctactcttatagggggggacttcaacatcctgagaagtagtgtggaaaaaaacaatgcccgttacaactctctttggccttttctcttcaatgctgtgatcgatagctttgacttacgagaaatcgctctttcgggtaggcaatttacatgggcaaattcgcttcccattcctacttatgagaaactagacagggtcctcacatcaacggaatgggaatccaagtaccccctggttttggttcatgctcttgacagaggggtgtcagaccacacgcctttgctccttgacacaggggaagcggccttcacgagaaacattaaacaatttaaattggaactgggttggtttctacgtgatgacttctatggtcgtgttctcaagatatggaacaaaccagtcaagggtcataatgcggtccaaagatggaataacaagatgagcgctttacgtcgccatcttagaggttgggctgctcataccagtggcgtctttaagcagaaaaaggcaaatttgcaaaacacaattgattctctagacatcgcagcagaggtacgactcctttcggatcaagaaagaattcttcttgatcaatcgagggattctttggcaagtctactccgtgaggaggagattaaatggtaccaacgctcgaaagtctcggacgtactcttaggagataacaacacaaaatatttgaacttgatagccaacggtaaacataggaagaagaggatctttttcctagactaggatgaagggaaaattgagggggttgaggccttgaaaacttatattacgagtttttataggaaacttttggaccaccagaggagaactcgttttcgcttgatgagtccataattggtgatatggctcaagtttcacaagctgaaaatgattttcttactgctcctttttcggaagaagaagtgaaagaagccatctttgcaatggagcataataaagctcctggaccagatggtttcccagctgaattttaccaaaatttttgggatgttattaagcatgacctgatgaacctttttaatgaattccatactggtagcctcccaatttcggactaaattttggggtacttactctagttccaaaagttaaagaagcaaatcaaatccaacaatacagacccatatgcttgttaaatgtcagctataaaatattcactaaggtggctacaaaccgaattagctcgattgttgaccatttagtgaacccgacccaaacagctttcatgtgtggacgaaacattttagatggagtcgtcatcatacatgaaacaattcatgaactacataggaagaagttgagtggggtgatattcaaaattgacttcgaaaaggcgtatgacaaggttaaatggccttttctgctacaaactctgcgtatgaaaggtttttcgcccaagtagaaatcttggattgaacctttcatttccgggggaagcgtggcagtcaaagtcaatgatgatgtcgggcctttttttcagactaaaaagggccttcggcaaggagaccctctctccccaatcctattcaactttatcgctgatatgctagccacattgataaacagagccaaaacacaagggcaaattgatggagtcacaccacatttgattgatgggggactctccattctacaatatgccgatgacacggtgctgtttatgaatcatgaccttgaaaaagctcagaacatgaagtcagtgcttctagctttcgagcagttgtcgggtcttaagatcaattttcataaaagtgaactgtattgttttggtgaagcacttgattatagtgatcaatacaaccagctctttggctgccaggtcggcaacttcccattccgttatctgggcattccaatccattataggaagttgagaaatgcagaatggaaagaagtggtcgagagatttgagaagaaattgagtagctggaaaggaaaacttctttcgttgggaggacggcttactttgattaactcagtacttagcagtctcccaatgtatatgatgtcatttcttgcaattcctagtggggtacttaaaaaacttgatcaccttcgatctaggttttattggcaaggggatggacataagaagaaataccgacttgctaagttggacattatttgtcgtcccaaagaacaaggggggctaggaattcatgacctcgagataaagaataaagcgttgattagtaagtggttatacaaactacttaccaccaatggaatatggcaataactgctacgcaataaatatttgagatcacaacctttatctcaagcctactggaaagcgggggattcacatttttgggctaatcttatgaaggtcaaacaggattttttccgttttggatccttcaagattagggacggctcccaagttaggttctgggaagacaaatggttgggtaatgcctcgttaagagaacagtattcttgtctctataacatagttaggcataaactgtcaactatcgtacagattttccaaaccaatcccccgtgcttttcatggcgacgggatttaattggtgcaaaactagctgcttggcataacctattgcctcgcatagctgatttggttctggtacaggagtgtcacgcccggaaattcactagtaatttccgaacttatttgtgcataaaatcctcgtccaggaatcagccgaggtacacaaactgacaatttaatatacaaatccatcataataataacgttacacacttacaaaagaaaagaaaacagcagcggaattaacggtctagcgatggcttcagctccactcccacaggcagctcaactggggtataagccaaacgtcttctccttctggatcctttttcttcaactgaggttgattgattattgcaagaatgagcatatgacatactcaacaagccacacagcaaatatgcaagtgcacaaggataccaaaggatggcataatataggctcatttgcgaaagcagcatttagcaaaacatttaagagaagtaaaacagtggagtaattaatcagaaattttaatcaacactgaacagcacacccatgctgcacaggcccaaccatcctgaacaaccatacccggctgtacagatctaactccaaaccaggagctaagctaattattaccagttatagcatccataattatcgtgagaggtgtgagactaatcacgaaaaacattgctcaacccgcccataaccgcgggcacggctattcgaatagttttactctggccagaggtgtaccactgtacccacaagacacaaccccacatcatgtcaccatgtgcctcaataccaccacggtacctcggaaaggagttgtgacaataccccttgcacaacataatccattacagcgcacctttcctggatcataatcaccccctcaaaaaccagaggcatggactccccagcgacccccgtggacttctcgccacttctcagtctggcgcactataatgaatcacgctatacaaaagataaagccgttgcccacgctggcttgtggttggcacggtaaatgtctcacaacagtagctcgcgaaccggtccttaattgtcatgagcacgactctcaaaaccatgtgctcacaacccaccattatcaagttttagttggcaagtaattaattaaccaatcacgattaaccatcgtgaactatcattaagccatccttaaataatagtgagtcataagttatcccaatagtgtgctaatgtttctaagcatggctaagcaatcataactaatatctagctgaaccaatatataaagcccaactagtcaagttataataacccaaggtatcaaggaataaagtaatcaatgcaaattggccataacaaaggaataagttcacaccacccggtgacattcgaaaataaatgcacagttgaaataaatagagaatttaaatataggatcaacatgctcaaaggattgtgtttaggatctgtgtgacttgccttgcaataatcggtcttcaattaatcttctgaacactcctgacgcactcacgaaccttcgcaacgacggaaacgacaagctaacacgcaaaacgaagaaaaagactaataaaaaccaaataaacagtacatataaagtaaacaaacatgtagatcctgattttagatgaatttagcaacttgaaccactcaaaaccgagttacaatgatttagttatgaatttccgaagatttaatctattagaaaaactggaaaaggagaagatgatgacgtcatgatgacctcatcaatggccggaccaagatggcgacctcgccggagattggatggtcggctgtgactttggaggacatgaacacgtagaggacgacgagacgaacccaacgatactcaccctcgaaccaaacgacgaacgacgacggccggcgacgaggaggcgacggcggcggctcgggttgcacggggcggcggagctccgatgaccggcgacggaaaaggaagggtggccgagcttcccctcaccacggcgcacccaacggtggtgacggcgaccggcgacgacgatggagacggcggcgcggcggcaccggagatggccggcggtggcggtttgcttggcggcggtggcgacggagctacggagcacggaagaggacgggagagggggcaaacgaaagaggaggactagggggtcctatttatagccttgattgaagagatcggactcctcccgcaagaaatcgatccgggaaatcaaaaactcggttttggagataaactcgaaaacgagtttgattcggataagatactcaacgatttgctccgatttttgggggtaaagatagaggaggataagagtaatatttcccctcaacaaaattggagaaaaagagcaacggggaggcgagatttggaaggaagaggcggcggcactgtgcacggcacggctggctcgggctctgcctgagttggaagatgaacaatagcgcagggagggaaagtagacttttccggcagagctgagaggagaggacgcggctcaggttgggccggcggaagagagaggaaggaaaggaaggaatgggccgaaaatggcccaagctgaggaggaggattttattactttcccaattaaaataatcacttaaatgatctttgaattgttaaaaatacttccaatgctcaaataatttcaagaaaaatcatgaaaatacttggacactcaaagtacttaacaaaattataattagaccatttaatgattaatttaatatgtgggtaattactgaaatgctctttgtatgattaaaaattaggaattgagctccgaaaaatccgagaaaactccagagagtataattaaccatggagaatttaataaaaattaaatccatccatgctttatatttaggaaattttatttcccacatttaacttcacttgtaaattaatgaacatttaatataaattctattattaatttattaaataatttataaatcctgaaacaaaaatcagggtgtgacaaggagcaagatgagtttcactggaacctcaccccgaatggggacttctcggtcaaatctcattatctagctctaacacataccggggttctgaatatcaatagacggatttggaaggtgaaagtacccctaaaagttaaaatcttcctttggtatttacgtcggggcgtaattctcaccaaggacaaccttgctaagagaaattggaaaggcagcaagacatgttgtttctgtcacaaggatgaaactatccaacatttattctttcagtgccgcttatctcgcttggtgtggtctgtaattcatttggcttctaatctgaaacctccttgcactgttggtcatatgtttgggagttggctatcatgtgtcctcaaagaaatgaggaatctgcttttgatgggtgcaacagctctgtgttggtccatttggctaagtaggaatagagtaatttttgataacaagatggtgtcttctcctttgcatgttatcactttagttacccggtggctacgtacctgggctatcctccaccaaccgggactgcgggatactattatggtggtatctcgacgtttggaccaggtggctcaggagttttttacccaggagcataggtggcggtctagtctatggattaatagccactaagatactaagatatacggtggtatctcgacagttggaccaggtggcataggagtttcttacccaggagcatgggtggcgatctagcctacggattgatagccactaagatatatgtttccgttaaacttttgtgcttgggagatgttctagttatttctttcttattttttggctgtgtgcattttatgcagaggccgggggtgactcagtttgattgtatcatcttgatgtaattaactgagtctaaataagactccattatctaaaaacgagatgcatatcatgaaccagaaattctgaaggtgtacaaaacaaaagagccatcagttaattacatacgctaggcaactgatgccatatgtacaagcaccgaatatatatgaaataatgtaaaaatatatacaataatgatccctaacaacctgtccccaggctccacatgaacacagcaattgcaagaataatacaacagattcaattcaagttacaaaaatgagtttgcacaaatcattgttttgaataaatcaaaaatgacgacaactctactctacagtatcattcagtgtacataggagtatgtacctcttgatgaataaatcacttgttacaatagttatgcttgtgcaacaaatatatcttttactgtacacgacaaatttgttctgcatcacccagcaatctaagactacgagaaattctctgcagaagcaagagtagcacatagttataacatgatctcttaggtagaaagagaacgttacgcttagaacatacctctcgagtatcactaaggcgcaatagatccaacctgtctgacggcctcaaatttattaagttgacaagctgcaataaaaagtacagtgatgaggcgacaatatgatgcactcttaaatctaagcagttgaatgagccttacccaaaaactaaatttttcaggatcctgtggtccaggcatgctctcaagatctgtctgtcttgctcgcctcgctacattcagcaaaacatattaaagtacaatgtgcatgggtatctagtgagcaccaaataacattgcatcccccctcaaatcatttgaatcaagggcagctactatgcgagtgaaatatttaaacaatgcactgtgaaattggagtctcattttcctaaaaaaagagagagagagggagcagggcaatatgtacgacattggaattatgcatcctgacagtggccgatacaacttctggagtttttggattgacattattttttctggggtcattcgcaaatatgtatttttaaagaaaatgaccctatatatatgtcttcatatattagaccccatgactgcatactggatcttaggagtcagctcttaagctgtctattcttcacatgggcgccacagaatcactaaaacttcattgagcaggatgacaatgtgtcgaaaatatccataccaggccttgagatttctctagctcgccttatatatgtcctggccaattctgaagctgcattagccctttccatcagctgaaaagagccaaaagagttacatcaatgtcacttagaacaaattaatagagacagcattaccattccattgtgatgtttttctcttccgtctataaatatcagaaggccaaacatataaaacctcaaataaacagtgaagacaaaggtaagcgtaaagcagattttaatttcatcagaacggaaaaataaccacgtgcaaaacaaatgtacaactaagaattcgagtgcaaacataggctatgtgtccattttactgggaaaagtactagcccattttcaaaatagttgtgaaaatgtttttctattttgtttaaataaaacatgcattattaggacaaaaaacttggtcctattgaaacaagtactccttttgaagtaaaagtcttctattggtaactagttaaattgttccttcatgttgcagctcatcaagaaccaatgaatcacgcagcatgtatccctatcagcctcacaacgtacatcattttcaaacttctatatcttagtgatggtatgtccaaatattttcttaattcgtactctgcaagttttacttcaataacatcatgtggtgcttaagctggtttttgtccatcacatttttgcaatacttcacagcacaactaaaagaattgcagtccgaaaagttaacaagattttacatcttttctctcctgcgatccgtctggtaatgaaatatcttggagccactcaatttcagcaaccctatacctgaaaagggaaatgactaaagtaaaatgaacatacacaagggttgatccaacatgttatattcccagattaattgacacactcacccatcttggtcccatgatcgcaagatacgaaaccgccgtgaaccttccacctataactgaaagtattattttcacatctgataataattcaaattcatatttgttgaatgacattatctatggaaataaaaaaaaaacgtttttggcaggggaaagggtttttcattaatcaacagggataaagcagtctctttgagcaccaagtgttcaacacattggttcattgtatccggtgaatggttcgccccacaaatanagattaaaaataagcatccataaggggtccttttagaaaacaaaagtgggctatgagtctgcatccagagaggtgattgctgcaaaatnnaccaggataaatcttgatattgtaaggtacgctagtatgtgtaaccacatccactcaatatgagccaaaccaacctagaacagaagttataagctcaagcataacatcttgcaaaaatattatggttttacctctagataaaaacgaccatccggaagtggctcacacctacatatatatatatatatatggagacgagactgaaagtatgaccatatgtttgggaaataaacaagtaacaactaaacttactccagaatttccacctcacaaccacagtcagctacagtacccgtagcagaatcaataccaacctgcaatattgcagcaatattcaatccaaaaagtaaagaaattaatgaatcgacacttcaaaaccaaaatcattattttagattagttactgaccattcccatgcgatgattcccttccattatcctccttacctgtttcaaattggaaaaaaaatgttgaaacttatcatgcaaacatatcgtaccaatgcttagatggaatagaaaataggctaaaagtttcatgcataacatgaaagatatacagatgggaaaaacaccgactggaaatatgcttgttggcacattgagaaactagagacaacaaaagatgatagttacagttatcttatcatgtcttcccttttattgcgctacagctaggatttagggaaaatatcaggttgtaataatttttttgacctgaaaacttccaggctttgcctggcagttttgaattatgataaaaagaaaatatttacataaaatttaaaaagaaaagtaaagaactctcaccaataagctctaagttatatcgtttgtaaccaatcaagaattaagctttttagggactctttcatcctacaggtatgtaggagaacatcttatttgaaggttccaatattttaacactagaattttatccaagattccccggaattatacgagtccttcttagttgtacgcttataccacaagttagatatcaacatgtaacaagtattagacttctcttttggggggaaaaacaaagcatcatcgttctcaacaaacggatctgacaaaaagatcaactgaatttatggcaattgtaccatgagcctgtagcgaggttcaaatatgttcagtgccatcttttgacaaggcagtacaacatccataacaaagagaggcatcaaatcaacgcctgcatatgtcatagtctcatgttctgacttcctctcagcatattcttccggaaaatttttctgaattatgttgctcagcgttacactgaagcatttaatcatattgtcatcatagatgtcaacagaaaacattgaagaaaaaaagaaacaaaatttcaaagaacttagattaccttataggatatgtttttggaccaataaaaagaactgtccgacacatgggacatttattgcctacaggaaatgcacataatgtgaagttccgatattaaaaaaaaaaggttaatcaagtctgaatattccctaagcttaccatgatccattgattgatgtaaacaagagcgacagaatgagtgcccacatggagtggtgactggttcaaacaatagcttgaaacataatgtgcactcaaaatcatctggtctatctaatgttggacgtcttgctcgagctgcaatacttgtatttctgtgcagatcactgagccagctttgcaggacatggctatacatgcggcaaacagatgttatgcaatagaggttaattttacattaaacagatacctgcaagatacatgttgtactagtaggcaatgcatcagcagttgtacctgaggggatcaacttgaagcccagaaagaatagcctcccgtgcctcatggtactgctccaactgtgtgtcaaggagttagttgctatttcgactacatgaacatgtatgcaatggaaaaaggtttccatgagtacacaatatgcatgccagctgcgatagaatctgaacagattctataaaatcttataaatctgtctgaagagatgccgtgacatttgtaaaatattaaacctaatcagctaatggtgcctcgtgcataataaagggaaaaagaaaatagaacagtacttaaacatttaatgtttgaaaattttgtaaatcctctctcccctgcatcgtccattgtctagcatttctccaagtcttctttctgtatccatctgtgatctatcatcaatctctgacgaataaatcattatcctattgaggtgcataacaacttagtatcgcagccaacctccaagggctctactgcttgtaggatcgaatcacaacaactaagccaaccagagggggggtgaatggttggtatacccaaaaaccgaaaacttttagcggaaatagcactgctgaccaatctgacatcaacgctatgataaacaagatgatgcaagcaaacatcaatgctcttattgatctggtgagttcattgctgcagtgcacccagactcacaatgcaggtggaagctctatagacccactcttgtgcaaggttaggtagagaccaaagtcgttgggcacgtgccagtactaggtggtcctcaggtacagagagatgggtggtgtgcctcacagctttggagaagctaatgctgccaccaagctggcagcataagtgccaagtaatatggcattggaaaagagaccagtcccttacgtccgtaggatttcatctacggcccactgcacaaaccgaagcattgggattgctgggtttgtcccactagcatgttagttttatccatcccgacaataatggcttttgagcaactacaagtgaggacagttgatgacaccaacgggaatgcagtatccacaaggttccgttgtcttggcttaatgctttagaggccaggagtccaggacacctcaaaggacaaggtttggttggcttcataccacctgaaggacattggcataagtacaactactagccagagagacatgagaagtcaagtcaccaatactaagcagcccattgagggagctggcaaggtacaataggcacaaacagtagataagtaataggagaaatttattggcactgttttttctcatggatgacctctccaaacaaatgaaaatgcggatttgctataaatgtgtcaccagtttcttttgttaaaaattagtcgattcgtcgactgtaggatataggggatatacgtcgagattcatgcgtccaggaataacgtacaggcgcagtggcggggagtcgaaccctggtcttctaagtcatagagagagctcctaacctaagtcacaaaagttcccggatcgacggatcgaggaactggaccgtggaacacgggacaccattttccaaaaacatggaacgagaggggtatacctcttccaaaattatggaactataagtggaacgcgttcctaggttttttaaaacgataatccggaactctacagaactatacatgttatcacagtggtcttggcgctcatgtacaaagacaatgtcacgtgctcgactccctggttctgctctattttcggttcttcatttttttttttttttgctattcatgtgacagctcatcaccagccaaaagaatttgggccatgagtgcaacccagccgatcaccagtacgtgaaagtgaaacctagcaggctagcacccatcacttcgtcctcatcattcgtccccatccccagccgccgcatccagtccatagatagctcgatgcaacgacggcggcgctgcgtgatggcttctgttagaacttcaatggttactcttattgagaagaggatggcactcgagatggggcaattttctggttttcttcattcacaaaacacaaagccataccttcccaagggaggttggatacatatataaaaccatagctggctgcaagcctattgctgcaccctcctagtctaaaaattcgaaatttgaatgggatgctgtcctagagggcatccaaactgaataaagcataaaggaggcataaaggagatgctaattgctgctgtcctactaaccgcagctgtcctagcaactgaaaatatgctaaaggagtagatgctgtcctgaaaaggtgaaactacccaaaagcaaaaagaagaaatcaggaccaaggaccacaaagacttatccatcagcttcctcgccagtgcaggagggagaaaagcggctgcaacgagcggcacccctctatttctccaaccttccctgctcggcggcggcggcatgcgctggtttatgtaccttggcatgacagtggtgagcagcgaaggagaaacagtgccactcgtcgattgaagtgatacccctcgccactcgtcgcttgaagcggtgccccgtcctccacccgtgtagatccgggtgagttccccttctcatcttttgctcaatgtacctcgttcctccattgccggaccacgtattgggtcgatgatccctccgtttttggaacgaagttcgcttcgttcccgttcctcgttccgggacgaaattcccgggcgttccctgtgacttagttcctaaccaactgagcatggtagtggtattgatttcattgccaaaacaggaattttcatttacgaagtacttacactaattacataccacttgcactatagttacaatgtaattacatagcacttacactacggttataatgtaattagataacacttacactatagttacattatatttactttgtattttttactaatgtgttgaatgttatatagtgttataatcatatggtttaagaaataaagtatgtactagttcctaattaatcatcaaagtgtgtacatagttggatgtccactgagtcgttaggtatggattagcgactgagaaaaaaaccgactgcatttggctctgttttgtggcgaatgatttttaggtagtcccatgaaaatattgaacccgcagaaatacaggtcaccatgtgctgcacattgctacctgaagtgctgcttaaggatgagttttcttatgaggggagaaaatatcatgtacaggtcatgcatagcacctagaggaggcaataacaagcagccaacagtaagcattaactagagacgagtcattggaattctcatttagcattttagttgcaacactatctttagttgacccacctgttgaaatcaacaacacaaagagtaaaccagaaatagcctcactccctcacattttcatcagtccattcctgccaacacccccccccccccttgctttcattttcttggtatgcgtgttactgccaacttttttttcagtccctacactcattcaagcgcttaacagtagtaattattaaagtgtgtgctcagttgaggctaactggcgaaagtgttgcacagagtgaagcttttgcaaatcacaatgcctaatactagtcagttaaacattgtacggtcaattgaattatcctattcgagaataaacactaaaatctttggcctacaaaatgatattggagctatctatactggctctaacaaatgatactgaagcaaggatctatctaaattctagattatacaacaatactgaatttaagaaggttttaccaggataagcgcatatgccttgagaagatatggtcttggagaattactgccgatagctaataccttctctgcatctttgagcgctacctgcagtgaatgcataagaacattgtaccgaaaacataagaaccattgcactgtactcacatatttcacaccaaatgataatatttgcataacaacttatacctccgcatgcgttgtgggatcaagaccattcaatggttggtactctgagtcagctgctgatctctccctcaacacttgacttatcctgtaatagaggtaaccagttagccccgacataggcatgaacgtagatcaaacctatccatgtagaattgagcaactgcattaacaagcatgcaattggtacatcatattgcatatgaatagtatcgaatagggtgctaaaaagacagtgacagagaactcacatacagaaagcagaacttcggttgctaaggataatgggatctcctggtctcaaagtttgtgctttagagtaaaaggaaactgcctgaaacaggaccataccaagtatcacgaacaatgaaactagcaaattgaaggaatcaagcttgtacaactgaagactaagagaaacataagtaataatgcataattataataacagctgttgttgctacatatgcaggatagatgttatcactgcataaaaaggttgcagggacatgaactaatataaaggatactgataaagccagtaacgaattcaacatttggaatattttgttagactaataaggttatgagacatacttggacaaaattattctgtatttactcaaaaaataaggatttcatctttcaaaaagttcaataggaaaaaaacatcagctctctgtcgaactattaaacacacaacattttacacaccaacggttgtcagtgtgaaaacatatatatcaataaaatgaaaataacacaaagtagctgttgggctgagtagttcaacgtaatatagagtgggtgtgtcaaggcccatgaggtccatatgcctatatacttgtatatgtaccaggaaaggaaaagagagatttgagaagcttccagaaaattcccaaccttttctctacagtagccatactagatattttcaatctgaacattccataaattaaaaagtttctgaaagaacattaattaccgagtgaataaacatcataaaagaaataataaaagagcgaaaatgattattaaaaaagtggacaataaagttcaaatttaaagaaagaagttatttggatcaaaaagaaggattcaggaaaactgaaaatcaaaccgaagaaagtagccctgaaatgtttataattggcattagaaactcaaaaggaaatccacaaaaactagtactacctcggtcccaaatataacaacttttggctatgaatctccaaattcatgaatagaatcttggaacccaaatgttcaggcatgttgagaggaatagcaaaattttctttaatggaccaagtaaaatggtaggattaactctacaaaattgcaaaatagcatacaacatgagactgataagtgtgtcctagagccagttgtttgggacacatctaactagcatgatttatgtatctcaagcagcatttaccattaggaaaagaaagagatggcttaatattggaccacatttttttaaccaatttacactacggctgataataaacaaattgagaaaagagggtcctggaaatcttgtaagatggacataaaagttgtgctacttggtaacgttattgcaggagaatttgatgttcaaaccaaaacaaaaaatttctgaagagatgactcgttacttgttattagggatcccttgttaggttgttactagactatttcactatgacatacgagtatcaaacttgatcagagaacaccaaatatggaggtaaaattctaatagctggaaggtacattttgtagaaacacagtatttccttcagtatgctagttcaggaaaattcttagcatgcccagcaacagtaagtgccggttatgtcagtcatactgtgaggggctggatggaactagtgggctacacgaacgaaattcgggaatgaagaggagcacggtcgctcagctaactgcttacctcgtcgaagtggccgtcgcggaaggcgcgagcaccgcgctgcgcgaggtcgaacacctcgcggtacttgtccgggtccatccccatctcctcctccctcttcaccttgcgcagccaaacacgagcaggttgaaaacccatcagcacaccgcgtacagtacatataggtgaaaggagcgaagttgacatacccacgggaagtcctcgacgacgagcgcggcggcgaaagaggaggcgcccggcgaggtcattggagggcagcagggcggaggacgggggagtagggtgggaatgggggtgcaggggattgtggagtttggaggaagggggaggagagggagaggtggtggtgggggaacctgcggcgttcgtgcggcgatgcccagaaatttttgcgcggctgaggccgcgaagacgtgtcgcagtacggactcgatcacgccacccgatccctcaacaacgacggtctatggctgagcacagggtgtccttttcccgttcgaccccggtttttcattttaggattctaataatttagggccgtttgttgggattcttaggagcaattctagcattaatcggttggagttgagccaaacgggtaattttccctcagcttccaaagcgaatcaactgggatcgattcccttttttacgaaggaagggagaatcggcggaaagcgagcttctgctaagaatcaaatcaaccaaatatgaaagttcccatatttttcccaaaaaattacccgcctgccactgggtatacccctctttccagccttccccatccacccgagcagatcgatcgacatcacgcgctagggttgcgggagctagacgatggcgctccgcatccagcaccgccatcgctgctggcgctccgcatcgccgccgacctctcccgtcgacgacatcgccgaccatagtcgccgtgcccgagccttttcccaccatccagccaccttcgacgccacttccggtctccatcctgccactcccctattctccctcagccctgcagatccaggccaacaacgccaccagttgccatgttgccattctccgtcgagctccctaagcaggacgaccagcactgactgggcaaggtaccatgtcctaaacttctccatttgattaactttgtatgttgtactattgtgcaaaatagtagaactgaatagctcgctgcgatgtggatttgtgtgtaaataatattgatgtggatttgcactctgatctgtgtatgtctaaatagttttgatgtgcatctgtgctttgatttgcatatgtgttatttcataactactgcagatggcagcaacagtagtagaggaaaatcaaggtgcaaataatgttgaatggacagatgaaaacactaggatagtttgtgagttgctcgctgaacaagttaggataggaaatcgctcaaatacccatttgaacaaggtggggtatgataatgtgattgcaaaatttgaagaaaagactggcttacgctatcaaaagctgcagttcaagaacaaatggagcaagctgaggaatgagtataatctatggaagaaactgatagctagagagactagattaggttgggaccaagctagggctactattgttgcatctgatgattggtgggcaagagccaagaaggtatactacatattaatgttgatgtttaagttgttaaccatgattttgcaaatatttgtgtcactcttctgattattcccttggtgttcctcaaggatttgccaggttgtgcaaagttcaagttacgggggattcaaaatgaacatttgctccaacaaatatttgaagaccttcgaaacacaggagatgaccactgtaatcctactagtggaaatttaccgcaaagttcaacccaaccttccagtactattaatgtagatacaaaagctgtgaatgaaggtgatgatgatgatagtaatgatgaggatttctcacctcctcccaagagaggtaaggcagcagctggtaaggaagccaagaaacccaagaccagtggtggacattggttctatgaacaaatgattgttttgttgataaccaagagaaatcagctgcgtctgttgagtctcttgtcaagagggaggacacttcagggtgtgccatcaaagatgtcatggctctagtg

SEQ ID NO: 18643 - DNA, 21453 bp, Oryza sativa
cttacttggacaatattatatgacgtattatgataaaaataaaccaaagacgtcactactaagtggatatgcatgggtacaagagactctgaggactccaggagagagtcaccacatgtttcgaatgaatacagacctcttctacaaattgcatgacttgctggtgagtacctataacctgaaagcaaccaaccacatgaactccatggaatcagctgctatctttcttttcatacttggaggtggtgagtccaatagaagggttcaaaataggttcaagcattccggtgaacacaattagtagaaaattagaagaggtcttattgagtgtggttagtatgtgcaaggattacatatgtcccaaagatcctaacttcccaagggctcatagtaggattaagaatgacaaaagattatggccacatttcaaaaagtgcattggagccattgatgggattcatatcacatcaaactcacctcgtgaagattatgttagatacattggtagaagcaagagtcctactcagaatgtgatggcagtagtcgactttgacatgcgatttacatattcttctattggacaaccagggtctatgcatgatactagcgtcctttatcatgtgttagatgttgataaagatatatttccacaccctccacaaggtatatactagctgaaatcatctacactttgctttatcttttatttgtaccatataacattgactcgatgcatatatcgtaggtaaatattatcttgttgatgctggctacccaaataggccagggtatatggcaccatacaaggggcaaaggtaccatattcctaaatggagaagaggtcctccaccaagtggtgagcaagagtatttcaaccaatgtcactcaagtgcacgcaatgtcattgagcgcacctttggtgtgtggaagatgaaatggcgaatccttttaaagatgcctacctatgcaatggacaagcaagaaatgatcattgcagctaccatgtgtcttcacaactttataagacagaattcgacaactgacaagtattttcgtaggtgtgatcgagatccaaattatgtcccaactataccaacaagatatgcaagatatgttgtttcccaaaatgcatcagatacttctactccaaagtctagtgataggtctatggacagatttcgtgatgacctagcaactgcattgtggcaatctagatgaatgttctcatataagtgctgttaggaatatattttggaagaactctccatagaaatatgtaactgtggtggttccactctccttagaaatatgtaaccatggtattttgcaataactgagtcaatttgagtggactattattataatggatattgtctttgatgccatgcaatgtacgtgacgtgttttttaacttctcatatggaagcttggtatttttttacaagtattgtgctaaaatatttgtgcatattcatgagtacttctaacaaatattaggattgccatttcagctatatctcgttggtacagaagttatatagaccaaggacgtctttggcttcccccattaggatcttaatgtttctagccaaacacctaaattaactgattctgattctcttcagtatctgattcaggaagaatcagaattagaatcacagaatctgaaaccctaccaaatgggcccttgctccctccgtttcaggttataacatgttaatcaaactgcattaagtttgattaaaattataaaaaaaaaataattttttcgatctaagataaatttattataaaaatatatttaattattaacttaataaaaataatttggtaatataaatattactattttttttaaggaaatatttgtttataaacttattcaaaattaaagtagtttgactttaaccaaagtcaaaacatcttgtaacttgaaacggagtgatacgtagttatttcatgggactgtctgtacattaaccggctgaaaatttcagctgaaattttcatcaatcgattggacacgtgccaactatccaacgtggagcgcacggagctcacgtggagagcagagcacttctctacgcacgttgccgagtaggatctggtttggccatctggcctattaagatgtttgtgcagcccattgtattacaagctcactctatcactggccaaggctagggtacagatggccataaggcacgaggcccgaaggcccggcccacggcacggctttgcccggcccaagcacggcacagcccaatttgggtcgggtccgtgccggcccggcacgatgggccggcaggccaggcccggcacacaaagtatagggactaaaaatagacatataaatatcactgtccaaagaatagggaccttaaatagacttatttagctatttatataccacagaccaaagaagaggaacgaaaaaggactttttttagctatatatatgtcacagcccaacaggagggaggaaaattagacttattctgagaaaaagcacaatagcccatcgtgccttcggcccggcccggcacggcccgaggcgtgttgggccgtgcctgggccgtgagtgcggcacgtgggctggcacggcacggcccggtgcgtcagtcgggccgtgccggcccgacaagcctcggtccaggcacggccgggcctaggccgtgccatgctgggcggcccacatggccatctataggctagggcttatttccttcgtccaaaaaaaacaatctaggaggggtgacccctcctaatacaatattatctagattcattgtattacgatgagtcacatcccctgacccctcctaggttggcttttttgggacggaggaagtagctcgtaagcatatctctggaccagtgtcgaaaacatacttagcatgaaacagccagaccatctgccactatattacatttgtgactacaaaccgagacttcacatagataaattctgaatgcatgaagtctctaatctacggctctgatcgtttgcctaacccatccattcagcacggaaaacagagcagtccattagtgcgtgattaattaatttttgctaattttttttcaaaaatagatccatataatttttttaagcaactttcatatataaactttttttaagaaaaaacatatcgtttagcagtttaaaaagcgtgcacatggaaaacaaggaggaggagttgggaaccttacatacaaacagagccttatagtaagcaatcaacgagactttgatcaatctcagttgaagacaaagcatcggtcaacatcctgcataacaaccaaacaaacaaagctcaatgatttaaatagtttatatagggtgtaaaaaggatcataagaaataattccatggttctcactcaactcaaaccttgcagccgtgcaagaaaaccgttagaaatacaaaagagttccaagatatgtgaattgtttcacgtctgagcttacgcaaatagggatggcaattttcgacctgccagtacctgcccctccggctccaggggaagggtgaattctcacccacggatgagcgaaggcagggccccgtaaattaccggggataggaacggggattggaagtaacccgcggagtgacccaacagggcaccggagtactctctccgggctgataatattagtcattttggataagggtaaagtcaaactttaaaatcttttactacaaataatttctaaagtattcatcttaaaaatatgaaaatcatatatgtagattagtcttaaaaagtatttcaataaaatcatatatttgttgatatttctatatatattataatagaaaatagttgtcaaagttactttttgaagaccgggccattatccaaaacgataagtattatcaacccggagggagtatgatttttggaaaaagtacatcgaaggtccctcaacttgtcattgagttacaaaatcgtcccccaaccgtaaaactagataaaacacatttctcaacttacaaaaccagtccctcggcggttttgaccccgattttgtccgacgtggcagctgagtcagcgtgggacccacgtgggccccaaatgtcaggtgcctcatcagcagattctcttcccctcctctcccttcctcctctctctcactcttctcttctcttctggcaagccggccggcggctggggcggaggccgccggggcgaggcgggagaggaggaggcggcagcggcgacggctacgatgcgggagaaggcgagggcagcagcggcgacagcggctatgatgctggagaaggcgagggcggcggcggcttagcttagcttccatcgatcatgcggcagcgggcatatgtccgggctcagcgcgcttggcggtgcgccattcttcaagtccggcatcgctggcagcgacgagaggcaaggcggccagccagtagttgggagcgcttgattcggcggttgttgtgttcgtctctgcttgtcaggtgtggcttagcattctcacagtactgtggcactgtgctcttgtcttcttttagctactgttcttgagataacactattaattagttagtctgcgtgtgtgcagcaagcgatgcatggattataatgacgttgttaagttgctaaatatggcgcattacgtggtgctaatttcgagcttaatttgtcgccagccaatcagtcatcctataattctctgaaactttgattgcaatcggcctttgtacttgacttaattcctctacacacttgtgttcattaagaatccgagcctgtaggctctccgcctatccacacacctaaatgaatgtgccaatatcggcattaactgaaaaaagttcgccgcgcgagtcacgaaatgagattttgctacgaccgcacccaatacactccaatatatccaaaactcaagttttggtgctttttgaacattttggtttatgtatataacatggcacacacgtatgccaatatcggcattaattgacaaaagttcgccgcgtgtgccacgatgtgagtttttgccacgaacactctcaatacactccaatatgtccaaaattatgttttggtgctttttgaatattttggatctggtatataacatggcacctatgtgtgcaatatcggcactaactgacaaaacttcgtcgcgcgagtcacgaggtgagtttttgcaacgaacgcgtccaagacactccaaaatgtccaaaaatcatgttttggtgctttttgaacattttggttcctgtatataacatggaaaccacgtgtgacaatatcggtattaactgacaaaagttcgtcgcgtaagtcacgaagtgagtttttgccacgaacgcgcccaaaacactccaatatgtccaaaaatcatgttttggtgcttttcgaacattttggttccggtaagaaacatggcacccacgtgtgccaatatcggcattaactgacaaaagttcgtcccgcgagtcacgaagtgagttttcaccacgaacaccccaatatactccaatatgtccaaaaatcatgttttgatgcttttcgaacattttgggtccggtaagaaacatggcacccacgtgtgccaatatcggcattaactgacaaaagttcgtcccgcgagtcacgaagtgagtttttaccacgaacaccccacgaacgcacccaatacagtccaatatgtccaaaaatcatgttttggtgctttttgaacattttggatccgatatataacaaggcacccacgtgtgccaatatcggcattaactgacaaaagttcgtcccgcgagtcacgaagtgagttttcaccacgaacaccccaatacactccaatatgtccaaaaatcatgttttggtgcttttctaacatattgggtcccgtttataacatggcaccctcgtgtgccaacatcggcattaactgacaaaagtttgccacgcgagtcacaaagtgtgtttttgccacgacagcatccaatacactccaatatgtgcaaaaatcatgttttggtgcttttttaactttttggttccagtaaaaaacatggtacccacgtgtgccaatattgacattacttgacaaaagttcgccgcgcgagtcacgaagtgattttttgcaacgaaagcgcccaatactctccaatatgtccaaaaatcatgttttggtgctttttgaacattttggttcctttatataacatggaaacgaatgcgcccaatacactccaatgtgtccaaaagtcctgttttggtgctttttgaacattttaggtccggtatataatatggcgcccacgtgtgccaatatcagcattaactgagaaaagttcgccgcgcgagtcacgaagtgagtttttgcaacgaacgcgcctaatacactccaatatgtccaaaaatcaagttttggtgttttttgaacattttggatccggtatataacatggcacccacgtgtgccaatatcggcattaactgacaaaagttcgtcgcgcgagtcacaaagtgagttttttccacgaatgcacacccaatacactccattatgtccaaaaatcatgttttggtgctttttgaacattttagttccggtaaaaaacatggcacccacgtgaaccaatatcggcattaactgacaaaagttcaccgcgcgagtcacgaagtgagtttttgccacgaatgcacccaatacagtccaatatgtccaaaaatcatgttttggtgctttttgaacattttggatccgaaatataacatggcacccacgtgtgccaatatcagcattaactgacaaaagttcgccgcgcgagtcacgaagtgagtttttaccatgacagcacccaatacagcccaatatgtctaaaaatcatgttttggtgtttttttgaacattttggttccggtaaaaaacatggcatccacgtgtgccaatatcggcattaattgacataagttcgccgcgcgagtgacgaagtgagtttttacaacgaacgcgcccaatacactccaatatgtccaaaagtcacccacccacgcccttcgccatagtaccaataaggtacggcgtcaagggctgcgggcgaagaggtttcgccacatgccacgcccttcgccatagtaccaataacgtacggcgtcaagggctatgggcgaagaggtttcgccacacccactccattcgccatagtgccaataagctacggtgtcaagggctgcgggcgaagaggtttcgcccacccacgcccttcgccatagtacaaataaggtacgacgtcaagggctgcgggcgaacaggtttcgccaacccacgcccttcgccatagtgccaataaggcacggcgtcaagggctgcgggcgaggaggtttcgcccacccacgcccttcgccatagtaccaataaggtacggcgtcaagggttccgggcgaagaggtttcgccacacgccacgcccttcgccatagtaccaataaggcacgacgtcaagggctgcgggcgaagaggtttcgccacacgccacgcccttcgccatagtaccaataatgtacggcgtcaaggactgtgggcgaacaggtttcacccacccatgcccttctaccaataaggtacggcgtcaagggctgcgggcgaagaggtttcgccacacccacgcccttcgccattgtaccaatagggtacagcgtcaaggactacggacgaagaggtttcgcccacccacacctttctccatagtaccaataaggtacggcgtcaagggttgcgggcgaacaggtttcgcccacccacgcccttcgccatagtaccgataaggtacgacgtgaagggctgcgggcgaagaggtttcgccacacccacaatcttcgccatagtaccaataaggtacggcgtcatgggctgtgggcaaagaggtttcgccacacccacgcccttcgccattgtaccaataaggtatggcgtcaagggctgggggcgaaaataagagtcttccaagttgggaggctacaaggccaccctagcctctggagccttttgccacacccacacccttcgccaaagtacccgcaaggtacggcgacaaggactgtgggcgaaaatgagttgcttccaagctggagggctacgaggccaccctagcctctggagcctttcgccatacccatgaccttcaccacagtatccgcaaggtacgacgacaagggctgggggcgaaaatgagttgcttccaggctgggggcgaaaatgagttgctttcaagctgggggtctacgaggccaccctagcctctggagcctttcgtcatacccatgcccttcaccacaatactaataaggtatggcatcaagggctgcgggcaaacaggtttcgccacacgccacgcccttcgccatagtaccaataaggtacggcgtcaagggctgccggcgaacaggtttcgccacacccacgcccttcgccacagtaccagcgaggtacggcgacaagggttgggggcgaaaatgagttaaggagttgctcacaagagcagccgaaagagatttatcatttttcaagatgctccgaggggccgacaaactcaattggatacctgagtgtcaagccgccttcgatgggctaaggcagtaccttcggcactagtgtaaaaatccgttcagaaaaacattttctgctgattcggtgtgccaaaagagttcattaccgacaataacaagcggtttgactccgagaagtcaaaggaaatgtgcgaggggctaaaacttgaaatcaagtttgcattggttgcacacccgcagacgaacggggcagccgaaagggatgaatggcaaaaccctagtagcactaaagaaaagaccgaaagccggtaacagttaaaaaggtcgaagtactaaaaagaccaaagccggcaacggtcaaaacgatcaaagtacctaaaaatacctttccaaaggcaaaaaggggaaagtacgagccgaacagccgtaacacgcaccacacctcatttatttgccaaaaagcacaagttacagataaattccattgcccgccaaaaggcattcggactttacatccgattcatcagcaaaagcagtcctcaatggcgaaggactacccccttgagcatctttttcatcgctagttgttagatcaacacaaaaaattttaaagcggtgaagaaggaaaaacggggattatgctgtgtcgacgctgggtaatggcaaaatgacgctcagtcatataaaattcatgggtgtcttcgccttttttgtgtatgatatttcgtggaaaaaccccaaggcaaacgtttgatcgacgaaaacgccaggggggtgatatgaatcggccaaagcacaactcaccgaacgttgaaaccgcgacaactcgttttcggaaaacataccgatcgtcgctacactcgacttatgcaaatacttaagcgtttttggacgcatatgccaaaagtcgagagcgaatgatgagggctgaaaagtcaatgtgaattcctttcgctaacacgcaagggggccgacacgcttcgcccttccgaacgtacaagttacaaaatgcgatgatagcgaaaagaaacctaaaaacatgcacaagctccatcgggcaaaagcatatacatgttatataaaggagcaaaaaattttataagtatattacatcatccgtttcaggacattttcgcctcgcccctactaagtctggcgaacacggttcatcatctatattgtacacgaatttaaggggaaaaggaggcgaaatacacaccgacgtcaagcgatagcagctcgacgattagtcattttgaagtctgaaaaaagtgtggcaatgtcatcgcggcactggatgtggcacctatcgtaatcctctaaggttcgaccaggatgtcttcgcctccaattcgccattttgacaaccacatagctacataaaaggcgaacgcttgatcgacaaaaacgccaagggggcgaaacgaatcggccgaagcatcgctcgccgaacgttgaaactgcgacagcttgtttcagaataaagatactgaatgccgttacattcaacttacgcaaaacacaagcgtttttcccagcgcaaaatgctacgaatcgaaaacggaagtcgaaagttgagaagtcaacaaatcttttcaccaatccccgaaagggggccgaacgcatgactttcggcgaaatccccgctaaaacaatagggaaaaggggaaagaaaaaaaatataagtcaagaatcgcgcaaagcagacaaacttggcaaaatataatcacccagtgttataatacagtttcgccattctcgaaaggcgaatgctagtgttcatattttttctgcaggagtctaaaaagaggtttcggcaggaacattggccgaaagggggcgcctcatgccataccgtatagtttgcacggtctcggccgaagctccttactcacccttgcccgtgaggggcttattggaggcatgccatgaagcccttcgaccggacctgccgaaaccatagtaccagcaaggattcaagctaaagacgtcaagaccattcaggcgaagccctatggcgaaagccataagcgaagatggcaaaggctggaaagccgcgtcggtactccgaaagtaaaggcatcttgagcgaaggcatctcgggcgaactacaaagacttcgccatgacgagttcggcatcaaggaggcccaacaggccgcccccggtcttttaggcccgttcaccgtagactaggcccagcctatcagcccattaaaggcccatatgtgcaaatgacactgcgtacccatgtaaatgtccctttcataagggcaaccatgtaaaatcccctgtaaccccaaaccctagaaggtgcaagcttgtgctaaagctataaatagacctctagggccatgtaatggggggatccccaagaaaaattctcaattcaataaactttactttctttccaaccactgttgagtaaccacgtctttcgacgtatgcagttgtcgttttgacaacaagggtagttctccctttgttccaatcttgatgaaataggtccaaccctttgatgttcatgttccaatcctgtgctatattgttctagcaaattttagactcaaatgtgtagttgtgaaaatttttagatgcttgaacttgtgggaggtggtctgcccggagccacaggcggtctgaccgtgggtcagccgccggtctgaccggcgtgtgcgcccggtctgaccggccagcagacgtcggtctgaccggccaccagtgggcggtctgaccggtctgatgccgtcggtctgaccgccctactggctacggtctaaccacccctccacaggatataggtacattttcacctctccaaattgtttctaaaattattgctaatatcctatcatcctttgctctttgacagtgatgcctccccgcactcgccatggtcttcatgcgcccactccggatcccgtgagtgagcctgaggagtcgagcggagaggattacgctcaagtgatgaagaggttgaggaaaatgttgagggggctagtgaggaggaaagtggagatgatgtcagtggtagtggggaggatgaggatgaagaaggtgatgagatgcaaattgatccctccatccagtttgtggtgaacatgagaaatccagtataccatctcgaggcatcatgatcagttcttgaggcctcgggacaccccggatccccggtttcacaccgctttgcagaagactgtgtatgagcaggtttatgcagggaaagcttttgcagagcataagtggatttcttggagagacatcaatgagactccagagtttgagagcttgcatgatctcttcaagatagttggcattgactggattgtgaccctcaagcaagactacaatgaagatttgatccgacagttctatgttacagtgtgggtggctagagactatagtgagatgaagtggatgtctgacaccctccagtgttctatctctcggaggcagttccggcggctcctcaacattcacttggattttagagatgatttgcatgaggagcacactcacaatccgctctccatagactatctctctcagttctatgaagatggagtgcggtacacacatgagaaggttgacggcttgaggactatccctagtgtggtcaacaggattgtgagagccactatcctccctcgccttggcaacaatgatgacattaggggggtggcttggcacgtcatcgatgctatcattcagggtcgtcagttcgacattgtgtctctcatgatgcaagagattgctatctccaagaggacattcactcagggaatctattatgccccttacatcatgaggttgattcaagacaagcttggggctgctgggcaaaatttgaagaaaaacaagcagtataagccccgccttcagcttggagctccccgtgctcctaggacgctaccctcttctcaccctggagctagctcaagctcagcacctcctcctcctcatgggtatgatccaaatgctttcttccatccacagtatgcttactttggaatgcaacccaatgaatacttcaacccggtacttggggctattaataccctaagtgaaagcattcaacgcttgtctaccgggcatgaagcattgcatgaggatgttcgtggcttgcgcaccaatgttggagacttgaatgcttccgtgggaagattgcacactagggtgggtgtattggattcttgagtccaaatgttggagagcacccaagcttttgtatatcatcgccgccatgatgctcctcatccttcatcttcggctcgtcctccttctcctccacaagaatgaagaccttttttggtacttgatgccaaaagtgggagaaaaatgtccttaggtgtgctttatgtcttgtgggttgggactagtggtagtgaggttagtcacctcatatctaataggtaaggtgttttgggctatattatgtatgggtatgagctattaccttatcttgtgtattatttttcgtcttgttaaactctaggtcatttggacccttcgtggtcttgtaatagcctatgtttatttgtgagcccttttaggatgatttgtgacttatgtgatttggatggttaagtgatgtgaacttgtgcgatgatgaaaggtgtatgtgatattgatatatgtgactatcttatgctcatggatgaatatgtcttgaagttcacattaaaatattgcttatgtgtttgtgcttgttgaaatgtgaaattgaaatgtgcattggctctatatttgttgattgtgattgttatgcacatgtttagggggagcttttgatttccattgcaatatatgtccatctgtttcatgtttgattatatatgtttgatttccattgcaatatatgtacatatgtttcatgtttgattatatatgtttgagtgtttgtcatcaattgccaaaacgggggagattgaagcatctaggcccccattgttaattttgttaattaatgacaagcgctaattgtggactaaccgttgctattgagatatattttaagttagatccacgtcatgtgtgcgcatggatgattatcgatggattaaaatttgatggcacgaagcaaagaaaagaaaacggtaaaactagtgctttagtttaaaattgatcgaggtggagagcgatcaaatttgctagtttatttttagtttcgccgtactatcaaggggggtaatgacctcgcaatgagatgattttaattgccacattaggtcattatgcatttagacttgtgctcacatttcaccacacacacacttctcacatcccacacagtttcactgtgttcggcctgaccaggggcggtcagactggccacatagtggcggtctgaccggagtgcccaggccagtctgaccggccacaagacggcggtctgaccggcgcataatgccggtctgaccggcgacaaatgagcggtcagaccggctctctggtggccgggatggtgccgctcggggtggccgatacagagccgacggagccgtattcggtcagaccgagctgatggtggtctgaccaagctgaggccgatctgaccggccactcaacgtcggtctgacctgccaggccgatgaggccctctgacagggctacaacggctagttttctagccgttgcagagtagcacggtctgaccggccacatacctccggtcagaccgacatagcacagagttgggggatttcgcccccaacgactagttttggttggtgggagtataaatactccccctccagcaataagggggctctcttggcacccaattcaattgcatacaccccttgcacctctctcacacacctttgagctagtgtggtagaggtagaggttgttctagccaagagtcaagtgcattgcttccatttgtagagctagtgtggcacttgattgatcatctccacgccgggtcattacttgttattcttggaggttgctgcctcctaaacggcttgtggaggagttgcccggtgacctttagaagattgtggaggaggtccggcgctggtttgtgagtgatttggagttcaccaccttcggagtgaaggaagaactaccccgagtgatcgaggcttgggtagtcctctccgtgggccgactcccgccttgcccaccccttgacgaagggggcgtgcggtggcgtggttgagcggtggagttgggctcgcctcaatggggagtaggaaaccggcgaatttccgaacctcggtgaaaaatctcttgtctccttgtctcatttgattgcgcatttacatttgtgcaatttacattcctagagacattctagagatcatatcaccctaggattgcaaaacattgatataagagtgtgatttactttcctagagaattaattgagccactatcaccctaggtttgcaaaacataacttagttgcttagttagacttaaccctcaccgagcctagcaacctaggttagttttgtttaggtgtcatttatttttaaatcgcctattcacccccccctctagtcgacatctcgatcctacagatggggggtgggttttgcccccttgggggaggggaggtgggttagagggagggggcatagaataagggttataagtttcatagtaacatagtgtgttactgcgattatttgataacgttatggcaagaatatgtatagtaagaaaaaaaaggtgcagtaacatatagagagatgaattggctcggtttactcatagggcaagggtagagagaactttcaaagattggtcttttgaaatttaactctccacaagtagtaatactactccctcctaggatgggtctcattccattctaggttgctatattctgaaacggagggagtatatcataagtgttgttactatctgttgtacgttactacaatcctatcatgacgttactatgaaagtgtggtaaatattataagttttacagtaacaaagcgtcttctgcaattcttgaataatgttactgcataaagttgtggtaatgtgtatctgccatgtagtaacacttacacttttgtgcagtaacaaatatatggttagcatgtagacttttaactcatatatttttgttttgattcctagtttactaccgtttcaccacgatgttactatcaaaagtacagtattttatagcaacgtgacgtgttactttacttatacgatgatgttactactgaaacatagtaacttgttatgagttttttaataacatatctatttttcttctactttgggagtgaaagagattagaatcagtcaccatatttctttctcacaaagtgagatacaaaagaaacaagcaataatccttaaaacaaataatatcattggatggattggttagaatagcattggatggattggttagaagagcttgctatgaactatgagattatgggttcactagtaatcgtgcacgtgcaatgcacgtcatgttaaacttatttattcaattttattaatagttaaaaacaaaaaattcattctaactaacatgaaaaataagtgacaaatgagggacttcttcggtgaagaacaaggaaaaaaccctccttggtcccttttgtttccgctaccgtctaaaagaagtttcagtactcacttcattgaaagaaacttttgcaagtgccaccaccatttaaatcatagcaactaatttcatcataaataagcaactatatcccctcaccataacaatttgcgaccaccggataaaaacaataattcagttaagggttaaggtaatcaacatgtttcactgtcagttctgtccagggatgaatttgctatatatggtttaatactatacaattacccccattgtgcatttgatgtatatggtttgacaaaaccctacaagtgtaaataccatgtgaaaaatgggcgcacataacacaatcatgtcatagggaatatagaattttttaagtgcacaattatatcagagcacaacatcagttcaaatgaattcatgtaaaaaacaactattgcaatcgagcccaatttgaagaggaattggacggatgtattcacagtaagggaaaaaaactattgcctaagaggtcagcttcgttcgcaagaaaatattgagacgtcagtttgacaactgtgacacaaagaagtacgtaaaactgtgacatcatgagctcaaaaacctcctttgcagctttggttcctcctaattaatgaagccaaaacatggatgtcactacaaattactgcatcctcaatcaccaagccatcaacctatggaagcaaaacctcacatatcacctgaaaaaaaaggaaagttcaagagtcaaatcatcaagctactgctgatcatgggagaacaactggtggagcatgtatatccatccaaacaatgttgcagaatttttcttctaaaggaatatatctgcatagagaaatttagcaagaaaatttgcttgcttaaaccaaaacgtgtcctcaagtaaaattgatagaaacctagcttaaaggaaacagccagtgcatttaaccataatacagaagtaacctcacctgactattcattgcttgtcattgcttttggtatttcaataccaagaaatcaaatttgatgattgaagaccagtctctctcaatgtagcagttaccttgaaaaccaaaggagaaaatagattatacaacattcatggcatgtctttcctttagtgaacagcattcgaggcttcaagcttgaataatagtgggaataaattttagggagtatacaaatatttcaaccaaacaaaataatttatattaaaggagaaatcaaaatctttgctgcttctcaccttatccaccgagcagtggttgtcaggtataaactttgttgtcatgaatttttccttagtagttccagagggaacatgaacttgattgatgccaatgcttgtgatgagttcattcacccatgcgaccagtaataactccacaaggtattctcgatgcattatgaaattacgtttcactggagctacttcagctgtaaattacataaatatagtttggatgcaaacactcaaattgtaattttgtgagagtaaacagttcagaccaacttcagtgaagtctgtctaatttacaagcaaactgagcaagacattaactactgagttccactaagatatgccactgaaacacccaaatcgctcaacattgcagaaattcctagttaactaaagtgccaagacctaaaagaaatttgaatccaaaggaaaggaaagatgcatgtgattcaatagattgggagaacctgagactgagatgtatcatgaatggatccccaaataaagcacagtaaggagggggaggaggacacaactgctcctaccattggtgagggtcgccgctggaggtagagattgaagagtggcgtgctccctccgtcgcgctcacaagtctggctggcgactatagtgtatcaatgcatgacgacaatgaccaacggcggggcacggctcgatgaacagaattaaacaaataaaatttctattgaaaatatgtcgagtgaatttaacattggccaaacaaatttgtcctcattgcacctgttgacggctgctgacctgatgttccaagtggaatttggataaaattcaaagcaatttggtaagcatataattaagttaaacaatcatatataactaaacattaatatacagctaaacaatcgtaatggccgtatatgtagaaaaaatgaggtcttgaggttcagaaattatctccaatcctagacagctactattatgttcctctgtaaactattcagcttgaactgtacatgttgtcatatagtgaagcatttgagatctccaaacctatgacaaatcaggagtatggaatacagggagaaaaagcattgagctggaagaagcaaccatcagcaatacaggttgagatctattagaagtatatgacaaatcgctataaaacagaatacaaaaaatacattgagcagtaaaaaacaatttgagaagcaaaccatcaaaattttgcgagatcgagatgatatcaagatatatgagcagtacatacatgtgacatctgttctcatccaattagttagctgcaaaaccgatttgcaaatgaagcaaaatatggagtgtattgacctggccttgcagtaggtccggatgtagagcttactgcattgaccatggaagtgggctgaggggaggagccgattgacctgaataacccacacaatagatgaattgattaattgagcagtcaattgatcgatatcctcgctaacaagaaaatagacgtaggtgggcattgggcacgccgatgggtaaacacattctacttctgtccaacgaccaccgtaaacctaaatggtttgcattatgtgcgcaaataagataaatctaacaaagacactataggaggctggtgcatgaaccgaacagaaaccccctccaaatcatgagcgcaaaccccacattcccctccatagacccgcaaatcaactatcacaactctaatttcgatcggttatcctgagcccaccgaacggcaattgagaataaccggaaacaatttaccatggtaagacctagctgattgtgtagctccagccttctggacctattgaagataacgtgcatcaaatcaaacacatgtactgcaaattattatgtgaaactgcacatacttgattcagtaaaatgtataactgctgtgaattattagttagattaaccagagacattcaagtacatttcctggagataattcaaccactggagatagttcacatggtcacatgttgttgacatcaataggggaattaaagtggaatcaaagacagaatgtatttgagccacattcaaagtcattgaaaaattcacaaaatataacctgtggcagtttggcacactttttcagacattttcagtaagacacaaaatgtaagtcattgaaaaattcacaaaatataacctgtggcagtttggcagacattttcagtatgtcacaaaatgtaagtcattgaaaaatttgcagacattttcagtttttcagtatgcaagtaacctgtggcagcgatggagtttgacggcggcgccggatggggacgacgtcggctccatccgcggccgatggggaagaccacggctgctagctgtggagtgcgcggcggcggtggcgatggcggtggaaggggccggtggtggcggcggccgcggctggcgaagaagccggctctggtgaggctgcggtggcgcggcgttagtacatgcgggtaggagcgaggaggcgaggaggatgagaggaggagcgatgggacgatggcgacgaagaagtcggctctggcgtgtccagcggcggaaggggacggcggtggcagcgggggcagaaggggtcgacggcggcggaaggggtcgacggaggcggcggcggcggctggcaaagaagacggctccggtgaggctgcagcgacgcggtgccatgcgaggagcgaggaggaggaggaggaggagaggataacctagacgcgagtggagaggcgtagtcctcgcaccgtcccacgtgaattgagatccagtgcagtccatcgcacacgtggagaggctgtgtattcgcgtggtgacgtggtgaaatagtacggtggagatttacatgatttgaggatgcacggtacggattgatacagatgatttggcctgtagcattggaagggtgcaacttctcctttttatattagtatagaagtatagatatagatgtcttgaatttaccaatttattttttagttttctaaaaaagagagaaaagataataacacatgtacttagcgatgttcatgtcttgaatttaccaatttattttttagttttctagaaaaagagaaaagataataacacatgtacttagcttcctacaactatgtaactttgtgtgtcctgtggagtaataacagtttaggtgttttcacagtaaccaaatgtgttactaacatttcttctcgaagattggtcttttaaaatttctctctccataagtagtaatactaaaccattattgttaccacttttcattgtgagttactaccattccatcatgacgttaccgtatgtgtgtaataacaactataatttataatttttacagtaacattgcttgttactgcaattttttaatagtgttactacaataacatgtggtaacaatcgaacacagatacaagacctaccacccaccttgaactagtaaaggtaggtgcaagtgatatctttttgaattctcatctttaaacaatgatatctctcacaccatattatatttttgaaccgtttacaccgtaatgctttaaaaaatgagctctacaaaactagatccgtcataaatatattttaactatatttcatcagtgttactgcaagtaacttacaacgttactgcatggtggtcatcctattactgctctgtttatacgagacgaggacatcaaataggtgcacgtggaaggaagttagcatccgggtttaactgacgtggcagtgatttgaggtcctttgaccatgctttgatttgggtggaaggtggattataagtcatgaaagaagggggaggtgggttgggcccttcagggggaggggggttatgagcccaatgaaagaagggggaaggtgggttagacccttcaggagaagaggggaggtgggttatgagcccaatgaaagaaggggaggtgggttgggccttgttgaaggggaggggtatagaatagcctcacccttattaattaatggattataaataaaaaagggacaatttcgtttttgcccccactttcatctccaatattgattttgcctctactttttagggcttttgtttttgcccccactttttttgaaccgaaagaggcttttgccc

SEQ ID NO: 18644 - DNA, 24515 bp, Oryza sativa
taagttgcataaactagaaatgttttggcatgtgacacataaccctaggtattatggttttagtttcacaaaacctcacttttaactaatttgagttgctactataacaaaataaagaatgcttaactaggtggctaattgatcaaaagaatacataaattccatatttgattttagaactcataagtatggtggtcaaagatcaattggtcaaaggtgtggttttatgaaacactagaaccataatacccagggttatatgccatgtgctccttgtgattttgtgtaactatgacataatacaaggggtatgtgaattttgctctagaaactctgaagcatctgtgcttgaacataaacagttgataggtcaaatggacatattcacaaggattatgtgaaacccttatgtttgttactacctccgtcccaaaatatagagtttgggttatacctctacgttttgtaaccaagacacgggtaaattctccaattggtggtcaaggacagtgaatggcttgcagaaaagcaaggggctcaactcgttgattattttggtcacttgggagatttggaatcatagaaacatttgtgttttcaatggagcaaaccctagtgtggtgaatgtgctccatgctgtgtccagtgaggccacgctttggtgtttggcgggagctttgaacttcgaagctccaagacctgttgtctaaggcttgtagttcttgcaccctaggcaggttggcatgtgttatctttgttcttagagtgggcgtgtgttgtgttcctataagactttcaattgatgggtgttggggtttgtttaaatcctacatcccagccttcctttctatcttttaatgaaacgatgcgcagatctcctctgcgtgttcgaaaaaaataagagttcgacacgggtattaagaaagtatgtggaattaattggggagatattgtgattggttgagaagaggaattatgaagataatttaaatggtggaaggttgtgattggttgattggttgagaagaggatgtatgagagagattgttatattttgggacaagttttgaatgctataagttgttatattttgtgatggagggagtagcttttagtgcatttcttactttgatatactaaataagaggttctcttccaatattattctttgacaaaactcagatgcagatgcaaaggtgaatttccaatcctatccccgcttatgggattagttttcatacctccctctgtagagaggtacttcccaagtagtgggagactgggatgtataataccttccttccaaggaaaggagaacacatacatgaatagcagttttcttaatccagttctttacaaaaatggatcacaacagccaacttcacatataaaatgaatataaaatttcgaccatcagatgtgataaacttgaactttactcacaaccttctggacagaagaattatatatattcataataagttaatatatataaaatcacgatgcgatggacctctgtaatatcaaaagaaaattagtttacttttcttagaataaaacgagcagtcgttgtttactcattttgtctaatatgaaggaaaggaaggttgttttgttatgcaccgagggctgcaatctgtggattttctcaaataaccacaaagattgagaagctatgagttggcatgatatcttttctttcagttagcttgtaaatgcttttgtagtaacattgaatttattattgtgtgcacagcaaaggcataattgcggagtgctagaatggacatacatgtttctagttcattattcagtagtcttgtttaaatttaggcatgtccagtggatacttagggatatttggatggatataaacaagtcatgtagcagtgaactgaggaataatggctctagaatccttcctatataggatacggattttagttttagaggatttggggtcccctactacccaagaattgtatttgtcgatgtgttttcttatcttaatagtaaacaacattttactgtaatgtatttactgcactggatttgtatttctgtgtaatattaatagtaatattctcatattactagtaattcaggagtatttgtgctttatggccctaaacttgtgccggaatttcacatgggtctctgaagttgagaattgcatatttagggcactaaatttgtaggtataaatcttatgttctggtagccagaactcatgggctatagtaagtgaaatctcttctattgtttacctatattcgacattattgccatccgctgaaattctttcgagacggtaggtagctctagttacaacatgccaaaacaataaatcattggcattgaccaaatattttcatcaatgtgaataacattgcttatttatgtagctgggtgctatattgtgatatggggaatgtgttttgtgtttaaaactattgaagtttcaagagttcttttggtcaattttaccattgagtcttggacttgtagcaattaaaaggaaccattgatgcattgattttcagtatcatataagcgggctaaaatttgaagtgaattgcactgtattgcagggataaatacgtttgattatacacaaccggatgaatggtttcaaatgaatgctgttcttcgtgtcagccttgggaacttcttgttttttgcaatatttgctctgatgatgattggtgtcaaagaccaaaatgaccggcgtgatgcatggcaccatggtggctggattgcaaaaattgttgtctgggttgttctcatcgttcttatgttctgtgtgccgaacgttgttattactatttatggtaagctttttatttgctaatcatctatacgtgtgatttactgtacacccattattctttcccctttctctgttggcgtgctactattaatgtaaagaaagttctggttgggtgagcgatggcaatggttttggccttttggtgcgggtaagtaagttgttaggtgggcagtgtgggtgactgggaaaatattgcagaaggaaatgcacctgttttccctataaccagattttggaaaaggaaatcttgttaaattgagttacttagttttaactaagccagtaacgagctggtggtgagctctggtcccaatgctaaaattgcatggagagagtgcctatttacccaaaatagaaaggtatatgcagacttgtttttgaataatgttagatacatatgtaatttttttagttggctattactttcatgcatatgcaacagtagttcttgtaccctggattaaaaccatccaacagacagcagtccatgtcatgatggaagattatctaaactctagaatttagaatttttaattaaatcgtaagcaccgtatataatcttttttgcctcactatacacctggttttggcaatgctttcgttttgcaaccctcgactgttattgcagtttaaaccacccgaaacaaattaggggtaaggtctggtccaactcagtccagccagacacatgttatgcgatatggccaatcttctctagaatgcatctgcaagcaaaattaggtatggctgattactcctagtgtgcttgagcaagcgtacagtgcaatgctcagtgaaatgtggaacaaagtgaaatacaaggcacaatgcttggagcatcagcaaattgcaatttactccaagaattttaattgttcggtaggtaacaaggtccaataattgttgaaagctaatgcattgaaaccctgaaacaagcctaaatttgcatggttgttattcttctagtaacaaaaggatgccaagataattacacagtgcagtgttgattagctttagttctaatctatttctatttaagaatttgaattatattagtttgttaggcctctgtttggtacaactccaacttcaactatttgggggttggatatctctatctcaaagaaaatcttcgagtttagctgggactataatagggttgttagggtaagacatgttaaccttgttgcagttaattgttggttcacacaacatgaacctcctttttatattcccagatattagtaccacgttttcattggttcttatgaaccagttatcaacttatcatcatgcctcttgtgtttctctaatttgaagattgtccattgcagaggtactgtcaaaatttggatccggcttgtttcttctggtgcaggtcgtgatgcttttagacttcacaaacaattggaatgactcatggattgagaaggatgagcaaaagtggtgtgcacgctagtcaccatccaatgattcttgaaccaaaaaatttctttcctatcactaattctggtatgttaatcttcatgtagggaaattgctttgttggtagtaactgtggtttgctatctctctacatttgccttctctggtttgctcttcacgtggttcaatccctctggtcatgattgtggtctcaatgtgttcttcattaccatgaccattattcttgcttttgcattcgccataattgcgttgcacccccaggtgacacttctacccacttcaagtattctcatgatgcgctctaattgtattttttggtttaactagctataaatgcccgtgcttgcaacataaattaagtaattacttagatcatgatatgttttagagcctcaaaagcaaaagaaaatcattcttgctgatcataagctcgcatttataaaataatttgtacatgtatgtggagctaaacattaaactacaccgttgcttctaataatagaaaatgaatctaaattattcatattctactaatgtcatattttattgtagttttattttcccaccatttggttcaaataaatactctacccattttttctaacttgctacggcacccctccccactattcccaggccccaaacgacggcaatggtggtggtggtggtggtggtggcagaacgataaccaccactactctcttttgaacgtagtatagacattgagcatgcaccattccttatgggtatactaggacaaagtatgaagaatattcacatatgtgttttggtaaccatcacctattagtaatagctgccaagcagataaatttatttaaacaacacaatataaaaatgtttagtaatgttgctcagatgtacttcctatccatatttgtaactcgatgacagtctgctgtattcagtcttgtcagtttgcatagtgaacctgaactgcatttagttcattcctgttgatattttgtgattctaataatcctatcaccaactatggatctgctgggtccactcatatttttctactgggtcataatattgattacgcttatgtttacatttataacagacgtgggattgaattgaatgcctctgatgaaacaaatatcaaatacattagttatctcctgctttcgttggttcctgaagaaataatgtgaacttgtaatgtttccttgcccaggtcaatggaagtgttatgcctgcttctgttatttcagtttactgtgcatacctgtgttacactagtctctcgagtgaaccagatgactatgcatgcaacggacttcacagacactctaagcaggtttcaatgagcgctcttatactcgggatgctcacaactgttctctctgtcgtgtactctgctgttcgtgctggatcttccactacatttctttcgccaccatcatctcctagatctggtacgtaactgccaattaccaaatacccagtctccatctgtgtgcatgctggctatcttgctaatcaacaatgcaataggaatcaagaatcctttacttggtgatgataacgtggaggcggggaaaagcaacagtaaagaaattgatgcgcgccccgtgagctattcatatacattttttcacgttatctttgctcttgcaagtatgtattcagccatgcttctgactggctggacgagcgctgcttcagacagctcggagctgatggatgttggatggacaactgtttgggttcgcatctgcactgagtgggctacggctgcattgtacatctggacccttgttgctcccctgctatttccagaccgggacttctcataggcatgtcaagcattgttaaaaacgtggttaaaccatgaaattatatatatatatatgtttgtgtgtgtgtatgtacgtacgtacgtacgtacgtacgtacgtacgttattcgttgtgggaagccagtagttatgtataaagtccttattgacatgtacgccctcccgtttttttaaatatttaatgcaatttgatttttggacaaacgttaactatttgcttcattcgaaaattttgtgtcaatatccattcattttattcaacacttttgtgtaaacacaaaaaatatagggttaacagtgcttgaagtaactttaatgacaaaaaagatcataacaaaataaatgactataataatagttatgtaaattttttcaataatatgaatggtgtcaaacactaaatatgtatagggaaattttgctacagtacgctgctattgtgtggttttagccctaggacactgcaaaaaattaacttttagggaaaaacactccataattgtggcattttgccggtggatgttggatagtataggggaagaggaatactgcaaatattggacacattgtatggagcctcgggagctagtatatataggagtatataaggaggagataaggaaggattatagatttggaaggaatccaaacaaatcaatcatatcctaatacatctctaactaccacatactctaatatccccccgcagttcaagtgttcacgtcgaacacttggactggagaaaaaaaaccgacaagagtactcaacacgatgatagccctttgtgccgtagtcgatgtagctaaaacgaaggagccgagagagccgtggtcgatgaagccgtgcgtagagtagccgtggtcgatgtagccgagatagggaagcctatgatgtcgaggtagctgagccgcaaggcgcacatggggcgccgtagagtggtcatggacggacgggagggcgtcgtggaccaatggtgtgcgaggacgcgctggagacaaagacggtgacacaatcgcggtagtcgttgaggaagatgacgccgaagagccgatgtaatcgaaccgtgatggacaagacatcacgccgggtttgccagacccgaggacaactcgggacgaacacgcgccatggtgttgccaataccgcgcgggcgaggcaggagaccactatgaatcatacgccatgtcggaggagactagcaaagaaggcatccgggacggtcgcgacgcgagaactgtgtagagggagaattgccggagcagcacgcagttgacggagaagagcgaactgtagtcgaggaagatatggcgacgttggcgatgagacatgttggacaacgaagaaggcaaaatagcgggaccaacggcctagacggcgacgtcagtagccatgtagaggttgctggaccaccggcctagagcggtgatggtggcaacttggagattcgacggcaatgctcgaagttgaggaagaagacactgagcggctgacaatgaccagtgtgcacaacgaggttgtcaatgcgcgaacggcaatgaagacgacgaaagtggcgaagctgcggtccgagagggcaacacagctacagctccatgtcgatgcagcggtgagaagttgatcggtgatgtagccatgctgaggagggcacctctcagcattgcaacaaccagtggaggtgttgaccacaggcaacggcactatggcccaaggggggcgacgtagcggcaacccgaagcttgatggcgtagacgcatagccgaagatgatcggcggcaaggtgtcgccgtagccgggcacttgaacgggtgatcaagccgatgttgcacacagcggaacgacgaagttgaagccggagttgatgccgatgtcggagacgcgtagatgtcgacgaggcattttgcgacgcaaacccgatctctaatcgggaaaaaaaatacgagcaagcaacagcgctcggtggcatatggtcccggtccctagaccaagtccagcaactcccctgcctcaacagtaccagcagcagcaacacatgcacaacatctgtctcctcctggcctccacagccagccatgaccaagttgtttacaccaaaatttagcacctatggacgaaataggggaaaattgccaacgtttggaaagtgccgggtttccttcacagtgctggtcagaccggaggtatgtgggcggtctgaccgcggcctaaattccggtgtgaccgcaggtatgtggccggtcagaccgtgagggtccgagcctgagtctgttttcgtcgggtcttgggtttccttgcttgggaaagcatgtttcgggtttcctttggtttatatcccgagttggacgtggaggagggtttgtagagggcaagaccaacccctatttaagggacaaggtcagttcaattgtaatcccctgaacacacaatctacttgaatgaatcgctttttctttttttttttttacttttcagccatgttttctattttaccttaattttagttcatctttgtcgattgtccgccgccgctgcgagagtgcgacacctctttgtgggtttatgctgaaaaacttccgttttgctcacgagacgggtagttatcctcgtattgatctaaattggcatagaggctgattttgatctctaaatcggctctgctagccggtttagccgttttctacaaaacccatcttgatttggccttttggctaaatcgaggtggttggcgtttaggtgctgcgatcgtgtttatcgacttgtcacaaaaagttgccaacacgatttttggcgactacgttggaaatcgaaacttctggccatccataaggccgaaattaatctacatattaatcatcagagaaagcgccgaattaatctattcggcggcaagattttgtggttattcaggaaatcaatctacacaaatccatagctgttgctattcgatttacatctgcaccatagccggcgtcgtcgttgtctgcgttgaagccgatcgatttgatcggtttgatagcagtagacgccgagcaacagcagcaggtcgtgtaggtattgctgtagagcacggcaagaaaatcttattcaattcggtttgctgagtatacgtgttctagagaaaaaaaaaatcaggctatcaaagcccgaaaagggtagttagcgaatgttcgccatcactagatcacacgaatcagttagaagagggaacgctactttcatggacgcgactactccgcgcgcggtaccgcaatagtcctaacgcgcgacgccaaactttccaaaaataggagcgcacttttttccccacgcatacacaccttgccgaaataaagaaacggcacgttcctttccccacacgcgtgatgcttctataaaaaaggtggtatgtgttccccattctgaactgaggtgcaggcgatgaatagtgcctctattaaacaaatgattgaaaatagaaatcaaaacacaaagaggaagagattaggaacaagtagagaaggtctagggtttcatacccaaattcaaatttgaggtccatcaaaaaaagcatacccaaatcacaaacttcacatgtaagcttatattccccacaaattcatagatctgtgatgaattcttgaaaaaaaaaaaaccacaaacaacccctcaaattggacttcatacactaagctgcatcttcctttttctctttctttgagtccctaaaatgaattttagttcggatgtttacaattgagtaagctatctccttttctaacactgcatcaaaaaaagtcaaaagggtaacatgacataagttacaggtcagaaaattacttctagaaacatataaaattacttcatcaaaacatgaaaattacttcccataaaatatttaagttacttaccaatcacttttgaaatactacaatggttaacaagaaacttagttacattagctatggatccataccctaagacttcacctcaataacctctcagaattttcattctgatatttatacattcgtttggtctttaagttactaaaattacttcaagtgcattatagaacatatatatatatatatatacatatatatatatatatacatatatacatatatacacatatatacatatatacacatatatacatatatacacatatatacatatatacacatatatacatatatacatatatatatatatacatatatatatatatacatatatatatatatgtacatatatatatatatacatatatatatatatgtacatatatatatatgtacatatatatatatgtatatatatatatatgtatatatatgtacatatatatatatgtatatatatatatgtgtatatatgtatatatgtatatatatatatatgtatatatatatatatatatatatatatatatgtatgttctataaatcttgtctaaaaatgcactttattccttaagttgattgaatataacattttgcaactttatctctaatgttgtttatactccactaagcttcatctccatcttttatgataccgcattaaaaagttaaaacgggaaaatgcataagtaccggctgagttacatatcagaatgaatttccacaaaaagttacttctaagtccatgcaaagttactttcttaaaacataaaagttactccccagtaaattttgaaaataacaattgttaaacttagttgcaatgctatgaaaacatgcaactatatacccagaccctcaaagatctaagagccgagagagggctaccgtatttatcatactcttctgctcaagactcatgtgggcatacaactttgtaatttccgtaggggaagctctagcattttcttgcagccaatgtatgaaaataaaacgacacacattggcatcctttatgaaaccggaatagaactaactaaagtattattagttgtactatactatataagttaattctacaacgtgcaaagttacttccacatcatgtaaagttacttctacaacatataaagttacttctgcaacatgtaaattatttcccataaaatatttaagttactttgagtttaaggcataagtatcggctgagttacatatcagaatgaatttccacaaaaagttacttctaagtccatgcaaagttacttccttaaaacataaaagttacttcccagtaaattttgaaaataacaattattaaacttagttgcaatgctatgaaaacatgcagctataaactcagaccctcaaagatctaagagccgagagaaggctaccgtatttatcatactcttctgctcaagactcatgtgggcatacaactttgtaatttccataggggaagctctagcattttcttgcaccaatgtatgaaaataaaaagaaacacattggcatcctttatgaaaccggaataaaactaactaaagtattattagttgcactatactatataagttacttttacaacgtgcaaagttacttccacatcatgtaaagttacttctacaacatataaagttacttctgcaacatgtaaagttgctttcataacatgttaagttacttctagaacatattaagttacttatgtaacatggatagttacttctacagtaaaacaaaaaaacagaaaaaagttggttgtttaatacttactttttgcacttttttgagcaaggatgctctacatcttctacataatcttctctcaaatctctcttcttccatgttgtactactctcttccggttttcagtttttctcgttagttgcagcgcggtattgattgtttcattacttgttaacccttatcaatgttgccaaacataagtttaggtacctttggctttagtctaaccatcctagttttgtattcacttagttttccctgattcctctctagatgtagtaactgcaagaaaaaggaaaagtgaaaagcaatcagtacttgaagcaggtttatagaaaattacttctataatatgtaaaattacttctcagtggcatgcaagttacttttgaaaattgataaaattacttctcaaatacaaaaactttgcatcatgtatatgattatctgcatccgaaacttgaaaagaagatgattgagctatagtgattgtacaccaagattaataatcatattacagggaccaaatatggatttaattactattctacacaacctagaactcatcatcttcagaccagacttcaccagaataggtaggaggtttagacctacataactgcatatttgaagtctgctaactcaggcagaaactgaggcctataagcctgctaccttggaacccgaccaagtccctacttatttgctgattgagcttgaatatggcccattagaccaacatgctgctaatctaggagcagcctaattttcagggttaatatagattcacataagctctgactacgagtactctgaacattttttgctaatagagaatggttagcgaaggctagaggtaatggtcacatacagcaaagcaactaacataatcgtcatcaccaaagtttgctcacaagagttcagtgacttaattaacctcgggtaaaatcaacaagcagtaacaaataactgagaccaaaagtcgctgtgtttcacaacaaatatttcattcgcgagcccaggaacaaaacaagataatccatctagagaaaagagagatagagaagtgatgaaaaacaatgaaatacttgcaagcacttatgaagcaacacttgcaatcagctatcagaataattgtctgaaactaagaaaaaatgcagttttttttgggaggtgctgatgataaacgaactagatccaagacgaaatggaagacactgcatctttacctctctcaaagcttggccctgcactgacggggctccggacgggcacgggaccaacactgagctgccgctcgggggccttgagctctctcggctaggagaagtatgtacgaggacgaggacgtgggtggagattaggaggacgatgaggagcgggaggaggtcgaggagccaggggtggagcgcgacggtgtcggcgacctgcgccatggtcatgtgctaggagagcacggccgggtgccgcaacggccggtggaaccccaccaccggctccagcaccaccaggttgttcgagcgccgacgccgtcgtcgatggcatcgcggaatccaccaaatcgtcattgcatttaccggattttggagcgctcgaggggacgggatgaggaatgctcgacgatagcagtcgccacgccacagcagaagcccacaatcgtcgtcgccctcgccggatttgtgggagaaagactcgccgtcgcctgatttgtgagagaaattcgcagtgggatttgggggaagaaactgtgttggagtgtcggtctctcttgggtgtaccggagtctgccacgtggcttccactcgggaatcttctcagctccgcccgcgcctggatcggatggctacgccaacgcgctgggctctcccgcgtgtcgggcgatacgacgaaatcgagagcgatcttgaattagattttacgtatttttatatgttttcagttttctttttccttcttttacgcgattgtttcgtaatctgttacaagtattctttctgtgttttttcactttctttttatccgatttcattttttccgttatagtttttatagcatttcagtttccgtggaaactttcaactttttatatagagaatttatatatgtaaattatatatacataaactttgtatatgtaaattatatatatataaattctgtatatgtaaaactttatatagtaattgcatctgcagttagaaagttaaatgtataaattttactagaaataataaaatgttgacggattttttttaaatgaacaatttactatgaaactttctatatagactttctattgttgtcgaaacgacaactgcatacgtcgaaagacgtggttactcaacgatggttggaaaaacgaagtgtattaagttttgaatttcacttgggggatccccctgttacatggccctaggggactatttatagccccattacaggttattactactagggtttaggttgtacaggggaatttacatgattacccttacgaaagggacatttacaggggtacataatgttataggggctcatgggcccctaatgggccgtctggcgatcgccggccctatagcccttaggcttgatgggccggaaaggcttcctcgaccctcgcggggctaacttgccatggcgaagtcgtcttccttcggcaggtagtcttcgccttgcacccttcgcccgagacgcctctggcctggcaaggcactcgtacgactcttcgccttccgccgttcttgctccatagcctttgccacgggtttcggcagattaggtcgaagggcctcatgccatccgccatcaagcccctcacaggcaagggtgagattggagcttcggccgagaccgtgcaaaccatgtggtatggtatgtggtgccccctttcgaccgatgctcctgccgaaacctacattatccctgccaatgaagtttgttacttgtgcggctggtattattttgccgcgcttcgcctcgtgcgattggtggttatatatattctcttttcccgggccgaacggaacagtattgggccttcccttcatgggctttttactgtgccgctcggacggtgggaatttaccgtttcgcctacccttgtgacacgtggtgctttattattggtgggtaggcgaacggtcgcctgggtgagctatatattcccacccctctttccttttcattggtacgcttgccatttttaccgcgcgcactctcttcctccgtctcttccttccacagcatttcttgacccctcaggtgtttcgcccattctcttccttcgccaccgcatatacgccgttcgccatggcccctcgcaagccaaacccagcttcggcgaaaggaccggatcctggccgggtcgatgacgacagcaccgcctttttgggggtctctcttgtggacgacgtcgagctggcgaagctggtcagctctggggcattggttgaggggcaggctttcgccgcggggaaagccgtggtgccgaggcctatcgacaactggacagtggtgttcgccgtcttttttgaggcggggctatggtttccgtgcaacgtgttgttgccgaagatccttcaccttttccaagtggagcttccacagctgagtccgtcggcgctagttcggatctccatctttgactgggcgtgccggacttccgggtttgagcccagcgccgagctcttcggcgccatatttttcgccaccgtgaactcgaagacggtgattaccccagccggaacgaagaagacagtgttcgggagcgtgaactttaacgttcgccccgagcggtctgatctctggccggtgaacactgccatgtcgaagtgggaccgccattggatggcgaggtggttctatcacaccatccccttcgcagctggttctgactcggcaaaagccctccggtgccggcgtagggtgattgcgccgaatcggaagcctaagatcgccgtggacggcgctatggaggcgcggttcgtcctactgtgcaaggtttgctcccgccttagctgccgtggcttggtggaggagttctgtatgcttcgcatctttcccctctcccagtcatggcgggtcacggtcgagcaatgcgaagaggctgatggtttgccgaacttggttcttcctgaggggatgaatagtaagaccgttcttttgctgtacactcctgtgctttgttattttgccttgtctgacctttaacacagctacaccctttacttttgcagtgtcgaccctcgatcaggctgaagccgaagcccgcaggatgatcggcgacgtttcggtcgtcgagtatagccagctgctaacacgacaagcagctaggcgggcaaaccgggtttacaacggtgaattgcctccccgggtgaatccccaaaaagccgacaacgatgcagggccttcgcgaaagcggatgcgtggacaagtgaagcttgcccccaggaagcgaagggttcttgcttcgtcggactccgacgccgacgatgaggacaatgccgaagaacgtgacggcgaggaggaaggagaggaagaagaggaggtggaggccgtggccgataaggccgcgaacgaggcgaccgaagaccgcgtcgacacgcccggctacactcctaccccaagtctaggtcacaacgagaccggggtggagtcgaacagctccctccttcgacgaaaggatttggaaggggcgaaggccctagttgcgttctcgtcgggcaaggcggcgaaaggaggtctggtcaagaagatctcaaaaaagaagggactcgtcgacatcgctcgcgttttcagtgacgacgagtcttctgacgagactccgacctcacctgctggccgcagtttggacctttcgactgctccccttgctccgctcggcgttgctggggccggcggtagcgccgccgccggggcttccgcctccaccgaacggatcgtgtcggctgcggcgagggttttcgggagccctgtgcgcaagccagccatttcgccgctggtcaaggcgaaggggaagtgtgcggccgccgaagcatctgcctcggagtattcccttgcggcgccccacttcgcccctggtgacttcgagacccgggcggaccttattccctttgtggagggagtaagcaatcttgtcttgcctgccggcaccccgagcctgttcaccgaatttaacgagttcgacgaggggtgttccaccattaaaagtctggcggttcgggtatgccttttcttccttcttcgttttcctcttccctctttttttttacgtctcgcaattaaccttttgtccttttcgtccgctcctatctttcatctagattcttgcggctcactgttcgacggagcgaaccgtgcgggcccgttttgacggttttaagagccgtcttcgggccaaggacgacgaaataagccgcaagaacctggaggtggagtccctggcccgcgtactcaaggaggcgaagactgaagtcaaacgccttcagtccgaattggacaaggggaaagaggcctgggccgaggttgatcgcctcaaggccgaactggagaaagagaaggcccattcggcggtgctcatcgactactacaaccttactgagccgaagatggaggctctttgccagaaggctagcagggccgaggcgagcgccgcggaggagtcgcagcggttttcgtgggagaaggcgaagatcaccgaatccgcaagaacggcttgccaaacgctccgcctcgccttaccgacatgggcgcgaaggtgcggggggtccctgccgaggatgcctcagccttcgacttctccgagtggacccagcaggctggcggatcggtttcggactgcgccaccgcgtatggcgattgctgtgcgcgtgtatcggcggccttcaccttaggccttctgcagcagttcggctgcgagcacatcgccgagttccctacctatgtaaggggggactgggagattagtgcgcagaacatttcgccagctcttcgcgcgtggcgaaaacagttctggcagaaggatggccggtccgctgccaaagcgtgcctcctggagcaactaacgaaggcggaggcggcagatcggggcgaagaggaggaagccgcgggcgaagaggttggaggcgatgctcaggatcacccagaggtgtgaggccctccgccctttccttagatttttgtagttttcctccctcttttgcgtttgcctggagaggcgaatgatgtatattcggcaggctgccgatgaaccttaaaaaaggcttttttgtacatttggaatatatgacacaatcttaattgctttttgatgatcgaggtctttggcatatttttatttcgctcatttcgcattatgccatacctccccctgcttccgcctattcttaccatgtaagctgtgttttgctatttctgcgctgtctatcagggggttcgccgaaagtcatgcattcggcccccttccaggagctggcaaagtcaaaacgagaaatttgtggcaatgaagggtctgccgaaggtgcgatgtccatttcggcctgtttatcgcgaaatggagataaacggtcgcagctacaaggttttcaaggttgccaactggctgcgggcgcaccccgggtgaacctgagaagattacgatcttgttcattcaagaccctcagaagacgtttggaggatatggctcgtttttggcgaaaccatcagaagactaatcgtcaggaaacgatctttcagcgtcgttacagtttagtctgtgtatcgccccctactcctcttaaggttgtgtatgatattagtagtgatgacgaacctagtttgccttatcattccttagggagggatagtgattacgggggcgaagatgtaatttacttgtaaagcgaattgtatcgtgttgtgaaccttctattcttcgattattttttcgaagttaataaagaacgtgctttatttccttttcgctatttttcgcattgtcacattttgtgcttttgttaggtcggaacatgccggcccctttgcatatatgagcgaaataggtgtactgacttttcagcttttcgtcgttcgtcttcgatctgtagcattctgtgtcgaaagaaacgcttttgcttttatgctgatcggacgtaacgtcgttcggctatttattttccgagacaagctgttgcggtttcaacgttcggcgagcaatgcttcggccgattcgtttcgccctcctggcctttttcgctgatcaggcgtttgccttggggtttttccacaaattatcaatcacacgaaaaataaaaagaaggcggaggacacagagattttatactagttcgggcctccaaggtggataatagccctacatccagtttttttttctttttcctctcttctcttttttttctttgccgaaaggcttacatagtgccgaagggcttacatgacagtatgtacatttttacaagttggcgatttgggtgccacccattctagacatagaagcgcttgagagagacagcattccaggaatggtcgaactcctcgccttcgagtgtcgctaggcgaaaagatcccgtcctggacttatgtttgatgaggtacggtccttcccactttgattcaagcttgccaaccgctactgggttcaccttcttccttaggacgagatgaccaggcatcagctctgtgggtcgaacttttttgttgtaagttgccgaagtgcttgtggcgtacttatgcatgtgctcgagcgcttcgactcttaccccttctaagagttcgagcgatacttcgcgcccctcttcgcccccagagaacatcacccttggtgagttagcccctagctctgctggggtcattgcctcatcgccataaagaagcataaacgggctaaacttggttggtcttgtgggggtcatctgaagggcccagagaaccgatagcaattcttctggccatttgcctttcgctgccccctcgagtcttttctttagtgcttctaggatcttgccatttgtacgttcggccgccccatttgattgcgggtgcgcgactgtcacgtcctgataaattcatcccgaaataaaaatcattttctaaaaggaataatagaattaattaaaattcgaaaagaatttggcaaacactaaaatacgtacaagaaaaattcgaatgtggcccggagaatttttgttaaattctccttggtctaaaaggagccctcaaattttacttgaattttcagagcaccggaaataattattaaacaacaaaaacaattatcaaagtttattaaaaagaaaaacctaaaaataaccctccttcctcctttgggccaagtctggcccaaagtcctccctctctcccctcggcccgtggccgaagtctccctttcctccctctctttctctccctctccttctctccctcctcttgggcccctcttcccctcccggcccactccctcctcctccctctctcccccaggccgcctcttcctcccttcccgcctgggccgcgtcccggcccaaaccgcgccacctagccgccccggcccaagctgagccgctcccctcccgcgcacgtgcgtcgcacgcgcgctgagcgcgcgccccgcgtggggcccacgcgccaggccggccgtcgtcttcttcctcctcccgcacggccctctctctctcccgtgaaaaccctacttcgttcctccctcgaatccgcgtgatttaagcgttggattccaaaattaattggggggttttaatccccattgaatcctcttcaattccccccaatttctcccttgattcgtgccttcaatcgccgggaacgcccgcgtcttctccggctgtctcccatggccgccggccgccattcccgtcgccgttccgccctctcccgtgctcggttcgcttccctccgctataaaatgggatcctcatcccccgttctctcgttttagccccctcccgagcctccccgtggtccctagccatctccccgccgccctcctctctctcccacgccgccggccgcctccagccgcctgtgccgcctcgcccgcgcaccggccggccgtgccgtcgcctcctccagcgtcgccgccgcctcctcttcgccggcctaccctctgtttcccgcggagacctccggaagtgcctccccgccggcaaccgtggtgttgccgccacgattccgcctccagccgcctctccctcctcgccggagcgccgtccggccgcgccgtcttctccctcggcctcgcagccacctcctctccctcggtcagccctccgtttcgcggggaaagcaccggagacgcgtcctcgccggcaaaacagtggcgttgccgccactgttccacctccggccgccactgtcgcgtttcccgtgcgccggccgacgtcgccaccacctccctcggctccgcgacgccgccctcatccccggcatcacctcctcctcgcccgaagctcgccggagtggcctcctcgtcggcgtccagtacctccccgcctccggccggctcctgtacatcgccggtacgccgatcgacatcgccgcgttgtcctctcctccagctgctcctctgtttcgccggacaccgtcgcccgtgctggcctctccatcctcatcgttgccgacgtcccttcggccgcccgttcatcctcgccggctcgtcgtctcgcggcgccgcctccgtcatcgtcattgcagcggcgtggagcacgccgtcctcgtcctcgtgcagccgctgccggctgtcctcgtcgcctccttcgccgtcccggtcgtcgtcgtcatcgtcgtcctctcgtcgttcccgggcgtcgcggcgttcgtccctccgtcgagccgttctcgtccgtcgtccgcgttcgtcaagcgagccgctgcagccccgtcgtcgtcttcgtcctcggctccgcgtcgtcaagcttcgtgccggccgcgtctcgccttcgtccaaggatcgccgccgaagtcgttccctcgccgtctgtctccgccgcgcccgttcgtcgttgtcgttcccacgcctcgtcgcgtggtggtaaggtctcccctcttgctgccccgtcctcgtcctttcgttgtcgcccgtgctcgttgtgcggttgtcgaccccggtacccgtgtaccggtgtcggtagtcgttcgcttgtgcgtgtggtgaccgtgttagtgtgcccgctcggtagccgcgtggtttccacgtgtgcagcccgtgtggtgtctagtggactccgttggtcggccactcgcctcggttgacacacgggatccgcttccgtcgacccgtggaccgtctctgtgtactcggtctgccgcggtcctttttgttgacatgtgaggtccgcatgtcaacggcgcagccttcctgtcttttctaggctagcgcttacacatgttttataattgcaaagcttaattataataacccgtaaatctccatataacatcattaaacttcggatgatcatatcttggtcatacgaactccgaatcgacccgttcaagtctcttaatgtttgttataacctaaagaactctgtgctttctttttatgtattgttattgcttctttataggcttgtagctttgcttgtgtgcttcgcgtagctttcgtcgttccggaggttcccgaagcgtggttcgcggccgtcgccgaaggttcggaaggccgttatctctgagcaaggcaagtcacatcatccttgagcatattgaatcccagtttataaaattattttaatttaaattaatgcattatcgctttatttaaattcccgcgttatcactgttttatttagccatgcctatttacctttgttatgaccttattattattgctattgttattattaccttgttcaccctaggataaacaaaaccccaactagtgggtattctattcatggttccactagtatgaatttaggtagatgcttcgctgattaattaggcaatattaggtggttttataactttagactttgggaattctcatatcatttggacactatggaattgttggtttatggtggaattggacatacacctctcttcctctttcaaaacccctaaaacctgttttcggtggggtttgggtgcatgccagttgtgggaagtagcaccccggccactataaggattaagctcgggcctctgttgcaaagcactaccgtacttccacatgtctagtgggtaaggcttagtttgtggctcagtctggtcataaacaaaagtacacggatggagatggatgaagtcgggggtcgatggacattctctaggacaaatgaaggctacacgagctgcggcccggtagtcgagatgtcatggcacagggttggtgccctgctgctaggggctcagtcctgcctgcctgtcccggaggttccggccgtaggtgggattgggtcggtactcttgtctatggctaggatgggttggaaactatgtcacgtcttccgtctgtataccgtggtggtatgtggcacgtggttgcacgtgaggaaaatgtgtcttgtgggtaaagatgtacacctctgatcagagtataatctattcgaatagccgcgccctcggttatgggcaagccgagcaatgtacccaagtcagtattttaattcttaaaatttgctcaacaactaaaatgtggaatggttggcctgggttggcttgggacgagctgggacccagggtcgggttgccagttcggtctgaatcatcgtaggccttgggttaaggcaggttcgtgcgggttcacgaccttgattaataatactgtgtagctctaggatcgtctttttaaaatggctttgggcaactaagtgacttttaaatgctgtttactgcaaaacttaacccctatattattatccccttgtacccccttgcattaattatgcatctccggtgtggcttgctgagtactgtggttgtactcattcttgctcaatctttcccctcttcagtaagagaagctttggagaaggtgtcttaggtggagtcctggcttataccccagttgagcgcctgtgaagatggagccgtaggcccgctagtccgctgctgtttattattgattgtcaggccttaagtgcctttgtaataatgtaaatattatcgatataataaagatgtgctttttgtatcatgtttgtgtggtgtaccccggcttttcctgggacggggactaatacactagcgttcgggaaaatgcaaattttctcggtcacgacagcgaccgacgcgaacctgatttccaggttaagcccttcgcacatttctctgaacttatcagagtcaaactgtttgccgttgtcagtaatgaactcttttggcactccgaaacggcaaacaatgtttttccacacaaacttctgtaccgctgccgaagtgattgccccaaggggttcggcttcaatccatcgagagaaatattccacagctacaattacgaatttatacccgtttcgcgccaccgggaacggcccaatgatgtccagtccccatctggcgaagggccatattggcgcaatgggctgcagattatactggggcgcggcttggcttcggccatgacgctggcaactttcgcacttcttgatttgctcaacacagactttcaacacagtgggccaataaactccttgtctaaatactttggaggccactgttcttgcagcctggtgcgcgccacatagcccctggtgtatctcctttgccatttcttcgccttcggcaaaagagatgcaacgaaataagggttgaagtaccccggagcggt

SEQ ID NO: 18645 - DNA, 5661 bp, Oryza sativa
ataaaacattcatcccattcagaagaacaatactttactaatgtataagatgaataaattcaaaattctttcagtttgatagtacctgatcaaatggatcaggcatcacctgattctcgagaagttcaggggagatgtaattttctcttagagatgaaatgtcaacagatggagcttttccaattctcacacacattgaggtaccgggatatggaggaagatgaagcttatatttgctcacaataggtgggggaacaaatctacccccaagaaaatggtgtggaccggtaaatttttttgcacagagctttggtgcagtcaatgatacctaggcacaccataaatcgcattacaaatgaaatttgcatgttcaaacagcaatatcttatactactatattgattcaaatccagaaagcttctgaaaaggatgctaagttgctaaccagcatatcaggtttaaaccctcctccattgatatctccctcttcaacgtgccaccccgaagggatatcaacagaaacaattgctggtcttttagcagaattatcaatagcactcagtgaaacaagcctgttgataagatcatcaaatggtggtcttggtgttcctgcattgatatttcccaaaagaaaaaaaaaagctaaaataaatgaaagcatcactgagctcaggaacagactcactgaaaacccttttggaacttaaggccttttctcaattcatgtggtacatgaaatgattcttgtgaattaatcctataaattcctgcgttgcaaatgcaatgggggctaactctgggatctgggctcaatccaatccaatttaatccaaatgatagcattggcagcattatcttaatgcacaaatcattcttgctttagtaaaacagtgcagtaaactatgccttagttgttcactcatacaaatctgtcaattgtcccattatcaaaagaaaaaaaaaacttgacatataacaagatcgatacagtatatttaacaaagtctcaaatacaatttgcgacaaaagaactagtaatatattacatgacatcagctgttattcataccacagttgagctacatcaattctcacttgtttcattcctaagttcctgttgataaagagactaccacactacagtctaacagagaatctatggccttactttacaaatcacatcatacagaatattcataaggaataaatatataagtagcaggcactgatcagttccctagtaccagcttcacatcaaaattactatgattatgataagatattggatagcatgcacataccatgaaacgaaaaaccaaacattgcatcaataatgatgtcaaactcctccgataaatttgcaggtaggtcttcaacaggaacgaaagggattgttagtgattcaagctgaaacaaaagagtggctcgaattatattggaaaagaggaagcatttggcacgccaagaaaatggaacaggatatatcagtttacctgagtacaaaggccagaatacagaggcttgggcgtgcgttttggataacatacagaaggcttgtacccaaagtgatgaagatgacgagcagctaccagaccatcaccaccattatttcctggaccacagattactagcacccttgtatgttcacccaacttgtaaacctgtgattttttttggggggtcaatacaataaagtatcactaattaagactcataacagtaacaaacaggtacaagaaggaaatccaaagaaagaaaaatgtgaaccacatgatgacagttccatttttttaggtctgaccagatttcattttctctactcaaagttagtggaattacacaaacccattaaacagttaaatcacttcattgctgtattggctagtccattctttgacagcagacagccaggcacaagatgattagttgcatttctcatcatgttcagcaacaacaggaaacagcatgataatgcggtagtgctgcattccaacctagatgattatatgcatgattttttaaaaaaatcttgaaacaaaactgcagagcacgagtacaccagctacagtaacaaagccaaaaagttgtgcaactcctcgttgctgattagagtcgctaatttacatgcttattaatcaaactaccacgtcttgaagaaacacaatactccagcataatatcaacacattcaggtaaggcagttacgtattgggagcacaaattcctttcgagattcagcgatagtgaatcaattgaacgcgctttgaagatttgttctacttttggaagaccttgcgttatgtcactagatatcgctttctcgtatataaacgtaactaagggggtgtttagatccaccggcaaatttttttgccccgtcacatcgaacgtttgaacacatgtacggagtattaaatattgacaaaaaaaaactaattacacagattgcgtgtaaattgcgagacgaatcttttaagcctaattgtgccatgatctgacaatctggtgctacagtaaacatttgctaatgacggattaattaggcttaataaattcgtctcgcagtttacatgtggattatgtaatttgttttgttattagtctacatttaatacttcaaatgtgtgtctatatatttgatgtggcccagcaatttttttttgccggtggaactaaacacagcctagcctatcccctttgtaaaggttttgtccataatgaccatgaacagttgctcctgtagtggccaaataagtagcaagaaacgattgaaaccgccacagcaaccaaaattgaaaggtactgaaacccatcacacagtaaacatcatcacccaaatcgggggaaacaaagcctctgagcgggtgcctttacctccgcaaccgccgccgcaacgctaagccccgcaagctcctgcacacacacacacaccaaacccaagggatggatgagtcagagaagccgagtggaggccgggggagggagggaggagtaccggaccatgagctggtcgacgctgaagccgagcgggcccatgagctgctcgtcgatctccgccgcctcccgctgcgcgaggtgcgtcacctcctcccccgacgccgacgcggacgccgagacggccagcgacgccatggcccgccgccaccgagggtcctgcgcggcggtgacgagggcggcgcggcggggtggcgggagcgggaggcgagggcgagggctagggctccgggggagagaggaggagtgaggtgggggaggaggggtgggggaggagaggaggaagggcatagcaagggagaagcaggccgcggcggtggattttttgttgttgcggagtgcggagccgccacggtcagcatcgtcgccccagttgcccacccgtctgtctgacactctgactcacctggtcactttgtatgtatggccaggccagctgggtttgcttgcgtggctttagcaaaaccaattgcttgcttggttgttggttgctttcttgctattggattttctttttctttttcaattttttttaaagtacgtacgatctagttgtacaactcatatacaactaaagacatgtaaccatatatcaatcaaaaagagcatattcatatacattgtagttgttgcaactgatgatttgattcactattatgtgagtcaaacggttgggtcgtatgcataataaattcatttttttaatatcattatggtatgactagtgcaatgtttcctttacacgtcatgttatttaaaataataaaatgctaaacaatttttcagaagaaggcaatggtactccaatactaacgtgtgggtctctattatcagtgaattcatgtgtttccgatatttgaacgctcccaactgccttaaccggtttaactctagcgcggttgtctcgctcgtgttcttaccaccactagcgcttcctcgtcttctgcccctacccaagctcttggctcactacgagtctcctctagtctagcacatagtcaaccccctcatcatccatgagctatccctaccctctttgcacgccaccatcaccgctccaactgtacatcattgccaactttctcaaatgcgatgcaatgtcctccaaatcttgtgatgatcctcatgcagctgaatacataggccttgggctacccaagtcatggctcgcggcttgggattcaatctctgctgcaaaagtctattttcccatcatgtaaataatgttcacaacccacgttataataggccatccctggtcgtggcctgatcctaggcccgctccaatcctcatatacctcctatgccccctctccacaccaagtgttgaggtcactctcatgtgttggctgaaactaaggcgaagaatgtagagtcagtggagactactccagctaagacagaggcaacagaggttgagctgatgactataaagacttagactattattgctacccaaagatgaaggtggcttcggtcgatgtggctaatgaaagtgcatgagagtatttatattaacttcacctacctcctttttgaatggttggttgttctctacatgtgaaaccttagggcttgttcggtttagaggaatttcaactcataggaataggaaaagtggatgaatagaaatgtatgcacgcatcaattcataggaatttttccaaaaggtttgagtggataaaattttttctatgtttcctctctacaacttgaatggaaaagaaaaattcctttggtttcctattcctcattcctataagccgaatggcacatgtaggaattaatccttaggatccaaatcctttgtttttccttcaaaccgaataagaccttaattcatgcctttctagacttcttccatgcctagggtttgaaaacagttctaggtccaactcactatacgtacatttctaacactattgcgttttgttcttgcttcatgaaaaaaaaaagtccgaacggtactccctccgttccaggttataagacgttttgactttagtcaaagtcaaagtactataagtttgactaactctatagaaaaaagtagtaatatttataacaccagtatagtttcattaaatctataattgaataaatttttataatatattagtcttgggtgaaaaatattactacttttttctacaaaataaaacaaacatatagcagtttgacttttaccaaagtcaaaacgtcttctaacttgaaacggaaggaatagttaattgctctaggaataagttcatttggtgaccctcaaaagtgattaaaatctaatccgtgaccctaaaccacaaaatcggatatcttgacccccaaactatcaaaaccgatgcaatttgactccctcggcggttttggagggtggtttcgctgacgtgacggtattgacctagtctgtgtgctgacatggcgcttaggtggcatttcaattaaaaagttatacatgggacccgtttgtcattcactcacaattgtggggcccactgacatgtgggtcccacatgccatcttctccctttcttctcccctcccttctctctttctttctctttctcccctacggctgtcggcggggagtgagcggcggtggcggcaggagctagctggagcggcggcggcggcagcccgcgggcggcagcggtgggcggcaacgggagg

SEQ ID NO: 18646 - DNA, 6982 bp, Oryza sativa
acgcttacgttgcatcagaagtcaagagacaattcaagcctcgaagcccagaaaagaagattcctatagaccccagtgttaggaacttcttcaggggtatgtctgcatctgtcaaggaggccatcaagctatcggactatgagcgaacgctgaagaaagcatcttctagaaagtccaaaccagtccctcagcttggagagcaaccaaaccaggagatcgagccgttggtgaccggtaaagaaatgacgatagaacaatttattactgacaccggtctaactacggatcaattgctaggagtcgcaccaatcgaaaaggcggaagtgaaatacatgtacgaactcggtaaaccgcttgtcaagcctgagctgctgcagtccctacccacacaaatgtacaagttccatcagctgtacatggagatgagcgccaccggtagagagatgatcggagcgaggatcagggacacggacttcttgcaaggagatgacattctctggatcaatttcaggggaatctacgaactataccagctggacgccctcgacgtctctattatgagttgctggattttgtaagtatatcgttcagttagatttcttactatacgtctcctttaattaattaggtccttgtatataagtagaccatagaaaataatatactcccttttatcgttgtagaatggagattcaaagggcccgacggcggagggttttcgatactggattcatcgaacctcggaaagtaaacgtcgcaatgctcgaccaatatccacaagaaacagaggacaatctcgtccatctcctgaaggcgcagcattacaagacgttcatactgttgccatacaacacagagttagtttaattttactgtcttcctacataccaaatttcattcccgtacgaacttgctaagtgtttcatatgtaatgcatcccacgcacattgcagattccactgggtgcttttactcatcgacctggaggcctgcaccgtcaacgtatatgactcaatggataaaaaagagtctacgtttgacaaggttttcgaacttatagacaggtaccgtcataagttcctttgttaattaagaaaatcttgttatgttaattgctactacgaatcatagctttaaactccatgtagggcttggtatcggttccgtcatttggtccgcggcaaatggagagaaagacttaggcggaagttcaaatttcctgtgagtacacatgctctacatttatatttctcttgtttgtcatttatttgtagtgcgcaaagcaaaagcagggaactaacttgtgcggctattacgtgtgcgagtattgccactgccttgcagaccaaatcatcaccacaagagagctcgatgtacgtacaaataaattcaaaatttcattacgtagcgatttcttgtttaattactaatcaatttcatacattcatatagtttattcgcatgagggataacctgaccacacacaaggaatttatcgtggcggttcaagaacaactcatgggattcatcaacgaagaaatccttgatcccaagggtgaattctactacgacggaaacacaattcaccggtccttagcttctgagctagcagcgagtactactacgtcgaaatcgtagctagctaggacatataatggattgtaattaatacatgactacatatgtttctatatgcatgtgtacacattttctataatgtaaatatattttgatcatatatatatctatatacatatgatttgcataacatatatatgtataaatacatatatattatgcatgtatatacatataatataatataatatatatatatacatatatatatgtatgcatatatatgtattgaaacatatatatgcatggtttatatatatatataaaccatgcagcaacaggggcatgcaaaaaaaaaaggtcagctcgatttttagtcccggttggtgttaccaaccgggactaaagatcgatctttactcccgtttatttcacccgggactaaagatagcgatctttagtcccggattggtactcccggtttggaaaccgggactaaaggggggttacgaaccgggactacaaagggtttctccaccagtgaatggaccctttaagatacgagagaaaagggaagaactaaaaaatgtctggcagggttttgaatttctaaatatgtgtttttttgccggtgttgacaaaaaaaaccgagaccaccgaaattttggtaatctcggaattttttgaccgattttttttttgttttttaatacattttgactgaatttgaataaattttgatgaaatttacaagtgtttgagaaaaaccaaaaatttcgaggagatttgtgcttgccggtgggggctgaaattttaaaccatggtatgtctggtgggctgaactcgggcgtaaacttagcgagccaaaaacatgggcgaccttcttgagtgacgcgtctgcgccaattagcaatttcgcaattactcacccaaaaccctatatatacacatctagcttctcactactggcaatgcaaccaacacgtacgacacgacgcctacttcacactgatatagcggctatggctgtgcccgtggagatcacacgcagcgagttgctcagaccgtcgccagcgtctgcgtcgggcggcggcgagagggccggccttaccgccttcgaccgcgccgccaccgacggccacatcccggccgtcttcgcgtgaaacgcggcggcggcgccgttcaacgacgatatcacgttaaaattagaagtttggttgaaattgaaacgatgcgctggaaaagttgaaagtttatgtgtgtagaaaagttttgatatgatagaaaagttggtagtttgaaaaaaaaaattggaactaaacactgccatatcgacggccaaatcgattaatttccagacgcgtatgctcatctatacggccggcacgtacgactacgtgtgcacgtgcgtatatactgttcatgctgatccagaccagccacgtacgtatacgtatatacgtagagcgtctcccaaaatcctatactactcaattaaattggcgcgcacgaaggtacataggccaaatctgggctccctgccacccgctggttggtgggccggccgggctcttcctcccgcccaattactcggggggaggctgacaagtcgagcacacgacggccagatgtggcgttcccgcaccgcacgccaacttagtgctaatcatcatgtgtttagtgctaatcacgcttagtaacttttaattggtaaaagtaatcgctacgttgaaagtttcaaactataagttgcaagatttcaaatttagggttgaaagttttaaaatctgatttggaagtagttttatattttgagttgaaagtatcgaaattcgattatatgtattagaagttttaagttttggttttccattaaaaaaatcaagttgaaaggttcaaattttggattttttttttttaaattagaactgaaagatttatctttttagtttgaaagttttaatttgaaagttataactgaaagatttatcttcaaattttaacgctaacaacagcgttggattagggttagggttttttttctttttttgtttcgattttttttctcagtgcgggcggcttaagcacctgcacgggaaaatcggttttcgcgtgcgggtgcgtctcccgcatgcgaaaatcgtgattttcccagacgactgggtgcatgtgggccacccacccgcatgcgaaaatcggctcgcccgcacgggacaatcggtgctgtagtagtgatacagatagaaggttgtgatgtatctagtgagggatattccctccgtttcagattgtaagactttctagcattgctcatattcatttagaagttaatgaatctagacacataaatatgcttagattcattaacatctatataaatgtgggcaatgctagaaagtcttacagtgtgaaacagaggaagtaatttatattgttcactaacacctaatatttttctgggaacgcggtagccaactaaaactcattttagcatcttctcatccatctatccccatgttagatatttttggtgtttgttccgatctatatataaccaccacgaacctaaattattgaggtatataatacgggatcggaatatgtacaacctacagtaaaacataagataatgtgcaaaacaactaatgggatgctttgctacagtgtttaatcagaattataaatttcagtgtcatgatttacgaaacaccttgatacgttgcgagaatctagctgctagcgtcttgattgctccaactctctgtttaaggcagatctgaaaggctgaaacagatgattggtaacataagccatggtggtaagaacaaactgaaaaatatggactatgcaatttcagaatattggtaaaaccataaacaacaaaaagaaatagattttatccaccttcctgacttgtaaaagaaagaactgaagcaagagataagtggacacaaagcatatcattttcagatttgcatcaattgctgatcaaccaaacacaaaccctgattactcatttggagtcatagaaatgccatccaatgaacagtgcaggataagagaatgaaacagggggtgatggccggaccaattaatcgctacaaagcagatcaaactaactcagttacctgatggaaagttttctgcaagcagtgataagataacattctaacaatgtgaaagaaacttcaagtaatcagacgatattaaagaatgcttcataaaagatagaactgattgaccgaagtatcagagccaaagatcatatacaatcagcgcttcatgaattaggggatctagaactgatgaataaatatgggctaccgagcgaagcaaagtgtgcagatatattccatcggttccttgcatcagcgtgttgatgtgacggctcacctggttgcctttatagatgggtgtttttttgttgagtcaaattctattcccatctagtggcaacgattcccagaagaggaagcggaggaggaggaggaggtggtggccgactattcacacaagaggaagcggagagatggaggagaaggcggaacggcgcggggaggagaagcgagcgtggctgagatggcgggcctgcagcgagcacacgcgggatggagaggagaagacggctagagcgcgtgagcgagggatatggggaagcagcgtggcggaggaggggaagtgagcgcatccggggacggcggcgactgtatgcgatgcggaaggtggagaaaccttggaagaggagatttttccctatgcgccattaagaaagatggtgtctgcctctgtgccactaaaaagttcgagccttcttctctaccatcgtcgaactatatcgtgccctccacaccattccgtccgtttttggtcgtaacagtgggtaacggcgctgcgtagtgacttagttgcccttaggcttgagaggccatttgatgaagtttgtttccttctgtgccattcggaagcagccacatgcctgtatttttggcaccaaaggctatactgttggcggcaaaggaagtgttgtttggcacctactgagcccttctcctcctatataaaacacatcagcccttgtacttccaactcctccatcttcatctcattcacctctcttcttctccagccatttcccaagaatctagcagctatggtggtagggtgaagcgggtgctttgccgcaactgccatgtgcttgcaaaccgattcatctcgacaacagaaaagaataacaattgtgcatttcacaagtgcccttatttagcagtttgtgtttcattctctgctcacatattgtctttgggttttttgttattgtttgctcacaatgtgttgatggtttggctttcagattggaggctgtcagtattatcagtggaaggatgaaatgttggacactggagtgcggacacatcttgcccttgctccaattcatgcaggtcacctacaggcagtggcaccacttggtggtttccctactgcagctccacaggctatcatgcaggatcgggctgctggagttgtaggcaatgcacaagtggacattagggtgatgtagcagcttaagtggcttgaaaagatggtctatgtttgcactttcttactttttatgctattttcaagaagtagttgggtgtttgtgtgagtagtcatagataaatggatgtatggaaggatgaatgaatgaatgaaatgaattttcaatgatgaatggtgaaagtgtaaatatccagaatgaatcaacaccaaatgtcagcacataacaacaccaaatgaaacaacataacataactagttgtttcatcacataactagctgtttcatcacatgatagcaccaaatgtcaacaacaaacatgacttagcaaaatacattgctccacataccaacatgccaaagtaagagaccaaaagaagagtgtttcatcacatggcagaagtttttcaccatcacagaataaaagaacagttatgccatagaccaaaagaaccacagatcaaaagaacaagcacattttactgcagcttgagcttctttctcctggtatttctagcagggctgtctaggcttgatgtagtggttacgacttgggctttcttggggtaagcttcctgttgatgcatatcttccttcttggtgaagcctgggacagcacaatctgcagtggctaggtctcttgggtctcctaggtctcctgttgagtggtctcatatagagctaggacttgggccatgctttctcgggccagcccaaggcacgatggcccagcacgagggaaagcatggcccaacatgacacggctatgggccgggctggtacggaccatatttgagctgtgcctgggccgtaagttgtggcacgctaagcggtacggcacggccattgggtcatgcctgggctaacc

SEQ ID NO: 18647 - DNA, 2813 bp, Oryza sativa
cttcattatcttgacaacaatcggtcattaaataagacagtcatagggttcaaactcatgacgtcacacacaggagatgccatggccacgacaatcctagaggtattgagagaattcaatttacaatatagggttgtttccattactcttgacgatgcatcagcaaacacaatggccatgtcgattttggagctggatctacgaagttatgttggaggcttcgttattcatcagagatgcatttgtcacatcatcaatctcatcgttcaaccatgtactaatgtttattaatgatttattgattttagtgtatgcggcatattgcttatttattttaatgtatgcaacctatttgttttgcaggcatgattgttctggagaaattgttaaacaaaatttgccgttatgttcgtatcatagcaggtaacacagtggtcaaagcgaggttccaggactactgtaaagcgaagaagaaacctgcacggatgtttggcattgatgtcaaacataggtggaacacaatgtacctattgttgcgacaattaaaagggtatgaggagttaatttatgttttcatcaattcgatgcatgtcagaatgaaggatatcgatgacgacggtgatggtgagatttttattctcaccgatcaggactgggagatcgctacacatgtgcgtaaatttctgaagcccttttataatgctacagttcaattatcaggaatttactatcctacagcttgtttggtgcttaagtggatttggaagctggcacttgtttttgatgaaaaccagtctgatcgtattctgtcttccattgttaaacccatgaaataaaaatttctcaaatacttcaccggtatacctcacctttattgctttgctttgatacttgatcctcgcaaaaagttggaaatcaccaaggttgccatgaactcaataggtgatacagtggggcttgattattctgaagcttttcaacatgtcaatgatgagctctatagggttttccgtctgtaccgaaccaagcttggtggtactccccgagttcctgagcagacctcacaaaagaaagcaagcaagtcaagtgcagtaaatttgtgaaagcagtatataggcaacgaccaagcctctccatcctcagagaaaaaatcaacatggaacccgatttagagcttaaccactacctcatcacaatcatactgagcatgatccgacgcttgatggcgacggtgtcgatctccttgggtggtggaaagagaaagagcgaactcttccagtgttagcccactttgctcaagatattcttctggttccggcctcctccgtctcttccgagcaagcattcaacgttactggaagaattattgaagaacgaaggtcatgcctgacacctgagacggttgagttaatcttttgacttaaagactagatggaagcagatgaacgaacgcaacactgtctacatgatcaagagcttgccgatgcaatggaagacgcattggcggaaatttgccttaccaaagatgatggtggtgttgatccggagtaattgatgctataatgtaaaatagttgttgtactcttttttccttacgagggaaccatactctagggcgtaaggtttttaacgaggcaacaactgtctatgttcaacagctggaaaaatttgactaactccattcgactgcctgcccacaaatatgtgttgaatgtcaggccatctagggtacctattgcttccttcaatctctccataaactagactcagttctcattggtctctgagttagtcacaacaatagctactggatacatccagttgtgcccatctactgcacaagctatggacaactgccccctaaacctccctattaaaaaagactatctagtgcaagatatggtcaacatcctctaagaaatccatcaacacatgctttcagtgcgaagaatagcctattaaatctaatcttcttgtttatggtgtgatgatcaataacaagaaataatccaggacttgattcttctaactgggccttaagcctatacaggttattgaaactcttgtcccagggcccataaatcttatccatgacaagatatttacctttgtacactcttatagggcaccacaactttatagtgttccttcaacctcctccgcagttctgttgcgtcaatattttcatcttccttcggcccatcaaggacctgactgcacacctagaattgagttacccccacacatattccttgcctcctagtgctcagacatgtatgaggttttggaactcttttcacctagaaaccagtcaagcaattcacaagttagaatccacaaaattgaatgaaaactggtagcaatcaaataaaataatttagtaacacatcacctaaatagtgtgtccatcctttcctgttgaggcatgaagtctccgcaggcagccatcattcttttgtgcgcaattcaccctgtatctccctgtatcattcttctcaatgtcatagttgtactcatgtttaacagcatggctagctaaagcaatcttaaaagaatccatatatgaataaacagttcctactgacataggagggtccttcttatcataaaaagcatcaagcatattttctggctccctgtctttaatttcatcatcaatgtcttctacttcattatcagatgattcataataaaagtcagtctcatggcattcatcatcactagaactgtcacattccctttcttcactcccaccttggttctaaggattagaaggagtaggggtatagttgggctccatatcaatgtacaga

SEQ ID NO: 18648 - DNA, 4784 bp, Oryza sativa
ttcctgcagcccctcctccaagctagatagcagccatgctatccgccaccacagccaaagtcaaagcagccacaacctcttcatttgcagccaaggtcaccatgttctgtctgatagctaggatctccattgagattttttctggagccctgttcatcaccgttttcgagttgaaagccacgcacattgctgtcaagacctccttagtttgctgctctattgcggtatcatcaacaacagtgagcaacccagtgttccctgaaacacaacattaattaagctataagtctgtagctgaacctcctcttaatgacatagaggatgaccccactccatttttcagtcggtttgggtcccgatctcccataatgacatcatcatcattcctcttttgttcactgtaatcacactgattatcttcgagagaaggccaatggaggcaattgtttagtggcttggaaaagagtgtgccgtcctctcatgtatcttgggatcttgaatttggagtatatgaattggtgtcacatcctgatttttgtttcaggatttataaattatttaataaattattattagaatttatattaaatgttcattaatttacaagtgaagttaaatgtgggaaataaaattttctaaatataaagcatggatgtatttaatttttattaaattgtccatggttaattatactctctggaattttctcagatttttcggagctcaattcctaattttaatcatacaaagagcatttcagtaattacccacatattaaattaatcattaaatggtctaattataatttttttaagtactttgagtgtccaattattttcaggatttttcttgaaattatttgagcattggaagtatttttaacaattcaaagatcatttaagtgattattttaattggaaaagtaataataatcctcttcctagtcttgggccctttccggcccatctccctcttttgtgtgcacggccgtgcagccctagtcggcccagccgagtttcccccttctctttctttctttgctttgttttcagccagcccaagacgaaaagtctaatttgcctccctcgacactgtttatcttctacctctagcagccgaactgagaccgatttggctcggtttttctcctccaaatctgacctttccccttgtgtttttctaaaattagttgaggcgaaatattcctcttatcctcctctatctttacccccaaaaaatcggagctaatcgttgagtatctcatccgaatcgaactcgttttcgagtttatctccaaaaccgagtttttgatttccccgatcgatttcttgcgggaggagtccgatctcttcaatccaaggctataaaaaggaccccctagtcctcctctttcgtttgccccctctcccgtgatcttccgtgcctcgtagcgccgccgccacgtgctccaccccgccgtcgtcgccggccgagctccatccgcgtcgcgccgtcgcctccgtcgtcgccgccggtcgccgtcaccgccgtaaggtgcgcgggagggtggagaagcccgccgcctgacccccgaagccgctgatcaccggagccccgtcgccgccgtcgaccgaagccgcgccgccgctagaccccgtcgccggccgtcgtcgttcgtcgtttggttcgagggtgagtaccgttgggttcgtctcgtcgtcctctacgtgtacatgtcctccaaagtcgcagccgaccatccaatctccggcgaggtcgccatcttggtccggccattgatgaggtcatcatgacgtcatcatcgtttttctttttcctgtttttctaatagattaaatcttcagaaattcataactaaatcatcttagctcggatttagttggttcaagtctctaaatttttctaaaattgagatgtacatgttaaaaatatccacatgtactgttcatgcttgtttatgtgctgttttggtgtttttgctcttttctgtttagattccgacgtttccggagagtccgttttcgcaggagaagaatttgaagagttccaaggccagcaaggcaagtcacacagatcccaaacaaccctttgagcatgttgaacctgtttaaagctattgatttatttcaacttatgcattgttttcgaatgtcattgggtggtgagcctttcccctttaattatggccgaagatgactttattttcctatgggttataatttgactagcatggaccttatatattggattggttcagctagatgttatttatagttgcttagccatgcttagaaacaatagctcactaatgggataaatcatgcttcactatcacttatggatatttaatggaagttcacgacggttgatcgtgattggttaattaattacttgtcaactaaaacctgataatggtgggttgtgagcacatggttttgatggtcgtgctcatgacaattaaggaccggttcatgagtttcggatgtgaaacatttaccgtgccaaccacaagccagcgtgggcaacggctttaccttttgtatagcatggttcattgcggggcacccgactgagaagtggcggagataagcccacgggggtcgctggggagtctatgcctctggtttttgagggggtgattatgatccaggaatggtgcgctgcagtggattgtgttatgcaaggggtaatgtcacagctcctttccgaggtaccgtggtggtattgaggcacatggtgacatgatgtggggctgtgtcttgtgggtacagtggtacacctctgatcagagtaaaactattcgaatagccgtgcccgcggttatgggcggattgagcaatgtttttcgtgattagtctcacacctctcacaataattatggatgttatacctggtaataatttgcttagctcctggtttggagttagatctgtacagccgggtatggttgttcaggatggttgggcctgtgcagcatgggtgtgttgttcagtgttgattaaaatttctgattaattactccactgttttacttctcttaaatgttttgctaaatgctgcttttgcaaatgagcctatattaggctatcctttggtatccttgtgcacttgcatatttgttgtgtggcttgttgagtatgtcatatgctcattcttgcaataatcaatcaacctcagttgaagaaaaaggatccagaaggagaagacgtttggcttataccccagttgagctgcctgtgggagtggagctgaagccatcgctagaccgttattccgctgctgttttcttttcttttgtaagtgtgtaacgttattattatgatggatttgtatattaaattgtcagtttgtgtaccttggctgattcctggacgaggattttatgcacaaataagttcggaaattactagtgaatttccgggcgtgacaattggacacttcgaatcaggtggctttggttccaaaagacagatagcactcgtgcttggcagggaatgcctgtgcaagttcctcgcatggcacctaaactttttaaaatggcaatgttttcccatgggggtatggactctccactctctttgggacaaacagatgtcttgagggaaagtctatcacggaaatagctccaaaccttttttagttgattgctaaaaggtggtaaagaacttggtcaaccaaaaatgggtctcggacatcaaagagcctttgacagttatggttattacggaatatctccatgtttggatagcattgcaaggggtaatcttgtatgaggagctagatcatcgccaatagaagcatattggatctggtgtttacacttctaaatcagcttatgcatctctttttgttgggaccatccggtttgccccatggagaaggaattggaataattgggggctatacaagctttttatgtgacttgcggtttacaatagatgttggacagccgaccgccttgccaagtgaggcttgcctcatccagcggcttgccccctttgtgaccaagatgatgaatccatacaacatatttcggtcaatttgtgttcagtagtcaagtttggacttcgattttggaaaggcttggtttatattccacacttcccgatcataactctagagttttctctagttggtggtcaagagcagcgaaaggccggttgagaaaaaatgggctcaacttgatgattattttggtcgcttgggagatttggaaacatagaaatgattgtgttttcaatggagttgtccctaatgtggaagttgtcctccaagctgtcgctagcgagggcgccctttagtgttcggcaggggcatcaagactagtgagttttccgctatggcaataatgctagctccgtagagaggttgacgtgagcatgtgtttgtgtttttttagttttggtgttgtctattgtaagatcttgtgggggttaaacccgccacttttcttaatttgtctcttaatgaaatgatatacagatctcttgtgtattcggggaaaaaaaacactgatcatcttcatctatcttttcatttccgattcctcctcgggcatttccaattcaaagaaaacctcatagctatggatgactacctcagttctaaagtgtaatgacttttaactatgtaaaaaaataaagatatgttcggatacagaattagaaattgttttattttgagatgggatagtatttagtttattggttataatctagtttcatttctttatcgacttctctttttttaatgtcctctaaatattcaatgctactgctggtgcg

SEQ ID NO: 18649 - DNA, 3643 bp, Oryza sativa
catagtgaagcgcaagaagaatggagacggggatttcaatttgccaactttttcataaaaataaaataaaattatgggatttatgagaaacttgatagggttttaatgtccacagagtgggaacaaaaatttcctctgtcttctgtggtggctcttaatagggatatttctgtcttatgtggtggctcttaatagggatatttctgatcatactcctttactgttgaatacaaattcctcatctctcagtaatactcaatagagttttaagtttgaacttggttggctattacgagatggttttgttcatatggtgaaagaaatttggtcttgtgttgacgaaggcaatactgctatggagcggtggctggcaaaaattcgtcggttgcgacaacatcttaggggttggtcaaaacatactagtggagtttataaaaagaaaagaaagaaattttagataagttagatttgctagataaaaaggctgaaacttctcttttgagtccggaagaattggatattagatggttttacaggaacagattatcatctattttgagagaggaggaaattaaatggtatcagagggctaaatcaaaagacatcttagagggtgattctaacacaaaggattttcatttagttgcgaatggtaaacataggaaaactagaatttttcagttacaggatggtgaccatttgatacatggtgatgcaaatttaaaatcgcatattactacttattataagggtctttttggtctacctaaggaatctcaacttcaattgatgagagtaaagttgctgatattcctcaagtttctcatatagagaatgaggctttaatacaggaatttactgaaacagagattaaggaggctatctttcagatggagcacaataaagccccggatcccgatggttttcctgctgaattttgtcaagttttctggagtgttattaaaaatgatttacttgacttgtttaaagagtttcataatggttctttacctttattctcgcttaactttggtaccatcattcttttacctaagtatgtagaggccatgaaaattcaacaatataggcttatatgcttacttaatgttagtttcaatttttttaccaaagttgccacaaatagaataatgtgtgttgcccaaaaggtcattagtcctactcaaactgcttttattcctgggagaaatatcatggaaggtgtggttattttgcatgagactttacatgagttatcgtaaaaataatagtggtgttatcttaaagattgactttgagaaagcttatgataaggttaaatggccctttgttcaatagactttgcggatgaagggcttctctcctaaatggtgtgagtggatagcctcttatatccaaggaggtcatattggtattaaagtcaatgatcaaattgacgataattttcaaacttataaaggctttggacaaggatgacccgttatctccaattctttttaatatagtagctaatatgttagctttgctaattaaagggctaaagagaatggttctcttaatgggggtaattcctcatcttgtggctgatggtttgtctatcttgcaatatgcatgatactatcattttcttggagcatgacttacaacaagcaaagaacttgaaattgattttatctgtatttgaaaaattatctggcctgaaaataaattttcacaaaagtgagttattttgttttaggcaggcaaaagagtgctttgatcaatattcgtctatatttggttaagctaggctcctttcatgttggatatcttggtattccaatgcattttaggaagttgagtaataatgattggatggttattgaacaaagaatagagagaaaactgagtagttggaaaggtaaacatatgtctgttggaggtagattggttttgatcaattgtgtactttcaagtttagctatgttcatgatttctttctttgagattccaaaaagggttcttcaaaagattgattattatagatcacgtttcttttggcaaggggatgaccataagaaaaaaatatagattaactagatgggatataatttgtcaacccaaagaccagggtggattgggtgttcatataagttaattaatgaggatggtgtttggcaagatttattgaagagaaagtatcttcataacccaagtggataggaaacaaggtggttttcatttttggttagggcttatgaaggtaaaaaacacattcttaaatatgggctcttggattgtgaatgatggtcaacagataagattctgggaggataaatggctaggaaatatggcctttacggataagtatctatctttatatgctattgttaggaggaagagtgcccctattgctagtgttatgggctctgtcccgctaaatgtttcttttaggagagctttagttgggcagaatctaacaatttggcatgatttgtgtgcttctattgctcatatccagttggatgatactggtgattgttttagatggaattatcatcagaatagccagttttcggtaagatcaatgtacttagctttaattagtaatggttacattgatagaaataagttcatttggaagcttaagatgccgcttaagattaagaactttatgtggtactgctcaaaggagtcgtcttaactaaggataatctaacgcgacggaattggaatgggtgtttaagatgttgtttttgcatgaaaaataagacgattcaacacttgtttatggattgccattatgcaaagtttatttggagagctgctcggttttcttttggattacaccctcctagaagcatacctcatatgtttgacggttggcttcagggtgtggataaagaaaagagaaaattgatacttgttggtacatctgccttatgttgagccctgtggtcgtgtagaaatgatagggtttttgacaaaacgccatctgtttctgtaacatcctgaaaatttacaattttctaatcctgcatcatgccacttcttatgtttttaataatttcctaaacctaggaaaatataattagtgggacctcctaaaactaacttgcataaaatccctctatggtatttaacttcttttgtgtttttcatttaaagatatatttggttaaattaaggtgtttcttgatttggttttaaattaaaaccttctttcgacaaaattcctcttattcaaatttagttgaaaacccttttcatttgtatgaattatggtccaagaaaaccctccaaaccaactctttgtaattccgattttaattggaattaattgtcgacccatcctttgattccaaacctatccttagttcccttgacaaatctcaagtatccaaattcctcctttcaatctagccgccaatttaattcccatggcttgattcctcctcggcacaagaagatatatttcatccttccatcccaaatccaaaacctcatttagcccataattaattctagatttcctaccacatattttgggctaaaattttatttattccattccctccattttcctcccacattcccaattatatatctctctcccccatttgagtgcatctatataaattcaactacattccacttccaaaaatat
